United States Patent Application Publication US 2020/0163878 A1 - sequence listing, part 25

SEQ ID NO: 92392 - RNA, 1755 nt, Artificial Sequence
  derived and/or modified CDS sequence (opt1) from hemagglutinin__InfluenzaB__AIL94999
augaaggccaucaucgugcugcucauggucgugaccagcaacgccgaccgcaucugcaccggcaucacguccagcaacagcccccacguggucaagaccgcgacccagggggaggugaacgugaccggcgucaucccgcugacgaccacccccaccaaguccuacuucgccaaccugaaggggacgcggacccgcggcaagcucugccccgacugccugaacugcaccgaccuggacguggcccucgggcggcccaugugcgugggcaccacgccguccgccaaggccagcauccugcacgagguccgccccgugaccuccggcugcuuccccaucaugcacgaccggaccaagauccgccagcugcccaaccuccugcggggguacgagaacauccgccugagcacccagaacgugaucgacgcggagaaggccccgggcgggcccuaccggcucggcacguccgggagcugccccaacgccaccuccaagaccggcuucuucgccaccauggcgugggccguccccaaggacaacuacaagaacgccacgaacccgcugaccguggaggugcccuacaucugcaccgagggcgaggaccagaucaccgucuggggguuccacagcgacaacaagacgcagaugaagaaccuguacggcgacuccaacccccagaaguucaccagcuccgccaacggggugaccacccacuacgugagccagaucggcgacuuccccgaccagacggaggacggcgggcucccgcaguccggccgcaucgucguggacuacaugaugcagaagcccgggaagaccggcaccaucguguaccagcgcgggguccugcugccccagaagguguggugcgccagcggccgguccaaggugaucaagggcagccucccccugaucggggaggcggacugccugcacgagaaguacggcgggcucaacaagagcaagccguacuacaccggcgagcacgccaaggccaucgggaacugccccaucugggucaagacgccccugaagcuggccaacggcaccaaguaccggcccccggccaagcuccugaaggagcgcggcuucuucggggcgaucgccggcuuccuggagggcgggugggaggggaugaucgccggcuggcacggcuacaccucccacggggcccacggcguggccgucgcggccgaccucaagagcacccaggaggccaucaacaagaucacgaagaaccugaacucccugagcgagcucgaggugaagaaccugcagcggcuguccggggccauggacgagcuccacaacgagauccuggagcuggacgagaagguggacgaccuccgcgccgacaccaucagcucccagaucgagcuggcgguccugcucagcaacgagggcaucaucaacuccgaggacgagcaccuccuggcccuggagcggaagcugaagaagaugcugggccccagcgccguggacaucgggaacggcugcuucgagaccaagcacaagugcaaccagaccugccucgaccgcaucgccgcggggaccuucaacgccggcgaguucucccugcccacguucgacagccugaacaucaccgccgccucccucaacgacgacgggcuggacaaccacaccauccugcuguacuacagcaccgccgcguccagccucgccgugacgcugaugcuggccaucuucaucgucuacauggugucccgggacaacgugagcugcuccaucugccucuga

SEQ ID NO: 92393 - RNA, 1755 nt, Artificial Sequence; identical to SEQ ID NO: 90591
  derived and/or modified CDS sequence (opt1) from hemagglutinin__InfluenzaB__AIL95010

SEQ ID NO: 92394 - RNA, 1755 nt, Artificial Sequence; identical to SEQ ID NO: 90844
  derived and/or modified CDS sequence (opt1) from hemagglutinin__InfluenzaB__AIL95021

SEQ ID NO: 92395 - RNA, 1758 nt, Artificial Sequence; identical to SEQ ID NO: 90672
  derived and/or modified CDS sequence (opt1) from hemagglutinin__InfluenzaB__AIL95032

SEQ ID NO: 92396 - RNA, 1755 nt, Artificial Sequence; identical to SEQ ID NO: 90844
  derived and/or modified CDS sequence (opt1) from hemagglutinin__InfluenzaB__AIL95043

SEQ ID NO: 92397 - RNA, 1758 nt, Artificial Sequence; identical to SEQ ID NO: 90718
  derived and/or modified CDS sequence (opt1) from hemagglutinin__InfluenzaB__AIL95054

SEQ ID NO: 92398 - RNA, 1758 nt, Artificial Sequence; identical to SEQ ID NO: 90672
  derived and/or modified CDS sequence (opt1) from hemagglutinin__InfluenzaB__AIL95065

SEQ ID NO: 92399 - RNA, 1758 nt, Artificial Sequence; identical to SEQ ID NO: 90669
  derived and/or modified CDS sequence (opt1) from hemagglutinin__InfluenzaB__AIL95076

SEQ ID NO: 92400 - RNA, 1758 nt, Artificial Sequence; identical to SEQ ID NO: 90672
  derived and/or modified CDS sequence (opt1) from hemagglutinin__InfluenzaB__AIL95087

SEQ ID NO: 92401 - RNA, 1755 nt, Artificial Sequence; identical to SEQ ID NO: 90844
  derived and/or modified CDS sequence (opt1) from hemagglutinin__InfluenzaB__AIL95098

SEQ ID NO: 92402 - RNA, 1758 nt, Artificial Sequence; identical to SEQ ID NO: 92183
  derived and/or modified CDS sequence (opt1) from hemagglutinin__InfluenzaB__AIL95109

SEQ ID NO: 92403 - RNA, 1758 nt, Artificial Sequence
  derived and/or modified CDS sequence (opt1) from hemagglutinin__InfluenzaB__AIL95120
augaaggccaucaucgugcugcucauggucgugaccagcaacgccgaccgcaucugcaccggcaucacguccagcaacagcccccacguggucaagaccgcgacccagggggaggugaacgugaccggcgucaucccgcugacgaccacccccaccaagagccacuucgccaaccugaaggggacggagacccggggcaagcucugccccaagugccugaacugcaccgaccuggacguggcccucgggcgccccaagugcaccggcaagaucccguccgcccgggugagcauccugcacgagguccgccccgugacguccggcugcuuccccaucaugcacgaccggaccaagauccgccagcugcccaaccuccugcggggguacgagcacauccgccugagcacccacaacgugaucaacgccgagaacgcgccgggcgggcccuacaagaucggcaccuccgggagcugccccaacgucacgaacggcaacggcuucuucgccaccauggccugggccgugcccaagaacgacaagaacaagaccgcgaccaacccgcucacgaucgaggugcccuacaucugcaccgagggggaggaccagaucaccgucuggggcuuccacuccgacaacgagacccagauggccaagcuguacggggacagcaagccccagaaguucacguccagcgccaacggcgugaccacccacuacgugucccagaucggcggguuccccaaccagaccgaggacggcgggcugccgcagagcggccggaucgucguggacuacauggugcagaaguccgggaagacgggcaccaucaccuaccagcgcggcauccuccugccccagaaggucuggugcgccagcgggcgguccaaggugaucaagggcagccugccccucaucggggaggccgacugccugcacgagaaguacggcgggcugaacaagagcaagcccuacuacaccggcgagcacgcgaaggccaucggcaacugcccgaucugggugaagacgccccucaagcuggccaacgggaccaaguaccgcccgcccgccaagcugcucaaggagcggggcuucuucggggccaucgcgggcuuccuggagggcgggugggagggcaugaucgccggguggcacggcuacaccucccacggggcccacggcgucgccguggccgcggaccugaaguccacccaggaggccaucaacaagaucacgaagaaccucaacucccugagcgagcuggaggucaagaaccuccagcgccuguccggcgccauggacgagcugcacaacgagauccucgagcuggacgagaagguggacgaccugcgggccgacaccaucagcucccagaucgagcucgccgugcugcugagcaacgaggggaucaucaacuccgaggacgagcaccuccuggcgcuggagcgcaagcucaagaagaugcugggccccagcgccgucgagaucgggaacggcugcuucgagaccaagcacaagugcaaccagaccugccuggacaagaucgccgccgggaccuucgacgcgggcgaguucucccuccccacguucgacagccugaacaucaccgccgccucccugaacgacgacggccucgacaaccacaccauccugcuguacuacagcaccgccgccuccagccuggcggugacgcucaugaucgccaucuucguggucuacauggugucccgggacaacgugagcugcuccaucugccuguga

SEQ ID NO: 92404 - RNA, 1755 nt, Artificial Sequence; identical to SEQ ID NO: 92313
  derived and/or modified CDS sequence (opt1) from hemagglutinin__InfluenzaB__AKA54644

SEQ ID NO: 92405 - RNA, 1755 nt, Artificial Sequence
  derived and/or modified CDS sequence (opt1) from hemagglutinin__InfluenzaB__AKA54645
augaaggccaucaccgugcugcucauggucgugaccagcaacgccgaccgcaucugcacgggcaucaccuccagcaacagcccccacguggucaagaccgcgacccagggggaggugaacgugacgggcgucaucccgcugaccaccacccccacgaaguccuacuucgccaaccugaaggggacccggacccgcggcaagcucugccccgacugccugaacugcaccgaccuggacguggcccucgggcggcccaugugcgugggcacgaccccguccgccaaggccagcauccugcacgagguccgccccgugaccuccggcugcuuccccaucaugcacgaccggaccaagauccgccagcugcccaaccuccugcggggguacgagaagauccgccugagcacgcagaacgugaucgacgcggagaaggccccgggcgggcccuaccggcucggcaccuccgggagcugccccaacgccaccuccaagaucggcuucuucgccaccauggcgugggccguccccaaggacaacuacaagaacgccacgaacccgcugaccguggaggugcccuacaucugcaccgagggcgaggaccagaucaccgucuggggguuccacagcgacaacaagacgcagaugaagucccuguacggcgacagcaacccccagaaguucaccuccagcgccgacggggugaccacccacuacgugucccagaucggcgacuuccccgaccagacggaggacggcgggcucccgcagagcggccgcaucgucguggacuacaugaugcagaagcccgggaagaccggcaccaucguguaccagcgcgggguccugcugccccagaagguguggugcgccuccggccggagcaaggugaucaagggcagccucccccugaucggggaggcggacugccugcacgaggaguacggcgggcucaacaaguccaagccguacuacaccggcaagcacgccaaggccaucgggaacugccccaucugggucaagacgccccugaagcuggccaacggcaccaaguaccggcccccggccaagcuccugaaggagcgcggcuucuucggggcgaucgccggcuuccuggagggcgggugggaggggaugaucgccggcuggcacggcuacaccagccacggggcccacggcguggccgucgcggccgaccucaaguccacccaggaggccaucaacaagaucacgaagaaccugaacagccuguccgagcucgaggugaagaaccugcagcggcugagcggggccauggacgagcuccacaacgagauccuggagcuggacgagaagguggacgaccuccgcgccgacaccaucuccagccagaucgagcuggcgguccugcucuccaacgagggcaucaucaacagcgaggacgagcaccuccuggcccuggagcggaagcugaagaagaugcugggccccuccgccguggacaucgggaacggcugcuucgagaccaagcacaagugcaaccagaccugccucgaccgcaucgccgcggggaccuucaacgccggcgaguucagccugcccacguucgacucccugaacaucaccgccgccagccucaacgacgacgggcuggacaaccacaccauccugcuguacuacuccaccgccgcgagcucccucgccgugacgcugaugcuggccaucuucaucgucuacauggugagccgggacaacguguccugcagcaucugccucuga

SEQ ID NO: 92406 - RNA, 1755 nt, Artificial Sequence; identical to SEQ ID NO: 92313
  derived and/or modified CDS sequence (opt1) from hemagglutinin__InfluenzaB__AKA54646

SEQ ID NO: 92407 - RNA, 1755 nt, Artificial Sequence; identical to SEQ ID NO: 92313
  derived and/or modified CDS sequence (opt1) from hemagglutinin__InfluenzaB__AKA54647

SEQ ID NO: 92408 - RNA, 1758 nt, Artificial Sequence; identical to SEQ ID NO: 90911
  derived and/or modified CDS sequence (opt1) from hemagglutinin__InfluenzaB__AKA54648

SEQ ID NO: 92409 - RNA, 1755 nt, Artificial Sequence
  derived and/or modified CDS sequence (opt1) from hemagglutinin__InfluenzaB__AKA54649
augaaggccaucaucgugcugcucauggucgugaccagcaacgccgaccgcaucugcaccggcaucacguccagcaacagcccccacguggucaagaccgcgacccagggggaggugaacgugaccggcgucaucccgcugacgaccacccccaccaaguccuacuucgccaaccugaaggggacgcggacccgcggcaagcucugccccgacugccugaacugcaccgaccuggacguggcccucgggcggcccaugugcgugggcaccacgccguccgccaaggccagcauccugcacgagguccgccccgugaccuccggcugcuuccccaucaugcacgaccggaccaagauccgccagcugcccaaccuccugcggggguacgagaagauccgccugagcacccagaacgugaucgacgcggagaaggccccgggcgggcccuaccggcucggcacguccgggagcugccccaacaccaccuccaagaucggcuucuucgccaccauggccugggcgguccccaaggacaacuacaagaacgccacgaacccgcugaccguggaggugcccuacaucugcaccgagggcgaggaccagaucaccgucuggggguuccacagcgacaacaagacgcagaugaagucccuguacggcgacagcaacccccagaaguucaccuccagcgccaacggggugaccacccacuacgugucccagaucggcgacuuccccgaccagacggaggacggcgggcucccgcagagcggccgcaucgucguggacuacaugaugcagaagcccgggaagaccggcaccaucguguaccagcgcgggguccugcugccccagaagguguggugcgccuccggccggagcaaggugaucaagggcagccucccccugaucggggaggccgacugccugcacgaggaguacggcgggcucaacaaguccaagccguacuacaccggcaagcacgcgaaggccaucgggaacugccccaucugggucaagacgccccugaagcuggccaacggcaccaaguaccggcccccggccaagcuccugaaggagcgcggcuucuucggggccaucgcgggcuuccuggagggcgggugggaggggaugaucgccggcuggcacggcuacaccagccacggggcccacggcguggccgucgccgcggaccucaaguccacccaggaggccaucaacaagaucacgaagaaccugaacagccuguccgagcucgaggugaagaaccugcagcggcugagcggggccauggacgagcuccacaacgagauccuggagcuggacgagaagguggacgaccuccgcgccgacaccaucuccagccagaucgagcuggccguccugcucuccaacgagggcaucaucaacagcgaggacgagcaccuccuggcgcuggagcggaagcugaagaagaugcugggccccuccgccguggacaucgggaacggcugcuucgagaccaagcacaagugcaaccagaccugccucgaccgcaucgccgccgggaccuucaacgcgggcgaguucagccugcccacguucgacucccugaacaucaccgccgccagccucaacgacgacgggcuggacaaccacaccauccugcuguacuacuccaccgccgccagcucccucgcggugacgcugaugcuggccaucuucaucgucuacauggugagccgggacaacguguccugcagcaucugccucuga

SEQ ID NO: 92410 - RNA, 1755 nt, Artificial Sequence; identical to SEQ ID NO: 92313
  derived and/or modified CDS sequence (opt1) from hemagglutinin__InfluenzaB__AKU40581

SEQ ID NO: 92411 - RNA, 1755 nt, Artificial Sequence; identical to SEQ ID NO: 92313
  derived and/or modified CDS sequence (opt1) from hemagglutinin__InfluenzaB__AKU40592

SEQ ID NO: 92412 - RNA, 1755 nt, Artificial Sequence; identical to SEQ ID NO: 92153
  derived and/or modified CDS sequence (opt1) from hemagglutinin__InfluenzaB__AKU40603

SEQ ID NO: 92413 - RNA, 1755 nt, Artificial Sequence; identical to SEQ ID NO: 92313
  derived and/or modified CDS sequence (opt1) from hemagglutinin__InfluenzaB__AKU40614

SEQ ID NO: 92414 - RNA, 1755 nt, Artificial Sequence; identical to SEQ ID NO: 92153
  derived and/or modified CDS sequence (opt1) from hemagglutinin__InfluenzaB__AKU40625

SEQ ID NO: 92415 - RNA, 1755 nt, Artificial Sequence
  derived and/or modified CDS sequence (opt1) from hemagglutinin__InfluenzaB__AKU40636
augaaggccaucaucgugcugcucauggucgugaccagcaacgccgaccgcaucugcaccggcaucacguccagcaacagcccccacguggucaagaccgcgacccagggggaggugaacgugaccggcgucaucccgcugacgaccacccccgccaaguccuacuucgccaaccugaaggggacccggacgcgcggcaagcucugccccgacugccugaacugcaccgaccuggacguggcccucgggcggcccaugugcgugggcaccaccccguccgccaaggcgagcauccugcacgagguccgccccgugacguccggcugcuuccccaucaugcacgaccggaccaagauccgccagcugcccaaccuccugcggggguacgagaacauccgccugagcaccaagaacgugaucgacgccgagaaggccccgggcgggcccuaccggcucggcaccuccgggagcugccccaacgccacguccaagaucggcuucuucgcgaccauggccugggccguccccaaggacaacuacaagaacgccaccaacccgcugaccguggaggugcccuacaucugcaaggagggcgaggaccagaucacggucuggggguuccacagcgacaacaagacccagaugaagaaccuguacggcgacuccaacccccagaaguucaccagcuccgccaacggggugaccacgcacuacgugagccagaucggcgacuuccccgaccagaccgaggacggcgggcucccgcaguccggccgcaucgucguggacuacaugaugcagaagcccgggaagaccggcaccaucguguaccagcgcgggguccugcugccccagaagguguggugcgcgagcggccgguccaaggugaucaagggcagccucccccugaucggggaggccgacugccugcacgaggaguacggcgggcucaacaagagcaagccguacuacacgggcaagcacgccaaggccaucgggaacugccccaucugggucaagacgccccugaagcuggccaacggcaccaaguaccggcccccggcgaagcuccugaaggagcgcggcuucuucggggccaucgccggcuuccuggagggcgggugggaggggaugaucgccggcuggcacggcuacaccucccacggggcccacggcguggcggucgccgccgaccucaagagcacccaggaggccaucaacaagaucaccaagaaccugaacucccugagcgagcucgaggugaagaaccugcagcggcuguccggggccauggacgagcuccacaacgagauccuggagcuggacgagaagguggacgaccuccgcgcggacaccaucagcucccagaucgagcuggccguccugcucagcaacgagggcaucaucaacuccgaggacgagcaccuccuggcccuggagcggaagcugaagaagaugcugggccccagcgccguggacaucgggaacggcugcuucgagaccaagcacaagugcaaccagacgugccucgaccgcaucgcggccgggaccuucaacgccggcgaguucucccugcccaccuucgacagccugaacaucaccgccgccucccucaacgacgacgggcuggacaaccacaccauccugcuguacuacagcacggcggccuccagccucgccgugacccugaugcuggccaucuucaucgucuacauggugucccgggacaacgugagcugcuccaucugccucuga

SEQ ID NO: 92416 - RNA, 1755 nt, Artificial Sequence
  derived and/or modified CDS sequence (opt1) from hemagglutinin__InfluenzaB__AKU40647
augaaggccaucaucgugcugcucauggucgugaccagcaacgccgaccgcaucugcaccggcaucacguccagcaacagcccccacguggucaagaccgcgacccagggggaggugaacgugaccggcgucaucccgcugacgaccacccccaccaaguccuacuucgccaaccugaaggggacgcggacccgcggcaagcucugccccgacugccugaacugcaccgaccuggacguggcccucgggcggcccaugugcgugggcaccacgccguccgccaaggccagcauccugcacgagguccgccccgugaccuccggcugcuuccccaucaugcacgaccggaccaagauccgccagcugcccaaccuccugcggggguacgagaagauccgccugagcacccagaacgugaucgacgcggagaaggccccgggcgggcccuaccggcucggcacguccgggagcugccccaacgccaccuccaagaucggcuucuucgccaccauggcgugggccguccccaaggacaacuacaagaacgccaccaacccgcagacgguggagauccccuacaucugcaccgagggcgaggaccagaucaccguguggggguuccacagcgacaacaagacccagaugaagucccuguacggcgacagcaacccccagaaguucacguccagcgccaacggggucaccacccacuacgugucccagaucggcgacuuccccgaccagaccgaggacggcgggcugccgcagagcggccgcaucguggucgacuacaugaugcagaagcccgggaagacgggcaccaucguguaccagcgcggggugcuccugccccagaaggucuggugcgccuccggccggagcaaggugaucaagggcagccugccccucaucggggaggcggacugccugcacgaggaguacggcgggcugaacaaguccaagccguacuacaccggcaagcacgccaaggccaucgggaacugccccaucugggugaagacgccccucaagcuggccaacggcaccaaguaccggcccccggccaagcugcucaaggagcgcggcuucuucggggcgaucgccggcuuccuggagggcgggugggaggggaugaucgccggcuggcacggcuacaccagccacggggcccacggcgucgccguggcggccgaccugaaguccacccaggaggccaucaacaagaucaccaagaaccucaacagccuguccgagcuggaggucaagaaccuccagcggcugagcggggccauggacgagcugcacaacgagauccucgagcuggacgagaagguggacgaccugcgcgccgacacgaucuccagccagaucgagcucgcggugcugcuguccaacgagggcaucaucaacagcgaggacgagcaccuccuggcccuggagcggaagcucaagaagaugcugggccccuccgccgucgacaucgggaacggcugcuucgagaccaagcacaagugcaaccagaccugccuggaccgcaucgccgcggggaccuucaacgccggcgaguucagccuccccaccuucgacucccugaacaucacggccgccagccugaacgacgacgggcucgacaaccacaccauccugcuguacuacuccaccgccgcgagcucccuggccgugacccucaugcuggccaucuucaucguguacauggucagccgggacaacguguccugcagcaucugccuguga

SEQ ID NO: 92417 - RNA, 1755 nt, Artificial Sequence; identical to SEQ ID NO: 92313
  derived and/or modified CDS sequence (opt1) from hemagglutinin__InfluenzaB__AKU40658

SEQ ID NO: 92418 - RNA, 1755 nt, Artificial Sequence; identical to SEQ ID NO: 92313
  derived and/or modified CDS sequence (opt1) from hemagglutinin__InfluenzaB__AKU40669

SEQ ID NO: 92419 - RNA, 1755 nt, Artificial Sequence; identical to SEQ ID NO: 92313
  derived and/or modified CDS sequence (opt1) from hemagglutinin__InfluenzaB__AKU40680

SEQ ID NO: 92420 - RNA, 1755 nt, Artificial Sequence
  derived and/or modified CDS sequence (opt1) from hemagglutinin__InfluenzaB__AKU40691
augaaggccaucaucgugcugcucauggucgugaccagcaacgccgaccgcaucugcaccggcaucacguccagcaacagcccccacguggucaagaccgcgacccagggggaggugaacgugaccggcgucaucccgcugacgaccacccccaccaaguccuacuucgccaaccugaaggggacgcggacccgcggcaagcucugccccgacugccugaacugcaccgaccuggacguggcccucgggcggcccaugugcgugggcaccacgccguccgccaaggccagcauccugcacgagguccgccccgugaccuccggcugcuuccccaucaugcacgaccggaccaagauccgccagcugcccaaccuccugcggggguacgagaagauccgccugagcacccagaacgugaucgacgcggagaaggccccgggcgggcccuaccggcucggcacguccgggagcugccccaacgccaccuccaagaucggcuucuucgccaccauggcgugggccguccccaaggacaacuacaagaacgccaccaacccgcagacgguggaggugcccuacaucugcaccgagggcgaggaccagaucaccgucuggggguuccacagcgacaacaagacccagaugaagucccuguacggcgacagcaacccccagaaguucacguccagcgccaacggggugaccacccacuacgugucccagaucggcgacuuccccgaccagaccgaggacggcgggcugccgcagagcggccgcaucgucguggacuacaugaugcagaagcccgggaagacgggcaccaucguguaccagcgcgggguccuccugccccagaagguguggugcgccuccggccggagcaaggugaucaagggcagccugccccucaucggggaggcggacugccugcacgaggaguacggcgggcugaacaaguccaagccguacuacaccggcaagcacgccaaggccaucgggaacugccccaucugggucaagacgccccucaagcuggccaacggcaccaaguaccggcccccggccaagcugcucaaggagcgcggcuucuucggggcgaucgccggcuuccuggagggcgggugggaggggaugaucgccggcuggcacggcuacaccagccacggggcccacggcguggccgucgcggccgaccugaaguccacccaggaggccaucaacaagaucaccaagaaccucaacagccuguccgagcuggaggugaagaaccuccagcggcugagcggggccauggacgaguuccacaacgagauccuggagcucgacgagaagguggacgaccugcgcgccgacacgaucuccagccagaucgagcuggcgguccuccuguccaacgagggcaucaucaacagcgaggacgagcaccuccuggcccuggagcggaagcugaagaagaugcucggccccuccgccguggacaucgggaacggcugcuucgagaccaagcacaagugcaaccagaccugccuggaccgcaucgccgcggggaccuucaacgccggcgaguucagccugcccaccuucgacucccucaacaucacggccgccagccugaacgacgacgggcuggacaaccacaccauccuccuguacuacuccaccgccgcgagcucccuggccgugacccugaugcucgccaucuucaucgucuacauggugagccgggacaacguguccugcagcaucugccuguga

SEQ ID NO: 92421 - RNA, 1755 nt, Artificial Sequence; identical to SEQ ID NO: 92313
  derived and/or modified CDS sequence (opt1) from hemagglutinin__InfluenzaB__AKU40702

SEQ ID NO: 92422 - RNA, 1755 nt, Artificial Sequence; identical to SEQ ID NO: 92313
  derived and/or modified CDS sequence (opt1) from hemagglutinin__InfluenzaB__AKU40713

SEQ ID NO: 92423 - RNA, 1755 nt, Artificial Sequence; identical to SEQ ID NO: 92153
  derived and/or modified CDS sequence (opt1) from hemagglutinin__InfluenzaB__AKU40724

SEQ ID NO: 92424 - RNA, 1755 nt, Artificial Sequence; identical to SEQ ID NO: 92416
  derived and/or modified CDS sequence (opt1) from hemagglutinin__InfluenzaB__AKU40735

SEQ ID NO: 92425 - RNA, 1755 nt, Artificial Sequence; identical to SEQ ID NO: 92313
  derived and/or modified CDS sequence (opt1) from hemagglutinin__InfluenzaB__AKU40746

SEQ ID NO: 92426 - RNA, 1755 nt, Artificial Sequence; identical to SEQ ID NO: 92313
  derived and/or modified CDS sequence (opt1) from hemagglutinin__InfluenzaB__AKU40757

SEQ ID NO: 92427 - RNA, 1755 nt, Artificial Sequence; identical to SEQ ID NO: 92313
  derived and/or modified CDS sequence (opt1) from hemagglutinin__InfluenzaB__AKU40768

SEQ ID NO: 92428 - RNA, 1755 nt, Artificial Sequence; identical to SEQ ID NO: 92313
  derived and/or modified CDS sequence (opt1) from hemagglutinin__InfluenzaB__AKU40779

SEQ ID NO: 92429 - RNA, 1755 nt, Artificial Sequence; identical to SEQ ID NO: 92153
  derived and/or modified CDS sequence (opt1) from hemagglutinin__InfluenzaB__AKU40790

SEQ ID NO: 92430 - RNA, 1755 nt, Artificial Sequence; identical to SEQ ID NO: 92313
  derived and/or modified CDS sequence (opt1) from hemagglutinin__InfluenzaB__AKU40801

SEQ ID NO: 92431 - RNA, 1755 nt, Artificial Sequence
  derived and/or modified CDS sequence (opt1) from hemagglutinin__InfluenzaB__AKU40812
augaaggccaucaucgugcugcucauggucgugaccagcaacgccgaccgcaucugcaccggcaucacguccagcaacagcccccacguggucaagaccgcgacccagggggaggugaacgugaccggcgucaucccgcugacgaccacccccaccaaguccuacuucgccaaccugaaggggacgcggacccgcggcaagcucugccccgacugccugaacugcaccgaccuggacguggcccucgggcggcccaugugcgugggcaccacgccguccgccaaggccagcauccugcacgagguccgccccgugaccuccggcugcuuccccaucaugcacgaccggaccaagauccgccagcugcccaaccuccugcggggguacgagaagauccgccugagcacccagaacgugaucgacgcggagaaggccccgggcgggcccuaccggcucggcacguccgggagcugccccaacgccaccuccaagaucggcuucuucgccaccauggcgugggccguccccaaggacaacuacaagaacgccaccaacccgcagacgguggaggugcccuacaucugcaccgagggcgaggaccagaucaccgucuggggguuccacagcgacaacaagacccagaugaagucccuguacggcgacagcaacccccagaaguucacguccagcgccaacggggugaccacccacuacgugucccagaucggcgacuuccccgaccagaccgaggacggcgggcugccgcagagcggccgcaucgucguggacuacaugaugcagaagcccgggaagacgggcaccaucguguaccagcgcgggguccuccugccccagaagguguggugcgccuccggccggagcaaggugaucaagggcagccugccccucaucggggaggcggacugccugcacgaggaguacggcgggcugaacaaguccaagccguacuacaccggcaagcacgccaaggccaucgggaacugccccaucugggucaagacgccccucaagcuggccaacggcaccaaguaccggcccccggccaagcugcucaaggagcgcggcuucuucggggcgaucgccggcuuccuggagggcgggugggaggggaugaucgccggcuggcacggcuacaccagccacggggcccacggcguggccgucgcggccgaccugaaguccacccaggaggccaucaacaagaucaccaagaaccucaacagccuguccgagcuggaggugaagaaccuccagcggcugagcggggccauggacgagcugcacaacgagauccucgagcuggacgagaagguggacgaccugcgcgccgacacgaucuccagccagaucgagcucgcgguccugcuguccaacgagggcaucaucaacagcgaggacgagcaccuccuggcccuggagcggaagcucaagaagaugcugggccccuccgccguggacaucgggaacggcugcuucgagaccaagcacaagugcaaccagaccugccuggaccgcaucgccgcggggaccuucaacgccggcgaguucagccuccccaccuucgacucccugaacaucacggccgccagccugaacgacgacgggcucgacucccacaccauccugcuguacuacagcaccgccgcguccagccuggccgugacccucaugcuggccaucuucaucgucuacauggugucccgggacaacgugagcugcagcaucugccuguga

SEQ ID NO: 92432 - RNA, 1755 nt, Artificial Sequence; identical to SEQ ID NO: 92313
  derived and/or modified CDS sequence (opt1) from hemagglutinin__InfluenzaB__AKU40823

SEQ ID NO: 92433 - RNA, 1755 nt, Artificial Sequence; identical to SEQ ID NO: 92313
  derived and/or modified CDS sequence (opt1) from hemagglutinin__InfluenzaB__AKU40834

SEQ ID NO: 92434 - RNA, 1755 nt, Artificial Sequence; identical to SEQ ID NO: 92313
  derived and/or modified CDS sequence (opt1) from hemagglutinin__InfluenzaB__AKU40845

SEQ ID NO: 92435 - RNA, 1755 nt, Artificial Sequence; identical to SEQ ID NO: 92313
  derived and/or modified CDS sequence (opt1) from hemagglutinin__InfluenzaB__AKU40856

SEQ ID NO: 92436 - RNA, 1755 nt, Artificial Sequence; identical to SEQ ID NO: 92313
  derived and/or modified CDS sequence (opt1) from hemagglutinin__InfluenzaB__AKU40867

SEQ ID NO: 92437 - RNA, 1755 nt, Artificial Sequence; identical to SEQ ID NO: 92313
  derived and/or modified CDS sequence (opt1) from hemagglutinin__InfluenzaB__AKU40878

SEQ ID NO: 92438 - RNA, 1758 nt, Artificial Sequence
  derived and/or modified CDS sequence (opt1) from hemagglutinin__InfluenzaB__AKU40889
augaaggccaucaucgugcugcucauggucgugaccagcaacgccgaccgcaucugcaccggcaucacguccagcaacagcccccacguggucaagaccgcgacccagggggaggugaacgugaccggcgucaucccgcugacgaccacccccaccaagagccacuucgccaaccugaaggggacggagacccggggcaagcucugccccaagugccugaacugcaccgaccuggacguggcccucgggcgccccaagugcaccggcaagaucccguccgcccgggugagcauccugcacgagguccgccccgugacguccggcugcuuccccaucaugcacgaccggaccaagauccgccagcugcccaaccuccugcggggguacgagcacauccgccugagcacccacaacgugaucaacgccgaggacgcgccgggcgggcccuacaagaucggcaccuccgggagcugccccaacgucacgaacggcaacggcuucuucgccaccauggccugggccgugcccaagaacgacaagaacaagaccgcgaccaacccgcucacgaccgaggugcccuacaucugcaccgagggggaggaccagaucaccgucuggggcuuccacuccgacaacgagacgcagauggccaagcuguacggggacagcaagccccagaaguucaccuccagcgccaacggcgugaccacccacuacgugucccagaucggcggguuccccaaccagacggaggacggcgggcugccgcagagcggccggaucgucguggacuacauggugcagaaguccgggaagaccggcaccaucaccuaccagcgcggcauccuccugccccagaaggucuggugcgccagcgggcgguccaaggugaucaagggcagccugccccucaucggggaggccgacugccugcacgagaaguacggcgggcugaacaagagcaagcccuacuacacgggcgagcacgcgaaggccaucggcaacugcccgaucugggugaagacgccccucaagcuggccaacgggaccaaguaccgcccgcccgccaagcugcucaaggagcggggcuucuucggggccaucgcgggcuuccuggagggcgggugggagggcaugaucgccggguggcacggcuacaccucccacggggcccacggcgucgccguggccgcggaccugaaguccacccaggaggccaucaacaagaucaccaagaaccucaacucccugagcgagcuggaggucaagaaccuccagcgccuguccggcgccauggacgagcugcacaacgagauccucgagcuggacgagaagguggacgaccugcgggccgacaccaucagcucccagaucgagcucgccgugcugcugagcaacgaggggaucaucaacuccgaggacgagcaccuccuggcgcuggagcgcaagcucaagaagaugcugggccccagcgccgucgagaucgggaacggcugcuucgagaccaagcacaagugcaaccagaccugccuggaccggaucgccgccgggacguucgacgcgggcgaguucucccuccccaccuucgacagccugaacaucaccgccgccucccugaacgacgacggccucgacaaccacaccauccugcuguacuacagcacggccgccuccagccuggcggugacccucaugaucgccaucuucguggucuacauggugucccgcgacaacgugagcugcuccaucugccuguga

SEQ ID NO: 92439 - RNA, 1755 nt, Artificial Sequence; identical to SEQ ID NO: 92313
  derived and/or modified CDS sequence (opt1) from hemagglutinin__InfluenzaB__AKU40900

SEQ ID NO: 92440 - RNA, 1755 nt, Artificial Sequence; identical to SEQ ID NO: 92153
  derived and/or modified CDS sequence (opt1) from hemagglutinin__InfluenzaB__AKU40911

SEQ ID NO: 92441 - RNA, 1755 nt, Artificial Sequence
  derived and/or modified CDS sequence (opt1) from hemagglutinin__InfluenzaB__AKU40922
augaaggccaucaucgugcugcucauggucgugaccagcaacgccgaccgcaucugcaccggcaucacguccagcaacagcccccacguggucaagaccgugacccagggggaggugaacgucaccggcgugaucccgcugacgaccacccccaccaaguccuacuucgcgaaccugaaggggacgcggacccgcggcaagcucugccccgacugccugaacugcaccgaccuggacguggcccucgggcggcccaugugcgucggcaccacgccguccgccaaggccagcauccugcacgaggugcgccccgugaccuccggcugcuuccccaucaugcacgaccggaccaagauccgccagcugcccaaccuccugcggggguacgagaagauccgccugagcacccagaacgucaucgacgccgagaaggcgccgggcgggcccuaccggcucggcacguccgggagcugccccaacgccaccuccaagaucggcuucuucgccaccauggccugggcggugcccaaggacaacuacaagaacgccaccaacccgcagacgguggagguccccuacaucugcaccgagggcgaggaccagaucaccguguggggguuccacagcgacaacaagacccagaugaagucccuguacggcgacagcaacccccagaaguucacguccagcgccaacggggugaccacccacuacgucucccagaucggcgacuuccccgaccagaccgaggacggcgggcugccgcagagcggccgcaucgugguggacuacaugaugcagaagcccgggaagacgggcaccaucgucuaccagcgcggggugcuccugccccagaagguguggugcgccuccggccggagcaaggucaucaagggcagccugccccucaucggggaggccgacugccugcacgaggaguacggcgggcugaacaaguccaagccguacuacaccggcaagcacgcgaaggccaucgggaacugccccaucugggugaagacgccccucaagcuggccaacggcaccaaguaccggcccccggccaagcugcucaaggagcgcggcuucuucggggccaucgcgggcuuccuggagggcgggugggaggggaugaucgccggcuggcacggcuacaccagccacggggcccacggcgucgccguggccgcggaccugaaguccacccaggaggccaucaacaagaucaccaagaaccucaacagccuguccgagcuggaggugaagaaccuccagcggcugagcggggccauggacgagcugcacaacgagauccucgagcuggacgagaaggucgacgaccugcgcgccgacacgaucuccagccagaucgagcucgccgugcugcuguccaacgagggcaucaucaacagcgaggacgagcaccuccuggcgcuggagcggaagcucaagaagaugcugggccccuccgccguggacaucgggaacggcugcuucgagaccaagcacaagugcaaccagaccugccuggaccgcaucgccgccgggaccuucaacgcgggcgaguucagccuccccaccuucgacucccugaacaucacggccgccagccugaacgacgacgggcucgacaaccacaccauccugcuguacuacuccaccgccgccagcucccuggcggucacccucaugcuggccaucuucaucguguacauggugagccgggacaacgucuccugcagcaucugccuguga

SEQ ID NO: 92442 - RNA, 1755 nt, Artificial Sequence; identical to SEQ ID NO: 92416
  derived and/or modified CDS sequence (opt1) from hemagglutinin__InfluenzaB__AKU40933

SEQ ID NO: 92443 - RNA, 1755 nt, Artificial Sequence; identical to SEQ ID NO: 92313
  derived and/or modified CDS sequence (opt1) from hemagglutinin__InfluenzaB__AKU40944

SEQ ID NO: 92444 - RNA, 1755 nt, Artificial Sequence; identical to SEQ ID NO: 92313
  derived and/or modified CDS sequence (opt1) from hemagglutinin__InfluenzaB__AKU40955

SEQ ID NO: 92445 - RNA, 1755 nt, Artificial Sequence; identical to SEQ ID NO: 92313
  derived and/or modified CDS sequence (opt1) from hemagglutinin__InfluenzaB__AKU40966

SEQ ID NO: 92446 - RNA, 1755 nt, Artificial Sequence; identical to SEQ ID NO: 92313
  derived and/or modified CDS sequence (opt1) from hemagglutinin__InfluenzaB__AKU40977

SEQ ID NO: 92447 - RNA, 1755 nt, Artificial Sequence; identical to SEQ ID NO: 92313
  derived and/or modified CDS sequence (opt1) from hemagglutinin__InfluenzaB__AKU40987

SEQ ID NO: 92448 - RNA, 1755 nt, Artificial Sequence; identical to SEQ ID NO: 92313
  derived and/or modified CDS sequence (opt1) from hemagglutinin__InfluenzaB__AKU40998

SEQ ID NO: 92449 - RNA, 1755 nt, Artificial Sequence; identical to SEQ ID NO: 92313
  derived and/or modified CDS sequence (opt1) from hemagglutinin__InfluenzaB__AKU41009

SEQ ID NO: 92450 - RNA, 1755 nt, Artificial Sequence; identical to SEQ ID NO: 92313
  derived and/or modified CDS sequence (opt1) from hemagglutinin__InfluenzaB__AKU41020

SEQ ID NO: 92451 - RNA, 1755 nt, Artificial Sequence; identical to SEQ ID NO: 92313
  derived and/or modified CDS sequence (opt1) from hemagglutinin__InfluenzaB__ALA08485

SEQ ID NO: 92452 - RNA, 1755 nt, Artificial Sequence; identical to SEQ ID NO: 92313
  derived and/or modified CDS sequence (opt1) from hemagglutinin__InfluenzaB__ALA08486

SEQ ID NO: 92453 - RNA, 1755 nt, Artificial Sequence; identical to SEQ ID NO: 92313
  derived and/or modified CDS sequence (opt1) from hemagglutinin__InfluenzaB__ALA08487

SEQ ID NO: 92454 - RNA, 1755 nt, Artificial Sequence; identical to SEQ ID NO: 92313
  derived and/or modified CDS sequence (opt1) from hemagglutinin__InfluenzaB__ALA08564

SEQ ID NO: 92455 - RNA, 1755 nt, Artificial Sequence; identical to SEQ ID NO: 92313
  derived and/or modified CDS sequence (opt1) from hemagglutinin__InfluenzaB__ALA08565

SEQ ID NO: 92456 - RNA, 1755 nt, Artificial Sequence; identical to SEQ ID NO: 92313
  derived and/or modified CDS sequence (opt1) from hemagglutinin__InfluenzaB__ALA08566

SEQ ID NO: 92457 - RNA, 1755 nt, Artificial Sequence; identical to SEQ ID NO: 92313
  derived and/or modified CDS sequence (opt1) from hemagglutinin__InfluenzaB__ALA08567

SEQ ID NO: 92458 - RNA, 1755 nt, Artificial Sequence; identical to SEQ ID NO: 92313
  derived and/or modified CDS sequence (opt1) from hemagglutinin__InfluenzaB__ALA08568

SEQ ID NO: 92459 - RNA, 1755 nt, Artificial Sequence; identical to SEQ ID NO: 92313
  derived and/or modified CDS sequence (opt1) from hemagglutinin__InfluenzaB__ALA08569

SEQ ID NO: 92460 - RNA, 1758 nt, Artificial Sequence
  derived and/or modified CDS sequence (opt1) from hemagglutinin__InfluenzaB__ALA08689
augaaggccaucaucgugcugcucauggucgugaccagcaacgccgaccgcaucugcaccggcaucacguccagcaacagcccccacguggucaagaccgcgacccagggggaggugaacgugaccggcgucaucccgcugacgaccacccccaccaagagccacuucgccaaccugaaggggacggagacccggggcaagcucugccccaagugccccaacugcaccgaccuggacguggcccuggggcgcccgaagugcaccggcaagauccccuccgcccgggugagcauccuccacgagguccgccccgugacguccggcugcuuccccaucaugcacgaccggaccaagauccgccagcugccgaaccugcuccggggguacgagcacauccgccugagcacccacaacgugaucaacgccgagaacgcgcccggcgggcccuacaagaucggcaccuccgggagcugccccaacgucacgaacggcaacggcuucuucgccaccauggccugggccgugccgaagaacgacaagaacaagaccgcgaccaacccccugacgaucgaggugcccuacaucugcaccgagggggaggaccagaucaccgucuggggcuuccacuccgacaacgagacccagauggccaagcucuacggggacagcaacccccagaaguucacguccagcgccaacggcgugaccacccacuacgugucccagaucggcggguucccgaaccagaccgaggacggcgggcugccccagagcggccggaucgucguggacuacauggugcagaaguccgggaagacgggcaccaucaccuaccagcgcggcauccugcucccccagaaggucuggugcgccagcgggcgguccaaggugaucaagggcagccugccccugaucggggaggccgacugccuccacgagaaguacggcgggcugaacaagagcaagccguacuacaccggcgagcacgcgaaggccaucggcaacugccccaucugggugaagacgccccugaagcucgccaacgggaccaaguaccggcccccggccaagcugcugaaggagcgcggcuucuucggggccaucgcgggcuuccucgagggcgggugggagggcaugaucgccggguggcacggcuacaccucccacggggcccacggcgucgccguggccgcggaccugaaguccacccaggaggccaucaacaagaucacgaagaaccugaacucccucagcgagcuggaggucaagaaccugcagcgccucuccggcgccauggacgagcugcacaacgagauccuggagcucgacgagaagguggacgaccugcgggccgacaccaucagcucccagaucgagcuggccgugcuccugagcaacgaggggaucaucaacuccgaggacgagcaccuccuggcgcuggagcgcaagcugaagaagaugcucggccccagcgccgucgagaucgggaacggcugcuucgagaccaagcacaagugcaaccagaccugccuggaccggaucgccgccgggaccuucgacgcgggcgaguucucccugcccacguucgacagccucaacaucaccgccgccucccugaacgacgacggccuggacaaccacaccauccuccuguacuacagcaccgccgccuccagccuggcggugacgcugaugaucgccaucuucguggucuacauggugucccgcgacaacgugagcugcuccaucugccucuga

SEQ ID NO: 92461 - RNA, 1758 nt, Artificial Sequence
  derived and/or modified CDS sequence (opt1) from hemagglutinin__InfluenzaB__ALA08690
augaaggccaucaucgugcugcucauggucgugaccagcaacgccgaccgcaucugcaccggcaucacguccagcaacagcccccacguggucaagaccgcgacccagggggaggugaacgugaccggcgucaucccgcugacgaccacccccaccaagagccacuucgccaaccugaaggggacggagacccggggcaagcucugccccaagugccugaacugcaccgaccuggacguggcccucgggcgccccaagugcaccggcaagaucccguccgcccgggugagcauccugcacgagguccgccccgugacguccggcugcuuccccaucaugcacgaccggaccaagauccgccagcugcccaaccuccugcggggguacgagcacauccgccugagcacccacaacgugaucaacgccgaggacgcgccgggcgggcccuacaagaucggcaccuccgggagcugccccaacaucacgaacggcaacggcuucuucgccaccauggccugggccguccagaagaacgacaagaacaagaccgcgaccaacccccucacgaucgaggugccguacaucugcaccgagggggaggaccagaucaccguguggggcuuccacuccgacaacgagacccagauggccaagcuguacggggacagcaagccccagaaguucacguccagcgccaacggcgucaccacccacuacgugucccagaucggcggguuccccaaccagaccgaggacggcgggcugccccagagcggccggaucguggucgacuacauggugcagaaguccgggaagacgggcaccaucaccuaccagcgcggcauccuccugccgcagaagguguggugcgccagcgggcgguccaaggucaucaagggcagccugccccucaucggggaggccgacugccugcacgagaaguacggcgggcugaacaagagcaagcccuacuacaccggcgagcacgcgaaggccaucggcaacugccccaucugggugaagacgccgcucaagcuggccaacgggaccaaguaccgcccgcccgccaagcugcucaaggagcggggcuucuucggggccaucgcgggcuuccuggagggcgggugggagggcaugaucgccggguggcacggcuacaccucccacggggcccacggcguggccgucgccgcggaccugaaguccacccaggaggccaucaacaagaucacgaagaaccucaacucccugagcgagcuggaggugaagaaccuccagcgccuguccggcgccauggacgagcugcacaacgagauccucgagcuggacgagaaggucgacgaccugcgggccgacaccaucagcucccagaucgagcucgccgugcugcugagcaacgaggggaucaucaacuccgaggacgagcaccuccuggcgcuggagcgcaagcucaagaagaugcugggccccagcgccguggagaucgggaacggcugcuucgagaccaagcacaagugcaaccagaccugccuggaccggaucgccgccgggaccuucgacgcgggcgaguucucccuccccacguucgacagccugaacaucaccgccgccucccugaacgacgacggccucgacgaccacaccauccugcuguacuacagcaccgccgccuccagccuggcggucacgcucaugaucgccaucuucgugguguacauggucucccgcgacaacgugagcugcuccaucugccuguga

SEQ ID NO: 92462 - RNA, 1755 nt, Artificial Sequence; identical to SEQ ID NO: 92313
  derived and/or modified CDS sequence (opt1) from hemagglutinin__InfluenzaB__ALE31766

SEQ ID NO: 92463 - RNA, 1758 nt, Artificial Sequence
  derived and/or modified CDS sequence (opt1) from hemagglutinin__InfluenzaB__ALE31768
augaaggccaucaucgugcugcucauggucgugaccagcaacgccgaccgcaucugcaccggcaucacguccagcaacagcccccacguggucaagaccgcgacccagggggaggugaacgugaccggcgucaucccgcugacgaccacccccaccaagagccacuucgccaaccugaaggggacggagacccggggcaagcucugccccaagugccugaacugcaccgaccuggacguggcccucgggcgccccaagugcaccggcaagaucccguccgcccgggugagcauccugcacgagguccgccccgugacguccggcugcuuccccaucaugcacgaccggaccaagauccgccagcugcccaaccuccugcggggguacgagcacauccgccugagcacccacaacgugaucaacgccgaggacgcgccgggcgggcccuacaagaucggcaccuccgggagcugccccaacaucacgaacggcaacggcuucuucgccaccauggccugggccguccccaagaacgacaagaacaagaccgcgaccaacccgcucacgaucgaggugcccuacaucugcaccgagggggaggaccagaucaccguguggggcuuccacuccgacaacgagacccagauggccaagcuguacggggacagcaagccccagaaguucacguccagcgccaacggcgucaccacccacuacgugucccagaucggcggguuccccaaccagaccgaggacggcgggcugccgcagagcggccggaucguggucgacuacauggugcagaaguccgggaagacgggcaccaucaccuaccagcgcggcauccuccugccccagaagguguggugcgccagcgggcgguccaaggucaucaagggcagccugccccucaucggggaggccgacugccugcacgagaaguacggcgggcugaacaagagcaagcccuacuacaccggcgagcacgcgaaggccaucggcaacugcccgaucugggugaagacgccccucaagcuggccaacgggaccaaguaccgcccgcccgccaagcugcucaaggagcggggcuucuucggggccaucgcgggcuuccuggagggcgggugggagggcaugaucgccggguggcacggcuacaccucccacggggcccacggcguggccgucgccgcggaccugaaguccacccaggaggccaucaacaagaucacgaagaaccucaacucccugagcgagcuggaggugaagaaccuccagcgccuguccggcgccauggacgagcugcacaacgagauccucgagcuggacgagaaggucgacgaccugcgggccgacaccaucagcucccagaucgagcucgccgugcugcugagcaacgaggggaucaucaacuccgaggacgagcaccuccuggcgcuggagcgcaagcucaagaagaugcugggccccagcgccguggagaucgggaacggcugcuucgagaccaagcacaagugcaaccagaccugccuggaccggaucgccgccgggaccuucgacgcgggcgaguucucccuccccacguucgacagccugaacaucaccgccgccucccugaacgacgacggccucgacaaccacaccauccugcuguacuacagcaccgccgccuccagccuggcggucacgcucaugaucgccaucuucgugguguacauggucucccgcgacaacgugagcugcuccaucugccuguga

SEQ ID NO: 92464 - RNA, 1758 nt, Artificial Sequence
  derived and/or modified CDS sequence (opt1) from hemagglutinin__InfluenzaB__ALE31770
augaaggccaucaucgugcugcucauggucgugaccagcaacgccgaccgcaucugcaccggcaucacguccagcaacagcccccacguggucaagaccgcgacccagggggaggugaacgugaccggcgucaucccgcugacgaccacccccaccaagagccacuucgccaaccugaaggggacggagacccggggcaagcucugccccaagugccugaacugcaccgaccuggacguggcccucgggcgccccaagugcaccggcaagaucccguccgcccgggugagcauccugcacgagguccgccccgugacguccggcugcuuccccaucaugcacgaccggaccaagauccgccagcugcccaaccuccugcggggguacgagcacaucagccuguccacccacaacgugaucaacgccgaggacgcgccgggcgggcccuacaagaucggcaccagcggguccugccccaacgucacgaacggcaacggcuucuucgccaccauggccugggccgugcccaagaacgacaagaacaagaccgcgaccaacccgcucacgaucgaggugcccuacaucugcaccgagggggaggaccagaucaccgucuggggcuuccacagcgacaacgagacccagauggccaagcuguacggggacuccaagccccagaaguucacgagcuccgccaacggcgugaccacccacuacgugagccagaucggcggguuccccaaccagaccgaggacggcgggcugccgcaguccggccgcaucgucguggacuacauggugcagaaguccgggaagacgggcaccaucaccuaccagcggggcauccuccugccccagaaggucuggugcgccuccgggcgcagcaaggugaucaagggcagccugccccucaucggggaggccgacugccugcacgagaaguacggcgggcugaacaaguccaagcccuacuacaccggcgagcacgcgaaggccaucggcaacugcccgaucugggugaagacgccccucaagcuggccaacgggaccaaguaccggccgcccgccaagcugcucaaggagcgcggcuucuucggggccaucgcgggcuuccuggagggcgggugggagggcaugaucgccggguggcacggcuacaccagccacggggcccacggcgucgccguggccgcggaccugaaguccacccaggaggccaucaacaagaucacgaagaaccucaacagccuguccgagcuggaggucaagaaccuccagcggcugagcggcgccauggacgagcugcacaacgagauccucgagcuggacgagaagguggacgaccugcgcgccgacaccaucuccagccagaucgagcucgccgugcugcuguccaacgaggggaucaucaacagcgaggacgagcaccuccuggcgcuggagcggaagcucaagaagaugcugggccccuccgccgucgagaucgggaacggcugcuucgagaccaagcacaagugcaaccagaccugccuggaccgcaucgccgccgggaccuucgacgcgggcgaguucagccuccccacguucgacucccugaacaucaccgccgccagccugaacgacgacggccucgacaaccacaccauccugcuguacuacuccaccgccgccagcucccuggcggugacgcucaugaucgccaucuucguggucuacauggugagccgggacaacguguccugcagcaucugccuguga

SEQ ID NO: 92465 - RNA, 1755 nt, Artificial Sequence; identical to SEQ ID NO: 92313
  derived and/or modified CDS sequence (opt1) from hemagglutinin__InfluenzaB__ALE31772

SEQ ID NO: 92466 - RNA, 1755 nt, Artificial Sequence; identical to SEQ ID NO: 92313
  derived and/or modified CDS sequence (opt1) from hemagglutinin__InfluenzaB__ALE31773

SEQ ID NO: 92467 - RNA, 1755 nt, Artificial Sequence
  derived and/or modified CDS sequence (opt1) from hemagglutinin__InfluenzaB__ALE31884
augaaggccaucaucgugcugcucauggucgugaccagcaacgccgaccgcaucugcaccggcaucacguccagcaacagcccccacguggucaagaccgcgacccagggggaggugaacgugaccggcgucaucccgcugacgaccacccccaccaaguccuacuucgccaaccugaaggggacgcggacccgcggcaagcucugccccgacugccugaacugcaccgaccuggacguggcccucgggcggcccaugugcgugggcaccacgccguccgccaaggccagcauccugcacgagguccgccccgugaccuccggcugcuuccccaucaugcacgaccggaccaagauccgccagcugcccaaccuccugcggggguacgagaagauccgccugagcacccagaacgugaucgacgcggagaaggccccgggcgggcccuaccggcucggcacguccgggagcugccccaacgccaccuccaagaucggcuucuucgccaccauggcgugggccguccccaaggacaacuacaagaacgccaccaacccgcagacgguggaggugcccuacaucugcaccgagggcgaggaccagaucaccgucuggggguuccacagcgacaacaagacccagaugaagucccuguacggcgacagcaacccccagaaguucacguccagcgccaacggggugaccacccacuacgugucccagaucggcgacuuccccgaccagaccgaggacggcgggcugccgcagagcggccgcaucgucguggacuacaugaugcagaagcccgggaagacgggcaccaucguguaccagcgcgggguccuccugccccagaagguguggugcgccuccggccggagcaaggugaucaagggcagccugccccucaucggggaggcggacugccugcacgaggaguacggcgggcugaacaaguccaagccguacuacaccggcaagcacgccaaggccaucgggaacugccccaucugggucaagacgccccucaagcuggccaacggcaccaaguaccggcccccggccaagcugcucaaggagcgcggcuucuucggggcgaucgccggcuuccuggagggcgggugggaggggaugaucgccggcuggcacggcuacaccagccacggggcccacggcguggccgucgcggccgaccugaaguccacccaggaggccaucaacaagaucaccaagaaccucaacagccuguccgagcuggaggugaagaaccuccagcggcugagcggggccauggacgagcugcacaacgagauccucgagcuggacgagaagguggacgaccugcgcgccgacacgaucuccagccagaucgagcucgcgguccugcuguccaacgagggcaucaucaacagcgaggacgagcaccuccuggcccuggagcggaagcucaagaagaugcugggccccuccgccguggacaucgggaacggcugcuucgagaccaagcacaagugcaaccagaccugccuggaccgcaucgccgcggggaccuucaacgccggcgaguucagccuccccaccuucgacucccugaacaucacggccgccagccugaacgacgacgggcucgacaaccacaccauccugcuguacuacuccaccgccgcgagcucccuggccgugacccucaugcuggccaucuucaucgucuacauggugagccgggacaacguguccugcagcgucugccuguga

SEQ ID NO: 92468 - RNA, 1755 nt, Artificial Sequence
  derived and/or modified CDS sequence (opt1) from hemagglutinin__InfluenzaB__ALE31885
augaaggccaucaucgugcugcucauggucgugaccagcaacgccgaccgcaucugcaccggcaucacguccagcaacagcccccacguggucaagaccgcgacccagggggaggugaacgugaccggcgucaucccgcugacgaccacccccaccaaguccuacuucgccaaccugaaggggacgcggacccgcggcaagcucugccccgacugccugaacugcaccgaccuggacguggcccucgggcggcccaugugcgugggcaccacgccguccgccaaggccagcauccugcacgagguccgccccgugaccuccggcugcuuccccaucaugcacgaccggaccaagauccgccagcugcccaaccuccugcggggguacgagaagauccgccugagcacccagaacgugaucgacgcggagaaggccccgggcgggcccuaccggcucggcacguccgggagcugccccaacgccaccuccaagaucggcuucuucgccaccauggcgugggccguccccaaggacaacuacaagaacgccaccaacccgcagacgguggaggugcccuacaucugcaccgagggcgaggaccagaucaccgucuggggguuccacagcgacaacaagacccagaugaagucccuguacggcgacagcaacccccagaaguucacguccagcgccaacggggugaccacccacuacgugucccagaucggcgacuuccccgaccagaccgaggacggcgggcugccgcagagcggccgcaucgucguggacuacaugaugcagaagcccgggaagacgggcaccaucguguaccagcgcgggguccuccugccccagaagguguggugcgccuccggccggagcaaggugaucaagggcagccugccccucaucggggaggcggacugccugcacgaggaguacggcgggcugaacaaguccaagccguacuacaccggcaagcacgccaaggccaucgggaacugccccaucugggucaagacgccccucaagcuggccaacggcaccaaguaccggcccccggccaagcugcucaaggagcgcggcuucuucggggcgaucgccggcuuccuggagggcgggugggaggggaugaucgccggcuggcacggcuacaccagccacggggcccacggcguggccgucgcggccgaccugaaguccacccaggaggccaucaacaagaucaccaagaaccucaacagccuguccgagcuggaggugaagaaccuccagcggcugagcggggccauggacgagcugcacaacgagauccucgagcuggacgagaagguggacgaccugcgcgccgacacgaucuccagccagaucgagcucgcgguccugcuguccaacgagggcaucaucaacagcgaggacgagcaccuccuggcccuggagcggaagcucaagaagaugcugggccccuccgccguggacaucgggaacggcugcuucgagaccaagcacaagugcaaccagaccugccuggaccgcaucgccgcggggaccuucaacgccggcgaguucagccuccccaccuucgacucccugaacaucacggccgccagccugaacgacgacgggcucgacaaccacaccauccugcuguacuacuccaccgccgcgagcucccuggccgugacccucaugcuggccaucuucgucguguacauggugagccgggacaacgucuccugcagcaucugccuguga

SEQ ID NO: 92469 - RNA, 1755 nt, Artificial Sequence; identical to SEQ ID NO: 92313
  derived and/or modified CDS sequence (opt1) from hemagglutinin__InfluenzaB__ALE31886

SEQ ID NO: 92470 - RNA, 1755 nt, Artificial Sequence
  derived and/or modified CDS sequence (opt1) from hemagglutinin__InfluenzaB__ALE31887
augaaggccaucaucgugcugcucauggucgugaccagcaacgccgaccgcaucugcaccggcaucacguccagcaacagcccccacguggucaagaccgcgacccagggggagaucaacgugaccggcgugaucccgcugacgaccacccccaccaaguccuacuucgccaaccugaaggggacgcggacccgcggcaagcucugccccgacugccugaacugcaccgaccuggacgucgcccucgggcggcccaugugcgugggcaccacgccguccgccaaggccagcauccugcacgaggugcgccccgucaccuccggcugcuuccccaucaugcacgaccggaccaagauccgccagcugcccaaccuccugcggggguacgagaagauccgccugagcacccagaacgugaucgacgcggagaaggccccgggcgggcccuaccggcucggcacguccgggagcugccccaacgccaccuccaagaucggcuucuucgccaccauggcgugggccgugcccaaggacaacuacaagaacgccaccaacccgcagacggucgaggugcccuacaucugcaccgagggcgaggaccagaucaccguguggggguuccacagcgacaacaagacccagaugaagucccuguacggcgacagcaacccccagaaguucacguccagcgccaacggggucaccacccacuacgugucccagaucggcgacuuccccgaccagaccgaggacggcgggcugccgcagagcggccgcaucguggucgacuacaugaugcagaagcccgggaagacgggcaccaucguguaccagcgcggggugcuccugccccagaaggucuggugcgccuccggccggagcaaggugaucaagggcagccugccccucaucggggaggcggacugccugcacgaggaguacggcgggcugaacaaguccaagccguacuacaccggcaagcacgccaaggccaucgggaacugccccaucugggugaagacgccccucaagcuggccaacggcaccaaguaccggcccccggccaagcugcucaaggagcgcggcuucuucggggcgaucgccggcuuccuggagggcgggugggaggggaugaucgccggcuggcacggcuacaccagccacggggcccacggcgucgccguggcggccgaccugaaguccacccaggaggccaucaacaagaucaccaagaaccucaacagccuguccgagcuggaggucaagaaccuccagcggcugagcggggccauggacgagcugcacaacgagauccucgagcuggacgagaagguggacgaccugcgcgccgacacgaucuccagccagaucgagcucgcggugcugcuguccaacgagggcaucaucaacagcgaggacgagcaccuccuggcccuggagcggaagcucaagaagaugcugggccccuccgccgucgacaucgggaacggcugcuucgagaccaagcacaagugcaaccagaccugccuggaccgcaucgccgcggggaccuucaacgccggcgaguucagccuccccaccuucgacucccugaacaucacggccgccagccugaacgacgacgggcucgacaaccacaccauccugcuguacuacuccaccgccgcgagcucccuggccgugacccucaugcuggccaucuucaucguguacauggucagccgggacaacguguccugcagcaucugccuguga

SEQ ID NO: 92471 - RNA, 1755 nt, Artificial Sequence; identical to SEQ ID NO: 92313
  derived and/or modified CDS sequence (opt1) from hemagglutinin__InfluenzaB__ALE31982

SEQ ID NO: 92472 - RNA, 1755 nt, Artificial Sequence
  derived and/or modified CDS sequence (opt1) from hemagglutinin__InfluenzaB__ALE31983
augaaggccaucaucgugcugcucauggucgugaccagcaacgccgaccgcaucugcaccggcaucacguccagcaacagcccccacguggucaagaccgcgacccagggggaggugaacgugaccggcgucaucccgcugacgaccacccccaccaaguccuacuucgccaaccugaaggggacgcggacccgcggcaagcucugccccgacugccugaacugcaccgaccuggacguggcccucgggcggcccaugugcgugggcaccacgccguccgccaaggccagcauccugcacgagguccgccccgugaccuccggcugcuuccccaucaugcacgaccggaccaagauccgccagcugcccaaccuccugcggggguacgagaagauccgccugagcacccagaacgugaucgacgcggagaaggccccgggcgggcccuaccggcucggcacguccgggagcugccccaacgccaccuccaagaucggcuucuucgccaccauggcgugggccguccccaaggacaacuacaagaacgccaccaacccgcagacgguggaggugcccuacaucugcaccgagggcgaggaccagaucaccgucuggggguuccacagcgacaacaagacccagaugaagucccuguacggcgacagcaacccccagaaguucacguccagcgccaacggggugaccacccacuacgugucccagaucggcgacuuccccgaccagaccgaggacggcgggcugccgcagagcggccgcaucgucguggacuacaugaugcagaagcccgggaagacgggcaccaucguguaccagcgcgggguccuccugccccagaagguguggugcgccuccggccggagcaaggugaucaagggcagccugccccucaucggggaggcggacugccugcacgaggaguacggcgggcugaacaaguccaagccguacuacaccggcaagcacgccaaggccaucgggaacugccccaucugggucaagacgccccucaagcuggccaacggcaccaaguaccggcccccggccaagcugcucaaggagcgcggcuucuucggggcgaucgccggcuuccuggagggcgggugggaggggaugaucgccggcuggcacggcuacaccagccacggggcccacggcguggccgucgcggccgaccugaaguccacccaggaggccaucaacaagaucaccaagaaccucaacagccuguccgagcuggaggugaagaaccuccagcggcugagcggggccauggacgagcugcacaacgagauccucgagcuggacgagaagguggacgaccugcgcgccgacacgaucuccagccagaucgagcucgcgguccugcuguccaacgagggcaucaucaacagcgaggacgagcaccuccuggcccuggagcggaagcucaagaagaugcugggccccuccgccguggacaucgggaacggcugcuucgagaccaagcacaagugcaaccagaccugccuggaccgcaucgccgcggggaccuucaacgccggcgaguucagccuccccaccuucgacucccugaacaucacggccgccagccugaacgacgacgggcucgacaaccacaccauccugcuguacuacuccaccgccgcgagcucccuggccgugacccucaugcuggcccuguucaucgucuacauggugagccgggacaacguguccugcagcaucugccucuga

SEQ ID NO: 92473 - RNA, 1755 nt, Artificial Sequence
  derived and/or modified CDS sequence (opt1) from hemagglutinin__InfluenzaB__ALE31984
augaaggccaucaucgugcugcucauggucgugaccagcaacgccgaccgcaucugcaccggcaucacguccagcaacagcccccacguggucaagaccgcgacccagggggaggugaacgugaccggcgucaucccgcugacgaccacccccaccaaguccuacuucgccaaccugaaggggacgcggacccgcggcaagcucugccccgacugccugaacugcaccgaccuggacguggcccucgggcggcccaugugcgugggcaccacgccguccgccaaggccagcauccugcacgagguccgccccgugaccuccggcugcuuccccaucaugcacgaccggaccaagauccgccagcugcccaaccuccugcggggguacgagaagauccgccugagcacccagaacgugaucgacgcggagaaggccccgggcgggcccuaccggcucggcacguccgggagcugccccaacgccaccuccaagaucggcuucuucgccaccauggcgugggccguccccaaggacaacuacaagaacgccaccaacccgcagacgguggaggugcccuacaucugcaccgaggaggaggaccagaucaccgucuggggcuuccacagcgacaacaagacccagaugaagucccuguacggggacagcaacccccagaaguucacguccagcgccaacggcgugaccacccacuacgugucccagaucggggacuuccccgaccagaccgaggacggcggccugccgcagagcgggcgcaucgucguggacuacauggugcagaagcccggcaagacggggaccaucgucuaccagcggggcgugcuccugccccagaagguguggugcgccuccgggcgcagcaaggucaucaagggcagccugccccucaucggcgaggcggacugccugcacgaggaguacgggggccugaacaaguccaagccguacuacaccgggaagcacgccaaggccaucggcaacugccccaucugggugaagacgccccucaagcuggccaacgggaccaaguaccggcccccggccaagcugcucaaggagcgcggcuucuucggcgcgaucgccggguuccuggagggcgggugggagggcaugaucgccggguggcacggcuacaccagccacggcgcccacggggucgccguggcggccgaccugaaguccacccaggaggccaucaacaagaucaccaagaaccucaacagccuguccgagcuggaggugaagaaccuccagcggcugagcggcgccauggacgagcugcacaacgagauccucgagcuggacgagaaggucgacgaccugcgcgccgacacgaucuccagccagaucgagcucgcggugcugcuguccaacgaggggaucaucaacagcgaggacgagcaccuccuggcccuggagcggaagcucaagaagaugcugggccccuccgccguggacaucggcaacgggugcuucgagaccaagcacaagugcaaccagaccugccuggaccgcaucgccgcgggcaccuucaacgccggggaguucagccuccccaccuucgacucccugaacaucacggccgccagccugaacgacgacggccucgacaaccacaccauccugcuguacuacuccaccgccgcgagcucccuggccgucacccucaugcuggccaucuucaucguguacauggugagccgggacaacgucuccugcagcaucugccuguga

SEQ ID NO: 92474 - RNA, 1755 nt, Artificial Sequence; identical to SEQ ID NO: 92313
  derived and/or modified CDS sequence (opt1) from hemagglutinin__InfluenzaB__ALE31985

SEQ ID NO: 92475 - RNA, 1758 nt, Artificial Sequence
  derived and/or modified CDS sequence (opt1) from hemagglutinin__InfluenzaB__ALE31986
augaaggccaucaucgugcugcucauggucgugaccagcaacgccgaccgcaucugcaccggcaucacguccagcaacagcccccacguggucaagaccgcgacccagggggaggugaacgugaccggcgucaucccgcugacgaccacccccaccaagagccacuucgccaaccugaaggggacggagacccggggcaagcucugccccaagugccugaacugcaccgaccuggacguggcccucgggcgccccaagugcaccggcaagaucccguccgcccgggugagcauccugcacgagguccgccccgugacguccggcugcuuccccaucaugcacgaccggaccaagauccgccagcugcccaaccuccugcggggguacgagcacauccgccugagcacccacaacgugaucaacgccgaggacgcgccgggcgggcccuacaagaucggcaccuccgggagcugccccaacaucacgaacggcaacggcuucuucgccaccauggccugggccguccccaagaacgacaagaacaagaccgcgaccaacccgcucacgaucgaggugcccuacaucugcaccgagggggaggaccagaucaccguguggggcuuccacuccgacaacgagacccagauggccaagcuguacggggacagcaagccccagaaguucacguccagcgccaacggcgucaccacccacuacgugucccagaucggcggguuccccaaccagaccgaggacggcgggcugccgcagagcggccggaucgugaucgacuacaugguccagaaguccgggaagacgggcaccaucaccuaccagcgcggcauccuccugccccagaagguguggugcgccagcgggcgguccaaggugaucaagggcagccugccccucaucggggaggccgacugccugcacgagaaguacggcgggcugaacaagagcaagcccuacuacaccggcgagcacgcgaaggccgucggcaacugcccgaucugggugaagacgccccucaagcuggccaacgggaccaaguaccgcccgcccgccaagcugcucaaggagcggggcuucuucggggccaucgcgggcuuccuggagggcgggugggagggcaugaucgccggguggcacggcuacaccucccacggggcccacggcguggccgucgccgcggaccugaaguccacccaggaggccaucaacaagaucacgaagaaccucaacucccugagcgagcuggaggugaagaaccuccagcgccuguccggcgccauggacgagcugcacaacgagauccucgagcuggacgagaaggucgacgaccugcgggccgacaccaucagcucccagaucgagcucgccgugcugcugagcaacgaggggaucaucaacuccgaggacgagcaccuccuggcgcuggagcgcaagcucaagaagaugcugggccccagcgccguggagaucgggaacggcugcuucgagaccaagcacaagugcaaccagaccugccuggaccggaucgccgccgggaccuucgacgcgggcgaguucucccuccccacguucgacagccugaacaucaccgccgccucccugaacgacgacggccucgacaaccacaccauccugcuguacuacagcaccgccgccuccagccuggcggucacgcucaugaucgccaucuucgugguguacauggucucccgcgacaacgugagcugcuccaucugccuguga

SEQ ID NO: 92476 - RNA, 1755 nt, Artificial Sequence
  derived and/or modified CDS sequence (opt1) from hemagglutinin__InfluenzaB__ALE31988
augaaggccaucaucgugcugcucauggucgugaccagcaacgccgaccgcaucugcaccggcaucacguccagcaacagcccccacguggucaagaccgcgacccagggggaggugaacgugaccggcgucaucccgcugacgaccacccccaccaaguccuacuucgccaaccugaaggggacgcggacccgcggcaagcucugccccgacugccugaacugcaccgaccuggacguggcccucgggcggcccaugugcgugggcaccacgccguccgccaaggccagcauccugcacgagguccgccccgugaccuccggcugcuuccccaucaugcacgaccggaccaagauccgccagcugcccaaccuccugcggggguacgagaagauccgccugagcacccagaacgugaucgacgcggagaaggccccgggcgggcccuaccggcucggcacguccgggagcugccccaacgccaccuccaagaucggcuucuucgccaccauggcgugggccguccccaaggacaacuacaagaacgccaccaacccgcagacgguggaggugcccuacaucugcaccgagggcgaggaccagaucaccgucuggggguuccacagcgacaacaagacccagaugaagucccuguacggcgacagcaacccccagaaguucacguccagcgccaacggggugaccacccacuacgugucccagaucggcgacuuccccgaccagaccgaggacggcgggcugccgcagagcggccgcaucgucguggacuacauggugcagaagcccgggaagacgggcaccaucgucuaccagcgcggggugcuccugccccagaagguguggugcgccuccggccggagcaaggucaucaagggcagccugccccucaucggggaggcggacugccugcacgaggaguacggcgggcugaacaaguccaagccguacuacaccggcaagcacgccaaggccaucgggaacugccccaucugggugaagacgccccucaagcuggccaacggcaccaaguaccggcccccggccaagcugcucaaggagcgcggcuucuucggggcgaucgccggcuuccuggagggcgggugggaggggaugaucgccggcuggcacggcuacaccagccacggggcccacggcgucgccguggcggccgaccugaaguccacccaggaggccaucaacaagaucaccaagaaccucaacagccuguccgagcuggaggugaagaaccuccagcggcugagcggggccauggacgagcugcacaacgagauccucgagcuggacgagaaggucgacgaccugcgcgccgacacgaucuccagccagaucgagcucgcggugcugcuguccaacgagggcaucaucaacagcgaggacgagcaccuccuggcccuggagcggaagcucaagaagaugcugggccccuccgccguggacaucgggaacggcugcuucgagaccaagcacaagugcaaccagaccugccuggaccgcaucgccgcggggaccuucaacgccggcgaguucagccuccccaccuucgacucccugaacaucacggccgccagccugaacgacgacgggcucgacaaccacaccauccugcuguacuacuccaccgccgcgagcucccuggccgucacccucaugcuggccaucuucaucguguacauggugagccgggacaacgucuccugcagcaucugccuguga

SEQ ID NO: 92477 - RNA, 1758 nt, Artificial Sequence; identical to SEQ ID NO: 92475
  derived and/or modified CDS sequence (opt1) from hemagglutinin__InfluenzaB__ALE31989

SEQ ID NO: 92478 - RNA, 1758 nt, Artificial Sequence; identical to SEQ ID NO: 92475
  derived and/or modified CDS sequence (opt1) from hemagglutinin__InfluenzaB__ALE31990

SEQ ID NO: 92479 - RNA, 1755 nt, Artificial Sequence; identical to SEQ ID NO: 92313
  derived and/or modified CDS sequence (opt1) from hemagglutinin__InfluenzaB__ALE31991

SEQ ID NO: 92480 - RNA, 1758 nt, Artificial Sequence
  derived and/or modified CDS sequence (opt1) from hemagglutinin__InfluenzaB__ALE31992
augaaggccaucaucgugcugcucauggucgugaccagcaacgccgaccgcaucugcaccggcaucacguccagcaacagcccccacguggucaagaccgcgacccagggggaggugaacgugaccggcgucaucccgcugacgaccacccccaccaagagccacuucgccaaccugaaggggacggagacccggggcaagcucugccccaagugccugaacugcaccgaccuggacguggcccucgggcgccccaagugcaccggcaagaucccguccgcccgggugagcauccugcacgagguccgccccgugacguccggcugcuuccccaucaugcacgaccggaccaagauccgccagcugcccaaccuccugcggggguacgagcacgugcgccugagcacccacaacgucaucaacgccgaggacgcgccgggcgggcccuacaagaucggcaccuccgggagcugccccaacaucacgaacggcaacggcuucuucgccaccauggccugggccgugcccaagaacgacaagaacaagaccgcgaccaacccgcucacgaucgaggugcccuacaucugcaccgagcgggaggaccagaucaccgucuggggguuccacuccgacaacgagacccagauggccaagcuguacggcgacagcaagccccagaaguucacguccagcgccaacggggugaccacccacuacgugucccagaucggcggcuuccccaaccagaccgaggacgggggccugccgcagagcgggcgcaucgucguggacuacauggugcagaaguccggcaagacggggaccaucaccuaccagcggggcauccuccugccccagaaggucuggugcgccagcggccgcuccaaggugaucaaggggagccugccccucaucggcgaggccgacugccugcacgagaaguacgggggccugaacaagagcaagcccuacuacaccggggagcacgcgaaggccaucggcaacugcccgaucugggugaagacgccccucaagcuggccaacggcaccaaguaccggccgcccgccaagcugcucaaggagcgcggguucuucggcgccaucgcgggguuccuggagggcgggugggagggcaugaucgccggcuggcacggguacaccucccacggcgcccacggggucgccguggccgcggaccugaaguccacccaggaggccaucaacaagaucacgaagaaccucaacucccugagcgagcuggaggucaagaaccuccagcggcuguccggcgccauggacgagcugcacaacgagauccucgagcuggacgagaagguggacgaccugcgcgccgacaccaucagcucccagaucgagcucgccgugcugcugagcaacgagggcaucaucaacuccgaggacgagcaccuccuggcgcuggagcggaagcucaagaagaugcuggggcccagcgccgucgagaucggcaacgggugcuucgagaccaagcacaagugcaaccagaccugccuggaccgcaucgccgccggcaccuucgacgcgggggaguucucccuccccacguucgacagccugaacaucaccgccgccucccugaacgacgacggccucgacaaccacaccauccugcuguacuacagcaccgccgccuccagccuggcggugacgcucaugaucgccaucuucguggucuacauggugucccgggacaacgugagcugcuccaucugccuguga

SEQ ID NO: 92481 - RNA, 1758 nt, Artificial Sequence; identical to SEQ ID NO: 91889
  derived and/or modified CDS sequence (opt1) from hemagglutinin__InfluenzaB__ALE31993

SEQ ID NO: 92482 - RNA, 1758 nt, Artificial Sequence
  derived and/or modified CDS sequence (opt1) from hemagglutinin__InfluenzaB__ALE31994
augaaggccaucaucgugcugcucauggucgugaccagcaacgccgaccgcaucugcaccggcaucacguccagcaacagcccccacguggucaagaccgcgacccagggggaggugaacgugaccggcgucaucccgcugacgaccacccccaccaagagccacuucgccaaccugaaggggacggagacccggggcaagcucugccccaagugccugaacugcaccgaccuggacguggcccucgggcgccccaagugcaccggcaagaucccguccgcccgggugagcauccugcacgagguccgccccgugacguccggcugcuuccccaucaugcacgaccggaccaagauccgccagcugcccaaccuccugcggggguacgagcacgugcgccugagcacccacaacgucaucaacgccgaggacgcgccgggcgggcccuacaagaucggcaccuccgggagcugccccaacaucacgaacggcaacggcuucuucgccaccauggccugggccgugcccaagaacgacaagaacaagaccgcgaccaacccgcucacgaucgaggugcccuacaucugcaccgagggggaggaccagaucaccgucuggggcuuccacuccgacaacgagacccagauggccaagcuguacggggacagcaagccccagaaguucacguccagcgccaacggcgugaccacccacuacgugucccagaucggcggguuccccaaccagaccgaggacggcgggcugccgcagagcggccggaucgucguggacuacauggugcagaaguccgggaagacgggcaccaucaccuaccagcgcggcauccuccugccccagaaggucuggugcgccagcgggcgguccaaggugaucaagggcagccugccccucaucggggaggccgacugccugcacgagaaguacggcgggcugaacaagagcaagcccuacuacaccggcgagcacgcgaaggccaucggcaacugcccgaucugggugcgcacgccccucaagcuggccaacgggaccaaguaccggccgcccgccaagcugcucaaggagcgcggcuucuucggggccaucgcgggcuuccuggagggcgggugggagggcaugaucgccggguggcacggcuacaccucccacggggcccacggcgucgccguggccgcggaccugaaguccacccaggaggccaucaacaagaucacgaagaaccucaacucccugagcgagcuggaggucaagaaccuccagcggcuguccggcgccauggacgagcugcacaacgagauccucgagcuggacgagaagguggacgaccugcgcgccgacaccaucagcucccagaucgagcucgccgugcugcugagcaacgaggggaucaucaacuccgaggacgagcaccuccuggcgcuggagcggaagcucaagaagaugcugggccccagcgccgucgagaucgggaacggcugcuucgagaccaagcacaagugcaaccagaccugccuggaccgcaucgccgccgggaccuucgacgcgggcgaguucucccuccccacguucgacagccugaacaucaccgccgccucccugaacgacgacggccucgacaaccacaccauccugcuguacuacagcaccgccgccuccagccuggcggugacgcucaugaucgccaucuucguggucuacauggugucccgggacaacgugagcugcuccaucugccuguga

SEQ ID NO: 92483 - RNA, 1755 nt, Artificial Sequence; identical to SEQ ID NO: 92472
  derived and/or modified CDS sequence (opt1) from hemagglutinin__InfluenzaB__ALN39719

SEQ ID NO: 92484 - RNA, 1755 nt, Artificial Sequence; identical to SEQ ID NO: 92313
  derived and/or modified CDS sequence (opt1) from hemagglutinin__InfluenzaB__ALN39720

SEQ ID NO: 92485 - RNA, 1755 nt, Artificial Sequence; identical to SEQ ID NO: 92313
  derived and/or modified CDS sequence (opt1) from hemagglutinin__InfluenzaB__ALN39721

SEQ ID NO: 92486 - RNA, 1755 nt, Artificial Sequence; identical to SEQ ID NO: 92313
  derived and/or modified CDS sequence (opt1) from hemagglutinin__InfluenzaB__ALN39723

SEQ ID NO: 92487 - RNA, 1755 nt, Artificial Sequence; identical to SEQ ID NO: 92313
  derived and/or modified CDS sequence (opt1) from hemagglutinin__InfluenzaB__ALN39724

SEQ ID NO: 92488 - RNA, 1755 nt, Artificial Sequence; identical to SEQ ID NO: 92476
  derived and/or modified CDS sequence (opt1) from hemagglutinin__InfluenzaB__ALN39725

SEQ ID NO: 92489 - RNA, 1755 nt, Artificial Sequence
  derived and/or modified CDS sequence (opt1) from hemagglutinin__InfluenzaB__ALN39726
augaaggccaucaucgugcugcucauggucgugaccagcaacgccgaccgcaucugcaccggcaucacguccagcaacagcccccacguggucaagaccgcgacccagggggaggugaacgugaccggcgucaucccgcugacgaccacccccaccaaguccuacuucgccaaccugaaggggacgcggacccgcggcaagcucugccccgacugccugaacugcaccgaccuggacguggcccucgggcggcccaugugcgugggcaccacgccguccgccaaggccagcauccugcacgagguccgccccgugaccuccggcugcuuccccaucaugcacgaccggaccaagauccgccagcugcccaaccuccugcggggguacgagaagauccgccugagcacccagaacgugaucgacgcggagaaggccccgggcgggcccuaccggcucggcacguccgggagcugccccaacgccaccuccaagaucggcuucuucgccaccauggcgugggccguccccaaggacaacuacaagaacgccaccaacccgcagacgguggaggugcccuacaucugcaccgagggcgaggaccagaucaccgucuggggguuccacagcgacaacaagacccagaugaagucccuguacggcgacagcaacccccagaaguucacguccagcgccgacggggugaccacccacuacgugucccagaucggcgacuuccccgaccagaccgaggacggcgggcugccgcagagcggccgcaucgucguggacuacaugaugcagaagcccgggaagacgggcaccaucguguaccagcgcgggguccuccugccccagaagguguggugcgccuccggccggagcaaggugaucaagggcagccugccccucaucggggaggcggacugccugcacgaggaguacggcgggcugaacaaguccaagccguacuacaccggcaagcacgccaaggccaucgggaacugccccaucugggucaagacgccccucaagcuggccaacggcaccaaguaccggcccccggccaagcugcucaaggagcgcggcuucuucggggcgaucgccggcuuccuggagggcgggugggaggggaugaucgccggcuggcacggcuacaccagccacggggcccacggcguggccgucgcggccgaccugaaguccacccaggaggccaucaacaagaucaccaagaaccucaacagccuguccgagcuggaggugaagaaccuccagcggcugagcggggccauggacgagcugcacaacgagauccucgagcuggacgagaagguggacgaccugcgcgccgacacgaucuccagccagaucgagcucgcgguccugcuguccaacgagggcaucaucaacagcgaggacgagcaccuccuggcccuggagcggaagcucaagaagaugcugggccccuccgccguggacaucgggaacggcugcuucgagaccaagcacaagugcaaccagaccugccuggaccgcaucgccgcggggaccuucaacgccggcgaguucagccuccccaccuucgacucccugaacaucacggccgccagccugaacgacgacgggcucgacaaccacaccauccugcuguacuacuccaccgccgcgagcucccuggccgugacccucaugcuggccaucuucaucgucuacauggugagccgggacaacguguccugcagcaucugccuguga

SEQ ID NO: 92490 - RNA, 1755 nt, Artificial Sequence; identical to SEQ ID NO: 92476
  derived and/or modified CDS sequence (opt1) from hemagglutinin__InfluenzaB__ALN39727

SEQ ID NO: 92491 - RNA, 1755 nt, Artificial Sequence; identical to SEQ ID NO: 92313
  derived and/or modified CDS sequence (opt1) from hemagglutinin__InfluenzaB__ALN39728

SEQ ID NO: 92492 - RNA, 1755 nt, Artificial Sequence; identical to SEQ ID NO: 92313
  derived and/or modified CDS sequence (opt1) from hemagglutinin__InfluenzaB__ALN39729

SEQ ID NO: 92493 - RNA, 1758 nt, Artificial Sequence
  derived and/or modified CDS sequence (opt1) from hemagglutinin__InfluenzaB__ALN39730
augaaggccaucaucgugcugcucauggucgugaccagcaacgccgaccgcaucugcaccggcaucacguccagcaacagcccccacguggucaagaccgcgacccagggggaggugaacgugaccggcgucaucccgcugacgaccacccccaccaagagccacuucgccaaccugaaggggacggagacccggggcaagcucugccccaagugccugaacugcaccgaccuggacguggcccucgggcgccccaagugcaccggcaagaucccguccgcccgggugagcauccugcacgagguccgccccgugacguccggcugcuuccccaucaugcacgaccggaccaagauccgccagcugcccaaccuccugcggggguacgagcacgugcgccugagcacccacaacgucaucaacgccgaggacgcgccgggcgggcccuacaagaucggcaccuccgggagcugccccaacaucacgaacggcaacggcuucuucgccaccauggccugggccgugcccaagaacgacaagaacaagaccgcgaccaacccgcucacgaucgaggugcccuacaucugcaccgagggggaggaccagaucaccgucuggggcuuccacuccgacaacgagacccagauggccaagcuguacggggacagcaagccccagaaguucacguccagcgccaacggcgugaccacccacuacgugucccagaucggcggguuccccaaccagaccgaggacggcgggcugccgcagagcggccggaucgucguggacuacauggugcagaaguccgggaagacgggcaccaucaccuaccagcgcggcauccuccugccccagaaggucuggugcgccagcgggcgguccaaggugaucaagggcagccugccccucaucggggaggccgacugccugcacgagaaguacggcgggcugaacaagagcaagcccuacuacaccggcgagcacgcgaaggccaucggcaacugcccgaucugggugaagacgccccucaagcuggccaacgggaccaaguaccgcccgcccgccaagcugcucaaggagcggggcuucuucggggccaucgcgggcuuccuggagggcgggugggagggcaugaucgccggguggcacggcuacaccucccacggggcccacggcgucgccguggccgcggaccugaaguccacccaggaggccaucaacaagaucacgaagaaccucaacucccugagcgagcuggaggucaagaaccuccagcgccuguccggcgccauggacgagcugcacaacgagauccucgagcuggacgagaagguggacgaccugcgggccgacaccaucagcucccagaucgagcucgccgugcugcugagcaacgaggggaucaucaacuccgaggacgagcaccuccuggcgcuggagcgcaagcucaagaagaugcugggccccagcgccgucgagaucgggaacggcugcuucgagaccaagcacaagugcaaccagaccugccuggaccggaucgccgccgggaccuucgacgcgggcgaguucuuccuccccacguucgacucccugaacaucaccgccgccagccugaacgacgacggccucgacaaccacaccauccugcuguacuacuccaccgccgccagcucccuggcggugacgcucaugaucgccaucuucguggucuacauggugagccgcgacaacguguccugcagcaucugccuguga

SEQ ID NO: 92494 - RNA, 1755 nt, Artificial Sequence; identical to SEQ ID NO: 92313
  derived and/or modified CDS sequence (opt1) from hemagglutinin__InfluenzaB__ALN39732

SEQ ID NO: 92495 - RNA, 1755 nt, Artificial Sequence
  derived and/or modified CDS sequence (opt1) from hemagglutinin__InfluenzaB__ALN39733
augaaggccaucaucgugcugcucauggucgugaccagcaacgccgaccgcaucugcaccggcaucacguccagcaacagcccccacguggucaagaccgcgacccagggggaggugaacgugaccggcgucaucccgcugacgaccacccccaccaaguccuacuucgccaaccugaaggggacgcggacccgcggcaagcucugccccgacugccugaacugcaccgaccuggacguggcccucgggcggcccaugugcgugggcaccacgccguccgccaaggccagcauccugcacgagguccgccccgugaccuccggcugcuuccccaucaugcacgaccggaccaagauccgccagcugcccaaccuccugcggggguacgagaagauccgccugagcacccagaacgugaucgacgcggagaaggccccgggcgggcccuaccggcucggcacguccgggagcugccccaacgccaccuccaagaucggcuucuucgccaccauggcgugggccguccccaaggacaacuacaagaacgccaccaacccgcagacgguggaggugcccuacaucugcaccgagggcgaggaccagaucaccgucuggggguuccacagcgacaacaagacccagaugaagucccuguacggcgacagcaacccccagaaguucacguccagcgccaacggggugaccacccacuacgugucccagaucggcgacuuccccgaccagaccgaggacggcgggcugccgcagagcggccgcaucgucguggacuacaugaugcagaagcccgggaagacgggcaccaucguguaccagcgcgggguccuccugccccagaagguguggugcgccuccggccggagcaaggugaucaagggcagccugccccucaucggggaggcggacugccugcacgaggaguacggcgggcugaacaaguccaagccguacuacaccggcaagcacgccaaggccaucgggaacugccccaucugggucaagacgccccucaagcuggccaacggcaccaaguaccggcccccggccaagcugcucaaggagcgcggcuucuucggggcgaucgccggcuuccuggagggcgggugggaggggaugaucgccggcuggcacggcuacaccagccacggggcccacggcguggccgucgcggccgaccugaaguccacccaggaggccaucaacaagaucaccaagaaccucaacagccuguccgagcuggaggugaagaaccuccagcggcugagcggggccauggacgagcugcacaacgagauccucgagcuggacgagaagguggacgaccugcgcgccgacacgaucuccagccagaucgagcucgcgguccugcuguccaacgagggcaucaucaacagcgaggacgagcaccuccuggcccuggagcggaagcucaagaagaugcugggccccuccgccguggacaucgggaacggcugcuucgagaccaagcaccgcugcaaccagaccugccuggaccggaucgccgcggggaccuucaacgccggcgaguucagccuccccaccuucgacucccugaacaucacggccgccagccugaacgacgacgggcucgacaaccacaccauccugcuguacuacuccaccgccgcgagcucccuggccgugacccucaugcuggccaucuucaucgucuacauggugagccgcgacaacguguccugcagcaucugccuguga

SEQ ID NO: 92496 - RNA, 1755 nt, Artificial Sequence
  derived and/or modified CDS sequence (opt1) from hemagglutinin__InfluenzaB__ALN39751
augaaggccaucaucgugcugcucauggucgugaccagcaacgccgaccgcaucugcaccggcaucacguccagcaacagcccccacguggucaagaccgcgacccagggggaggugaacgugaccggcgucaucccgcugacgaccacccccaccaaguccuacuucgccaaccugaaggggacgcggacccgcggcaagcucugccccgacugccugaacugcaccgaccuggacguggcccucgggcggcccaugugcgugggcaccacgccguccgccaaggccagcauccugcacgagguccgccccgugaccuccggcugcuuccccaucaugcacgaccggaccaagauccgccagcugcccaaccuccugcggggguacgagaagauccgccugagcacccagaacgugaucgacgcggagaaggccccgggcgggcccuaccggcucggcacguccgggagcugccccaacgccaccuccaagaucggcuucuucgccaccauggcgugggccguccccaaggacaacuacaagaacgccaccaacccgcagacgguggaggugcccuacaucugcaccgagggcgaggaccagaucaccgucuggggguuccacagcgacaacaagacccagaugaagucccuguacggcgacagcaacccccagaaguucacguccagcgccaacggggugaccacccacuacgugucccagaucggcgacuuccccgaccagaccgaggacggcgggcugccgcagagcggccgcaucgucguggacuacaugaugcagaagcccgggaagacgggcaccaucguguaccagcgcgggguccuccugccccagaagguguggugcgccuccggccggagcaaggugaucaagggcagccugccccucaucggggaggcggacugccugcacgaggaguacggcgggcugaacaaguccaagccguacuacaccggcaagcacgccaaggccaucgggaacugccccaucugggucaagacgccccucaagcuggccaacggcaccaaguaccggcccccggccaagcugcucaaggagcgcggcuucuucggggcgaucgccggcuuccuggagggcgggugggaggggaugguggccggcuggcacggcuacaccagccacggggcccacggcgucgccguggcggccgaccugaaguccacccaggaggccaucaacaagaucaccaagaaccucaacagccuguccgagcuggaggugaagaaccuccagcggcugagcggggccauggacgagcugcacaacgagauccucgagcuggacgagaaggucgacgaccugcgcgccgacacgaucuccagccagaucgagcucgcggugcugcuguccaacgagggcaucaucaacagcgaggacgagcaccuccuggcccuggagcggaagcucaagaagaugcugggccccuccgccguggacaucgggaacggcugcuucgagaccaagcacaagugcaaccagaccugccuggaccgcaucgccgcggggaccuucaacgccggcgaguucagccuccccaccuucgacucccugaacaucacggccgccagccugaacgacgacgggcucgacaaccacaccauccugcuguacuacuccaccgccgcgagcucccuggccgucacccucaugcuggcccuguucaucguguacauggugagccgggacaacgucuccugcagcaucugccucuga

SEQ ID NO: 92497 - RNA, 1755 nt, Artificial Sequence; identical to SEQ ID NO: 92472
  derived and/or modified CDS sequence (opt1) from hemagglutinin__InfluenzaB__ALN39752

SEQ ID NO: 92498 - RNA, 1755 nt, Artificial Sequence; identical to SEQ ID NO: 92313
  derived and/or modified CDS sequence (opt1) from hemagglutinin__InfluenzaB__ALN39753

SEQ ID NO: 92499 - RNA, 1758 nt, Artificial Sequence
  derived and/or modified CDS sequence (opt1) from hemagglutinin__InfluenzaB__ALN39754
augaaggccaucaucgugcugcucauggucgugaccagcaacgccgaccgcaucugcaccggcaucacguccagcaacagcccccacguggucaagaccgcgacccagggggaggugaacgugaccggcgucaucccgcugacgaccacccccaccaagagccacuucgccaaccugaaggggacggagacccggggcaagcucugccccaagugccugaacugcaccgaccuggacguggcccucgggcgccccaagugcaccggcaagaucccguccgcccgggugagcauccugcacgagguccgccccgugacguccggcugcuuccccaucaugcacgaccggaccaagauccgccagcugcccaaccuccugcggggguacgagcacgugcgccugagcacccacaacgucaucaacgccgaggacgcgccgggcgggcccuacaagaucggcaccuccgggagcugccccaacaucacgaacggcaacggcuucuucgccaccauggccugggccgugcccaagaacgacaagaacaagaccgcgaccaacccgcucacgaucgaggugcccuacaucugcaccgagggggaggaccagaucaccgucuggggcuuccacuccgacaacgagacccagauggccaagcuguacggggacagcaagccccagaaguucacguccagcgccaacggcgugaccacccacuacgugucccagaucggcggguuccccaaccagaccgaggacggcgggcugccgcagagcggccggaucgucguggacuacauggugcagaaguccgggaagacgggcaccaucaccuaccagcgcggcauccuccugccccagaaggucuggugcgccagcgggcgguccaaggugaucaagggcagccugccccucaucggggaggccgacugccugcacgagaaguacggcgggcugaacaagagcaagcccuacuacaccggcgagcacgcgaaggccaucggcaacugcccgaucugggugaagacgccccucaagcuggccaacgggaccaaguaccgcccgcccgccaagcugcucaaggagcggggcuucuucggggccaucgcgggcuuccuggagggcgggugggagggcaugaucgccggguggcacggcuacaccucccacggggcccacggcgucgccguggccgcggaccugaaguccacccaggaggccaucaacaagaucacgaagaaccucaacucccugagcgagcuggaggucaagaaccuccagcgccuguccggcgccauggacgagcugcacaacgagauccucgagcuggacgagaagguggacgaccugcgggccgacaccaucagcucccagaucgagcucgccgugcugcugagcaacgaggggaucaucaacuccgaggacgagcaccuccuggcgcuggagcgcaagcucaagaagaugcugggccccagcgccgucgagaucgggaacggcugcuucgagaccaagcacaagugcaaccagaccugccuggaccggaucgccgccgggaccuucgacgcgggcgaguucucccuccccacguucgacagccugaacaucaccgccgccucccugaacgacgacggccucgacaaccacaccauccugcuguacuacagcaccgccgccuccagccuggcggugacgcucaugaucgccaucuucguggucuacauggugucccgcgacaacgugagcugcuccaucugccuguga

SEQ ID NO: 92500 - RNA, 1758 nt, Artificial Sequence
  derived and/or modified CDS sequence (opt1) from hemagglutinin__InfluenzaB__ALN39755
augaaggccaucaucgugcugcuccuggucgugaccagcaacgccgaccgcaucugcaccggcaucacguccagcaacagcccccacguggucaagaccgcgacccagggggaggugaacgugaccggcgucaucccgcugacgaccacccccaccaagucccacuucgccaaccucaaggggacggagacccggggcaagcugugccccaagugccugaacugcaccgaccucgacguggcccuggggcgccccaagugcaccggcaagaucccguccgcccgggugagcauccugcacgagguccgccccgugacguccggcugcuuccccaucaugcacgaccggaccaagauccgccagcuccccaaccugcugcggggguacgagcacgugcgccucagcacccacaacgucaucaacgccgaggacgcgccgggcgggcccuacaagaucggcaccuccgggagcugccccaacaucacgaacggcaacggcuucuucgccaccauggccugggccgugcccaagaacgacaagaacaagaccgcgaccaacccgcugacgaucgaggugcccuacaucugcaccgagggggaggaccagaucaccgucuggggcuuccacuccgacaacgagacccagauggccaagcuguacggggacagcaagccccagaaguucacguccagcgccaacggcgugaccacccacuacgugucccagaucggcggguuccccaaccagaccgaggacggcgggcucccgcagagcggccggaucgucguggacuacauggugcagaaguccgggaagacgggcaccaucaccuaccagcgcggcauccugcugccccagaaggucuggugcgccagcgggcgguccaaggugaucaagggcagccucccccugaucggggaggccgacugccugcacgagaaguacggcgggcucaacaagagcaagcccuacuacaccggcgagcacgcgaaggccaucggcaacugcccgaucugggugaagacgccccugaagcuggccaacgggaccaaguaccgcccgcccgccaagcuccugaaggagcggggcuucuucggggccaucgcgggcuuccuggagggcgggugggagggcaugaucgccggguggcacggcuacaccucccacggggcccacggcgucgccguggccgcggaccucaagagcacccaggaggccaucaacaagaucacgaagaaccugaacucccugagcgagcucgaggucaagaaccugcagcgccuguccggcgccauggacgagcuccacaacgagauccuggagcuggacgagaagguggacgaccuccgggccgacaccaucagcucccagaucgagcuggccgugcugcucagcaacgaggggaucaucaacuccgaggacgagcaccuccuggcgcuggagcgcaagcugaagaagaugcugggccccagcgccgucgagaucgggaacggcugcuucgagaccaagcacaagugcaaccagaccugccucgaccggaucgccgccgggaccuucgacgcgggcgaguucucccugcccacguucgacagccugaacaucaccgccgccucccucaacgacgacggccuggacaaccacaccauccugcuguacuacagcaccgccgccuccagccucgcggugacgcugaugaucgccaucuucguggucuacauggugucccgcgacaacgugagcugcuccaucugccuguga

SEQ ID NO: 92501 - RNA, 1755 nt, Artificial Sequence
  derived and/or modified CDS sequence (opt1) from hemagglutinin__InfluenzaB__ALN39756
augaaggccaucaucgugcugcucauggucgugaccagcaacgccgaccgcaucugcaccggcaucacguccagcaacagcccccacguggucaagaccgcgacccagggggaggugaacgugaccggcgucaucccgcugacgaccacccccaccaaguccuacuucgccaaccugaaggggacgcggacccgcggcaagcucugccccgacugccugaacugcaccgaccuggacguggcccucgggcggcccaugugcgugggcaccacgccguccgccaaggccagcauccugcacgagguccgccccgugaccuccggcugcuuccccaucaugcacgaccggaccaagauccgccagcugcccaaccuccugcggggguacgagaagauccgccugagcacccagaacgugaucgacgcggagaaggccccgggcgggcccuaccggcucggcacguccgggagcugccccaacgccaccuccaagaucggcuucuucgccaccauggcgugggccguccccaaggacaacuacaagaacgccaccaacccgcagacgguggaggugcccuacaucugcaccgagggcgaggaccagaucaccgucuggggguuccacagcgacaacaagacccagaugaagucccuguacggcgacagcaacccccagaaguucacguccagcgccaacggggugaccacccacuacgugucccagaucggcgacuuccccgaccagaccgaggacggcgggcugccgcagagcggccgcaucgucguggacuacaugaugcagaagcccgggaagacgggcaccaucguguaccagcgcgggguccuccugccccagaagguguggugcgccuccggccggagcaaggugaucaagggcagccugccccucaucggggaggcggacugccugcacgaggaguacggcgggcugaacaaguccaagccguacuacaccggcaagcacgccaaggccaucgggaacugccccaucugggucaagacgccccucaagcuggccaacggcaccaaguaccggcccccggccaagcugcucaaggagcgcggcuucuucggggcgaucgccggcuuccuggagggcgggugggaggggaugaucgccggcuggcacggcuacaccagccacggggcccacggcguggccgucgcggccgaccugaaguccacccaggaggccaucaacaagaucaccaagaaccucaacagccuguccgagcuggaggugaagaaccuccagcggcugagcggggccauggacgagcugcacaacgagauccucgagcuggacgagaagguggacgaccugcgcgccgacacgaucuccagccagaucgagcucgcgguccugcuguccaacgagggcaucaucaacagcgaggacgagcaccuccuggcccuggagcggaagcucaagaagaugcugggccccuccgccguggacaucgggaacggcugcuucgagaccaagcacaagugcaaccagaccugccuggaccgcaucgccgcggggaccuucaacgugggcgaguucagccuccccaccuucgacucccugaacaucacggccgccagccugaacgacgacgggcucgacaaccacaccauccugcuguacuacuccaccgccgccagcucccuggcggucacccucaugcuggccaucuucaucguguacauggugagccgggacaacgucuccugcagcaucugccuguga

SEQ ID NO: 92502 - RNA, 1758 nt, Artificial Sequence; identical to SEQ ID NO: 92499
  derived and/or modified CDS sequence (opt1) from hemagglutinin__InfluenzaB__ALN39757

SEQ ID NO: 92503 - RNA, 1755 nt, Artificial Sequence; identical to SEQ ID NO: 92313
  derived and/or modified CDS sequence (opt1) from hemagglutinin__InfluenzaB__ALN39758

SEQ ID NO: 92504 - RNA, 1755 nt, Artificial Sequence
  derived and/or modified CDS sequence (opt1) from hemagglutinin__InfluenzaB__ALN39759
augaagaccaucaucgugcugcucauggucgugaccagcaacgccgaccgcaucugcacgggcaucaccuccagcaacagcccccacguggucaagaccgccacccagggggaggugaacgugacgggcgucaucccgcugaccaccacccccacgaaguccuacuucgcgaaccugaaggggacccggacccgcggcaagcucugccccgacugccugaacugcaccgaccuggacguggcccucgggcggcccaugugcgugggcacgaccccguccgccaaggccagcauccugcacgagguccgccccgugaccuccggcugcuuccccaucaugcacgaccggaccaagauccgccagcugcccaaccuccugcggggguacgagaagauccgccugagcacgcagaacgugaucgacgccgagaaggcgccgggcgggcccuaccggcucggcaccuccgggagcugccccaacgccaccuccaagaucggcuucuucgccaccauggccugggcgguccccaaggacaacuacaagaacgccacgaacccgcagaccguggaggugcccuacaucugcaccgagggcgaggaccagaucaccgucuggggguuccacagcgacaacaagacgcagaugaagucccuguacggcgacagcaacccccagaaguucaccuccagcgccaacggggugaccacccacuacgugucccagaucggcgacuuccccgaccagacggaggacggcgggcugccgcagagcggccgcaucgucguggacuacaugaugcagaagcccgggaagaccggcaccaucguguaccagcgcgggguccuccugccccagaagguguggugcgccuccggccggagcaaggugaucaagggcagccugccccucaucggggaggccgacugccugcacgaggaguacggcgggcugaacaaguccaagccguacuacaccggcaagcacgcgaaggccaucgggaacugccccaucugggucaagacgccccucaagcuggccaacggcaccaaguaccggcccccggccaagcugcucaaggagcgcggcuucuucggggccaucgcgggcuuccuggagggcgggugggaggggaugaucgccggcuggcacggcuacaccagccacggggcccacggcguggccgucgccgcggaccugaaguccacccaggaggccaucaacaagaucacgaagaaccucaacagccuguccgagcuggaggugaagaaccuccagcggcugagcggggccauggacgagcugcacaacgagauccucgagcuggacgagaagguggacgaccugcgcgccgacaccaucuccagccagaucgagcucgccguccugcuguccaacgagggcaucaucaacagcgaggacgagcaccuccuggcgcuggagcggaagcucaagaagaugcugggccccuccgccguggacaucgggaacggcugcuucgagaccaagcacaagugcaaccagaccugccuggaccgcaucgccgccgggaccuucaacgcgggcgaguucagccuccccacguucgacucccugaacaucaccgccgccagccugaacgacgacgggcucgacaaccacaccauccugcuguacuacuccaccgccgccagcucccuggcggugacgcucaugcuggccaucuucaucgucuacauggugagccgggacaacguguccugcagcaucugccuguga

SEQ ID NO: 92505 - RNA, 1758 nt, Artificial Sequence; identical to SEQ ID NO: 92463
  derived and/or modified CDS sequence (opt1) from hemagglutinin__InfluenzaB__ALN39760

SEQ ID NO: 92506 - RNA, 1755 nt, Artificial Sequence; identical to SEQ ID NO: 92313
  derived and/or modified CDS sequence (opt1) from hemagglutinin__InfluenzaB__ALN39761

SEQ ID NO: 92507 - RNA, 1755 nt, Artificial Sequence; identical to SEQ ID NO: 92313
  derived and/or modified CDS sequence (opt1) from hemagglutinin__InfluenzaB__ALN39762

SEQ ID NO: 92508 - RNA, 1755 nt, Artificial Sequence; identical to SEQ ID NO: 92313
  derived and/or modified CDS sequence (opt1) from hemagglutinin__InfluenzaB__ALN39763

SEQ ID NO: 92509 - RNA, 1758 nt, Artificial Sequence; identical to SEQ ID NO: 92499
  derived and/or modified CDS sequence (opt1) from hemagglutinin__InfluenzaB__ALN39764

SEQ ID NO: 92510 - RNA, 1755 nt, Artificial Sequence
  derived and/or modified CDS sequence (opt1) from hemagglutinin__InfluenzaB__ALN39765
augaaggccaucaucgugcugcucauggucgugaccagcaacgccgaccgcaucugcaccggcaucacguccagcaacagcccccacguggucaagaccgcgacccagggggaggugaacgugaccggcgucaucccgcugacgaccacccccaccaaguccuacuucgccaaccugaaggggacgcggacccgcggcaagcucugccccgacugccugaacugcaccgaccuggacguggcccucgggcggcccaugugcgugggcaccacgccguccgccaaggccagcauccugcacgagguccgccccgugaccuccggcugcuuccccaucaugcacgaccggaccaagauccgccagcugcccaaccuccugcggggguacgagaagauccgccugagcacccagaacgugaucgacgcggagaaggccccgggcgggcccuaccggcucggcacguccgggagcugccccaacgccaccuccaagaucggcuucuucgccaccauggcgugggccguccccaaggacaacuacaagaacgccaccaacccgcagacgguggaggugcccuacaucugcaccgagggcgaggaccagaucaccgucuggggguuccacagcgacaacaagacccagaugaagucccuguacggcgacagcaacccccagaaguucacguccagcgccaacggggugaccacccacuacgugucccagaucggcgacuuccccgaccagaccgaggacggcgggcugccgcagagcggccgcaucgucguggacuacaugaugcagaagcccgggaagacgggcaccaucguguaccagcgcgggguccuccugccccagaagguguggugcgccuccggccggagcaaggugaucaagggcagccugccccucaucggggaggcggacugccugcacgaggaguacggcgggcugaacaaguccaagccguacuacaccggcaagcacgccaaggccaucgggaacugccccaucugggucaagacgccccucaagcuggccaacggcaccaaguaccggcccccggccaagcugcucaaggagcgcggcuucuucggggcgaucgccggcuuccuggagggcgggugggaggggaugaucgccggcuggcacggcuacaccagccacggggcccacggcguggccgucgcggccgaccugaaguccacccaggaggccaucaacaagaucaccaagaaccucaacagccuguccgagcuggaggugaacaaccuccagcggcugagcggggccauggacgagcugcacaacgagauccucgagcuggacgagaagguggacgaccugcgcgccgacacgaucuccagccagaucgagcucgcgguccugcuguccaacgagggcaucaucaacagcgaggacgagcaccuccuggcccuggagcggaagcucaagaagaugcugggccccuccgccguggacaucgggaacggcugcuucgagaccaagcacaagugcaaccagaccugccuggaccgcaucgccgcggggaccuucaacgccggcgaguucagccuccccaccuucgacucccugaacaucacggccgccagccugaacgacgacgggcucgacaaccacaccauccugcuguacuacuccaccgccgcgagcucccuggccgugacccucaugcuggcccuguucaucgucuacauggugagccgggacaacguguccugcagcaucugccucuga

SEQ ID NO: 92511 - RNA, 1755 nt, Artificial Sequence; identical to SEQ ID NO: 92476
  derived and/or modified CDS sequence (opt1) from hemagglutinin__InfluenzaB__ALN39766

SEQ ID NO: 92512 - RNA, 1755 nt, Artificial Sequence; identical to SEQ ID NO: 92313
  derived and/or modified CDS sequence (opt1) from hemagglutinin__InfluenzaB__ALN39767

SEQ ID NO: 92513 - RNA, 1755 nt, Artificial Sequence; identical to SEQ ID NO: 92476
  derived and/or modified CDS sequence (opt1) from hemagglutinin__InfluenzaB__ALN39768

SEQ ID NO: 92514 - RNA, 1755 nt, Artificial Sequence
  derived and/or modified CDS sequence (opt1) from hemagglutinin__InfluenzaB__ALN39769
augaaggccaucaucgugcugcucauggucgugaccagcaacgccgaccgcaucugcaccggcaucacguccagcaacuccccgcacguggucaagaccgcgacccagggggaggugaacgugaccggcgucaucccgcugacgaccacccccaccaagagcuacuucgccaaccugaaggggacgcggacccgcggcaagcucugccccgacugccugaacugcaccgaccuggacguggcccucgggcggcccaugugcgugggcaccacgccguccgccaaggccagcauccugcacgagguccgccccgugaccuccggcugcuuccccaucaugcacgggcggaccaagauccgccagcugcccaaccuccugcggggcuacgagaagauccgccugagcacccagaacgugaucgacgcggagaaggcccccgggggccccuaccggcucgggacguccggcagcugccccaacgccaccuccaagaucggcuucuucgccaccauggcgugggccguccccaaggacaacuacaagaacgccaccaacccgcagacgguggaggugcccuacaucugcaccgagggggaggaccagaucaccgucuggggcuuccacagcgacaacaagacccagaugaagucccuguacggggacagcaacccccagaaguucacguccagcgccaacggcgugaccacccacuacgugucccagaucggcgacuuccccgaccagaccgaggacgggggccugccgcagagcgggcgcaucgucguggacuacaugaugcagaagcccggcaagacggggaccaucguguaccagcggggcguccuccugccccagaagguguggugcgccuccggccgcagcaaggugaucaaggggagccugccccucaucggcgaggcggacugccugcacgaggaguacgggggccugaacaaguccaagccguacuacaccgggaagcacgccaaggccaucggcaacugccccaucugggucaagacgccccucaagcuggccaacggcaccaaguaccggcccccggccaagcugcucaaggagcgcggguucuucggcgcgaucgccggguuccuggagggcgggugggagggcaugaucgccggcuggcacggguacaccagccacggcgcccacgggguggccgucgcggccgaccugaaguccacccaggaggccaucaacaagaucaccaagaaccucaacagccuguccgagcuggaggugaagaaccuccagcggcugagcggcgccauggacgagcugcacaacgagauccucgagcuggacgagaagguggacgaccugcgcgccgacacgaucuccagccagaucgagcucgcgguccugcuguccaacgagggcaucaucaacagcgaggacgagcaccuccuggcccuggagcggaagcucaagaagaugcuggggcccuccgccguggacaucggcaacgggugcuucgagaccaagcacaagugcaaccagaccugccuggaccgcaucgccgcgggcaccuucaacgccggggaguucagccuccccaccuucgacucccugaacaucacggccgccagccugaacgacgacggccucgacaaccacaccauccugcuguacuacuccaccgccgcgagcucccuggccgugacccucaugcuggccaucuucaucgucuacauggugagccgggacaacguguccugcagcaucugccuguga

SEQ ID NO: 92515 - RNA, 1755 nt, Artificial Sequence; identical to SEQ ID NO: 92472
  derived and/or modified CDS sequence (opt1) from hemagglutinin__InfluenzaB__ALN39770

SEQ ID NO: 92516 - RNA, 1755 nt, Artificial Sequence; identical to SEQ ID NO: 92472
  derived and/or modified CDS sequence (opt1) from hemagglutinin__InfluenzaB__ALN39771

SEQ ID NO: 92517 - RNA, 1755 nt, Artificial Sequence; identical to SEQ ID NO: 92313
  derived and/or modified CDS sequence (opt1) from hemagglutinin__InfluenzaB__ALN39773

SEQ ID NO: 92518 - RNA, 1755 nt, Artificial Sequence; identical to SEQ ID NO: 92313
  derived and/or modified CDS sequence (opt1) from hemagglutinin__InfluenzaB__ALN39774

SEQ ID NO: 92519 - RNA, 1758 nt, Artificial Sequence
  derived and/or modified CDS sequence (opt1) from hemagglutinin__InfluenzaB__ALN39775
augcaggccaucaucgugcugcucauggucgugaccagcaacgccgaccgcaucugcaccggcaucacguccagcaacagcccccacguggucaagaccgcgacccagggggaggugaacgugaccggcgucaucccgcugacgaccacccccaccaagagccacuucgccaaccugaaggggacggagacccggggcaagcucugccccaagugccugaacugcaccgaccuggacguggcccucgggcgccccaagugcaccggcaagaucccguccgcccgggugagcauccugcacgagguccgccccgugacguccggcugcuuccccaucaugcacgaccggaccaagauccgccagcugcccaaccuccugcggggguacgagcacauccgccugagcacccacaacgugaucaacgccgaggacgcgccgggcgggcccuacaagaucggcaccuccgggagcugccccaacaucacgaacggcaacggcuucuucgccaccauggccugggccguccccaagaacgacaagaacaagaccgcgaccaacccgcucacgaucgaggugcccuacaucugcaccgagggggaggaccagaucaccguguggggcuuccacuccgacaacgagacccagauggccaagcuguacggggacagcaagccccagaaguucacguccagcgccaacggcgucaccacccacuacgugucccagaucggcggguuccccaaccagaccgaggacggcgggcugccgcagagcggccggaucgugaucgacuacaugguccagaaguccgggaagacgggcaccaucaccuaccagcgcggcauccuccugccccagaagguguggugcgugagcgggcgguccaaggucaucaagggcagccugccccucaucggggaggccgacugccugcacgagaaguacggcgggcugaacaagagcaagcccuacuacaccggcgagcacgccaaggcggugggcaacugcccgaucugggugaagacgccccucaagcuggccaacgggaccaaguaccgcccgcccgccaagcugcucaaggagcggggcuucuucggggccaucgccggcuuccuggagggcgggugggagggcaugaucgcgggguggcacggcuacaccucccacggggcccacggcgucgccguggccgccgaccugaaguccacccaggaggcgaucaacaagaucacgaagaaccucaacucccugagcgagcuggaggucaagaaccuccagcgccuguccggcgccauggacgagcugcacaacgagauccucgagcuggacgagaagguggacgaccugcgggccgacaccaucagcucccagaucgagcucgccgugcugcugagcaacgaggggaucaucaacuccgaggacgagcaccuccuggcccuggagcgcaagcucaagaagaugcugggccccagcgcggucgagaucgggaacggcugcuucgagaccaagcacaagugcaaccagaccugccuggaccggaucgccgccgggaccuucgacgccggcgaguucucccuccccacguucgacagccugaacaucaccgcggccucccugaacgacgacggccucgacaaccacaccauccugcuguacuacagcaccgccgccuccagccuggccgugacgcucaugaucgcgaucuucguggucuacauggugucccgcgacaacgugagcugcuccaucugccuguga

SEQ ID NO: 92520 - RNA, 1755 nt, Artificial Sequence
  derived and/or modified CDS sequence (opt1) from hemagglutinin__InfluenzaB__ALN39776
augaaggccaucaucauccugcucaugguggucaccagcaacgccgaccgcaucugcaccggcaucacguccagcaacagcccccacguggugaagaccgcgacccagggggaggucaacgugaccggcgugaucccgcugacgaccacccccaccaaguccuacuucgccaaccugaaggggacgcggacccgcggcaagcucugccccgacugccugaacugcaccgaccuggacgucgcccucgggcggcccaugugcgugggcaccacgccguccgccaaggccagcauccugcacgaggugcgccccgucaccuccggcugcuuccccaucaugcacgaccggaccaagauccgccagcugcccaaccuccugcggggguacgagaagauccgccugagcacccagaacgugaucgacgcggagaaggccccgggcgggcccuaccggcucggcacguccgggagcugccccaacgccaccuccaagaucggcuucuucgccaccauggcgugggccgugcccaaggacaacuacaagaacgccaccaacccgcagacggucgaggugcccuacaucugcaccgagggcgaggaccagaucaccguguggggguuccacagcgacaacaagacccagaugaagucccuguacggcgacagcaacccccagaaguucacguccagcgccaacggggucaccacccacuacgugucccagaucggcgacuuccccgaccagaccgaggacggcgggcugccgcagagcggccgcaucguggucgacuacaugaugcagaagcccgggaagacgggcaccaucguguaccagcgcggggugcuccugccccagaaggucuggugcgccuccggccggagcaaggugaucaagggcagccugccccucaucggggaggcggacugccugcacgaggaguacggcgggcugaacaaguccaagccguacuacaccggcaagcacgccaaggccaucgggaacugccccaucugggugaagacgccccucaagcuggccaacggcaccaaguaccggcccccggccaagcugcucaaggagcgcggcuucuucggggcgaucgccggcuuccuggagggcgggugggaggggaugaucgccggcuggcacggcuacaccagccacggggcccacggcgucgccguggcggccgaccugaaguccacccaggaggccaucaacaagaucaccaagaaccucaacagccuguccgagcuggaggucaagaaccuccagcggcugagcggggccauggacgagcugcacaacgagauccucgagcuggacgagaagguggacgaccugcgcgccgacacgaucuccagccagaucgagcucgcggugcugcuguccaacgagggcaucaucaacagcgaggacgagcaccuccuggcccuggagcggaagcucaagaagaugcugggccccuccgccgucgacaucgggaacggcugcuucgagaccaagcacaagugcaaccagaccugccuggaccgcaucgccgcggggaccuucaacgccggcgaguucagccuccccaccuucgacucccugaacaucacggccgccagccugaacgacgacgggcucgacaaccacaccauccugcuguacuacuccaccgccgcgagcucccuggccgugacccucaugcuggccaucuucaucguguacauggucagccgggacaacguguccugcagcaucugccuguga

SEQ ID NO: 92521 - RNA, 1755 nt, Artificial Sequence; identical to SEQ ID NO: 92476
  derived and/or modified CDS sequence (opt1) from hemagglutinin__InfluenzaB__ALN39778

SEQ ID NO: 92522 - RNA, 1758 nt, Artificial Sequence; identical to SEQ ID NO: 92499
  derived and/or modified CDS sequence (opt1) from hemagglutinin__InfluenzaB__ALN39779

SEQ ID NO: 92523 - RNA, 1755 nt, Artificial Sequence; identical to SEQ ID NO: 92313
  derived and/or modified CDS sequence (opt1) from hemagglutinin__InfluenzaB__ALN39780

SEQ ID NO: 92524 - RNA, 1758 nt, Artificial Sequence; identical to SEQ ID NO: 92499
  derived and/or modified CDS sequence (opt1) from hemagglutinin__InfluenzaB__ALN39781

SEQ ID NO: 92525 - RNA, 1758 nt, Artificial Sequence; identical to SEQ ID NO: 92463
  derived and/or modified CDS sequence (opt1) from hemagglutinin__InfluenzaB__ALN39782

SEQ ID NO: 92526 - RNA, 1755 nt, Artificial Sequence
  derived and/or modified CDS sequence (opt1) from hemagglutinin__InfluenzaB__ALN39783
augaaggccaucaucgugcugcucauggucgugaccagcaacgccgaccgcaucugcaccggcaucacguccagcaacagcccccacguggucaagaccgcgacccagggggaggugaacgugaccggcgucaucccgcugacgaccacccccaccaaguccuacuucgccaaccugaaggggacgcggacccgcggcaagcucugccccgacugccugaacugcaccgaccuggacguggcccucgggcggcccaugugcgugggcaccacgccguccgccaaggccagcauccugcacgagguccgccccgugaccuccggcugcuuccccaucaugcacgaccggaccaagauccgccagcugcccaaccuccugcggggguacgagaagauccgccugagcacccagaacgugaucgacgcggagaaggccccgggcgggcccuaccggcucggcacguccgggagcugccccaacgccaccuccaagaucggcuucuucgccaccauggcgugggccguccccaaggacaacuacaagaacgccaccaaccugcagacgguggaggugccguacaucugcaccgagggcgaggaccagaucaccgucuggggguuccacagcgacaacaagacccagaugaagucccuguacggcgacagcaacccccagaaguucacguccagcgccaacggggugaccacccacuacgugucccagaucggcgacuuccccgaccagaccgaggacggcgggcucccccagagcggccgcaucgucguggacuacauggugcagaagccggggaagacgggcaccaucgucuaccagcgcggggugcugcugccccagaagguguggugcgccuccggccggagcaaggucaucaagggcagccucccccugaucggggaggcggacugccugcacgaggaguacggcgggcucaacaaguccaagcccuacuacaccggcaagcacgccaaggccaucgggaacugcccgaucugggugaagacgccccugaagcuggccaacggcaccaaguaccggccgcccgccaagcuccugaaggagcgcggcuucuucggggcgaucgccggcuuccuggagggcgggugggaggggaugaucgccggcuggcacggcuacaccagccacggggcccacggcgucgccguggcggccgaccucaaguccacccaggaggccaucaacaagaucaccaagaaccugaacagccuguccgagcucgaggugaagaaccugcagcggcugagcggggccauggacgagcuccacaacgagauccuggagcuggacgagaaggucgacgaccuccgcgccgacacgaucuccagccagaucgagcuggcggugcugcucuccaacgagggcaucaucaacagcgaggacgagcaccuccuggcccuggagcggaagcugaagaagaugcugggccccuccgccguggacaucgggaacggcugcuucgagaccaagcacaagugcaaccagaccugccucgaccgcaucgccgcggggaccuucaacgccggcgaguucagccugcccaccuucgacucccugaacaucacggccgccagccucaacgacgacgggcuggacaaccacaccauccugcuguacuacuccaccgccgcgagcucccucgccgucacccugaugcuggccaucuucaucguguacauggugagccgggacaacgucuccugcagcaucugccucuga

SEQ ID NO: 92527 - RNA, 1758 nt, Artificial Sequence; identical to SEQ ID NO: 92475
  derived and/or modified CDS sequence (opt1) from hemagglutinin__InfluenzaB__ALN39784

SEQ ID NO: 92528 - RNA, 1758 nt, Artificial Sequence; identical to SEQ ID NO: 92499
  derived and/or modified CDS sequence (opt1) from hemagglutinin__InfluenzaB__ALN39785

SEQ ID NO: 92529 - RNA, 1755 nt, Artificial Sequence; identical to SEQ ID NO: 92313
  derived and/or modified CDS sequence (opt1) from hemagglutinin__InfluenzaB__ALN39786

SEQ ID NO: 92530 - RNA, 1758 nt, Artificial Sequence; identical to SEQ ID NO: 92499
  derived and/or modified CDS sequence (opt1) from hemagglutinin__InfluenzaB__ALN39787

SEQ ID NO: 92531 - RNA, 1758 nt, Artificial Sequence; identical to SEQ ID NO: 92499
  derived and/or modified CDS sequence (opt1) from hemagglutinin__InfluenzaB__ALN39788

SEQ ID NO: 92532 - RNA, 1755 nt, Artificial Sequence
  derived and/or modified CDS sequence (opt1) from hemagglutinin__InfluenzaB__ALN39790
augaaggccaucaucgugcugcucauggucgugaccagcgacgccgaccgcaucugcaccggcaucacguccagcaacagcccccacguggucaagaccgcgacccagggggaggugaacgugaccggcgucaucccgcugacgaccacccccaccaaguccuacuucgccaaccugaaggggacgcggacccgcggcaagcucugccccgacugccugaacugcaccgaccuggacguggcccucgggcggcccaugugcgugggcaccacgccguccgccaaggccagcauccugcacgagguccgccccgugaccuccggcugcuuccccaucaugcacgaccggaccaagauccgccagcugcccaaccuccugcggggguacgagaagauccgccugagcacccagaacgugaucgacgcggagaaggccccgggcgggcccuaccggcucggcacguccgggagcugccccaacgccaccuccaagaucggcuucuucgccaccauggcgugggccguccccaaggacaacuacaagaacgccaccaacccgcagacgguggaggugcccuacaucugcaccgagggcgaggaccagaucaccgucuggggguuccacagcgacaacaagacccagaugaagucccuguacggcgacagcaacccccagcgcuucacguccagcgccaacggggugaccacccacuacgugucccagaucggcgacuuccccgaccagaccgaggacggcgggcugccgcagagcggccggaucgucguggacuacauggugcagaagcccgggaagacgggcaccaucgucuaccagcgcggggugcuccugccccagaagguguggugcgccuccggccggagcaaggucaucaagggcagccugccccucaucggggaggcggacugccugcacgaggaguacggcgggcugaacaaguccaagccguacuacaccggcaagcacgccaaggccaucgggaacugccccaucugggugaagacgccccucaagcuggccaacggcaccaaguaccggcccccggccaagcugcucaaggagcgcggcuucuucggggcgaucgccggcuuccuggagggcgggugggaggggaugaucgccggcuggcacggcuacaccagccacggggcccacggcgucgccguggcggccgaccugaaguccacccaggaggccaucaacaagaucaccaagaaccucaacagccuguccgagcuggaggugaagaaccuccagcgccugagcggggccauggacgagcugcacaacgagauccucgagcuggacgagaaggucgacgaccugcgggccgacacgaucuccagccagaucgagcucgcggugcugcuguccaacgagggcaucaucaacagcgaggacgagcaccuccuggcccuggagcgcaagcucaagaagaugcugggccccuccgccguggacaucgggaacggcugcuucgagaccaagcacaagugcaaccagaccugccuggaccggaucgccgcggggaccuucaacgccggcgaguucagccuccccaccuucgacucccugaacaucacggccgccagccugaacgacgacgggcucgacaaccacaccauccugcuguacuacuccaccgccgcgagcucccuggccgucacccucaugcuggccaucuucaucguguacauggugagccgcgacaacgucuccugcagcaucugccuguga

SEQ ID NO: 92533 - RNA, 1755 nt, Artificial Sequence
  derived and/or modified CDS sequence (opt1) from hemagglutinin__InfluenzaB__ALN39791
augaaggccaucaucgugcugcucauggucgugaugagcaacgccgaccgcaucugcaccggcaucaccuccagcaacagcccccacguggucaagacggcgacccagggggaggugaacgugaccggcgucaucccgcugaccacgacccccaccaaguccuacuucgccaaccugaaggggacccggacgcgcggcaagcucugccccgacugccugaacugcaccgaccuggacguggcccucgggcggcccaugugcgugggcaccaccccguccgccaaggccagcauccugcacgagguccgccccgugacguccggcugcuuccccaucaugcacgaccggaccaagauccgccagcugcccaaccuccugcggggguacgagaagauccgccugagcacccagaacgugaucgacgcggagaaggccccgggcgggcccuaccggcucggcaccuccgggagcugccccaacgccacguccaagaucggcuucuucgccaccauggcgugggccguccccaaggacaacuacaagaacgccaccaacccgcagaccguggaggugcccuacaucugcacggagggcgaggaccagaucaccgucuggggguuccacagcgacaacaagacccagaugaagucccuguacggcgacagcaacccccagaaguucaccuccagcgccaacggggugacgacccacuacgugucccagaucggcgacuuccccgaccagaccgaggacggcgggcugccgcagagcggccgcaucgucguggacuacauggugcagaagcccgggaagaccggcacgaucgucuaccagcgcggggugcuccugccccagaagguguggugcgccuccggccggagcaaggucaucaagggcagccugccccucaucggggaggcggacugccugcacgaggaguacggcgggcugaacaaguccaagccguacuacaccggcaagcacgccaaggccaucgggaacugccccaucugggugaagacgccccucaagcuggccaacggcaccaaguaccggcccccggccaagcugcucaaggagcgcggcuucuucggggcgaucgccggcuuccuggagggcgggugggaggggaugaucgccggcuggcacggcuacaccagccacggggcccacggcgucgccguggcggccgaccugaaguccacccaggaggccaucaacaagaucaccaagaaccucaacagccuguccgagcuggaggugaagaaccuccagcggcugagcggggccauggacgagcugcacaacgagauccucgagcuggacgagaaggucgacgaccugcgcgccgacaccaucuccagccagaucgagcucgcggugcugcuguccaacgagggcaucaucaacagcgaggacgagcaccuccuggcccuggagcggaagcucaagaagaugcugggccccuccgccguggacaucgggaacggcugcuucgagacgaagcacaagugcaaccagaccugccuggaccgcaucgccgcggggaccuucaacgccggcgaguucagccuccccaccuucgacucccugaacaucaccgccgccagccugaacgacgacgggcucgacaaccacacgauccugcuguacuacuccaccgccgcgagcucccuggccgucacccucaugcuggccaucuucaucguguacauggugagccgggacaacgucuccugcagcaucugccuguga

SEQ ID NO: 92534 - RNA, 1758 nt, Artificial Sequence; identical to SEQ ID NO: 92499
  derived and/or modified CDS sequence (opt1) from hemagglutinin__InfluenzaB__ALN39792

SEQ ID NO: 92535 - RNA, 1758 nt, Artificial Sequence; identical to SEQ ID NO: 92499
  derived and/or modified CDS sequence (opt1) from hemagglutinin__InfluenzaB__ALN39793

SEQ ID NO: 92536 - RNA, 1755 nt, Artificial Sequence
  derived and/or modified CDS sequence (opt1) from hemagglutinin__InfluenzaB__ALN39794
augaaggccaucaucauccugcucaugguggucaccagcaacgccgaccgcaucugcaccggcaucacguccagcaacagcccccacguggugaagaccgcgacccagggggaggucaacgugaccggcgugaucccgcugacgaccacccccaccaaguccuacuucgccaaccugaaggggacgcggacccgcggcaagcucugccccgacugccugaacugcaccgaccuggacgucgcccucgggcggcccaugugcgugggcaccacgccguccgccaaggccagcauccugcacgaggugcgccccgucaccuccggcugcuuccccaucaugcacgaccggaccaagauccgccagcugcccaaccuccugcggggguacgagaagauccgccugagcacccagaacgugaucgacgcggagaaggccccgggcgggcccuaccggcucggcacguccgggagcugccccaacgccaccuccaagaucggcuucuucgccaccauggcgugggccgugcccaaggacaacuacaagaacgccaccaacccgcagacggucgaggugcccuacaucugcaccgagggcgaggaccagaucaccguguggggguuccacagcgacaacaagacccagaugaagucccuguacggcgacagcaacccccagaaguucacguccagcgccgacggggucaccacccacuacgugucccagaucggcgacuuccccgaccagaccgaggacggcgggcugccgcagagcggccgcaucguggucgacuacaugaugcagaagcccgggaagacgggcaccaucguguaccagcgcggggugcuccugccccagaaggucuggugcgccuccggccggagcaaggugaucaagggcagccugccccucaucggggaggcggacugccugcacgaggaguacggcgggcugaacaaguccaagccguacuacaccggcaagcacgccaaggccaucgggaacugccccaucugggugaagacgccccucaagcuggccaacggcaccaaguaccggcccccggccaagcugcucaaggagcgcggcuucuucggggcgaucgccggcuuccuggagggcgggugggaggggaugaucgccggcuggcacggcuacaccagccacggggcccacggcgucgccguggcggccgaccugaaguccacccaggaggccaucaacaagaucaccaagaaccucaacagccuguccgagcuggaggucaagaaccuccagcggcugagcggggccauggacgagcugcacaacgagauccucgagcuggacgagaagguggacgaccugcgcgccgacacgaucuccagccagaucgagcucgcggugcugcuguccaacgagggcaucaucaacagcgaggacgagcaccuccuggcccuggagcggaagcucaagaagaugcugggccccuccgccgucgacaucgggaacggcugcuucgagaccaagcacaagugcaaccagaccugccuggaccgcaucgccgcggggaccuucaacgccggcgaguucagccuccccaccuucgacucccugaacaucacggccgccagccugaacgacgacgggcucgacaaccacaccauccugcuguacuacuccaccgccgcgagcucccuggccgugacccucaugcuggccaucuucaucguguacauggucagccgggacaacguguccugcagcaucugccuguga

SEQ ID NO: 92537 - RNA, 1755 nt, Artificial Sequence; identical to SEQ ID NO: 92476
  derived and/or modified CDS sequence (opt1) from hemagglutinin__InfluenzaB__ALN39795

SEQ ID NO: 92538 - RNA, 1758 nt, Artificial Sequence
  derived and/or modified CDS sequence (opt1) from hemagglutinin__InfluenzaB__ALN39796
augaaggccaucaucgugcugcucauggucgugaccagcaacgccgaccgcaucugcaccggcaucacguccagcaacagcccccacguggucaagaccgcgacccagggggaggugaacgugaccggcgucaucccgcugacgaccacccccaccaagagccacuucgccaaccugaaggggacggagacccggggcaagcucugccccaagugccugaacugcaccgaccuggacguggcccucgggcgccccaagugcaccggcaagaucccguccgcccgggugagcauccugcacgagguccgccccgugacguccggcugcuuccccaucaugcacgaccggaccaagauccgccagcugcccaaccuccugcggggguacgagcacauccgccugagcacccacaacgugaucaacgccgaggacgcgccgggcgggcccuacaagaucggcaccuccgggagcugccccaacgccacgaacggcaacggcuucuucgccaccauggccugggcgguccccaagaacgacaagaacaagaccgccaccaacccgcucacgaucgaggugcccuacaucugcaccgagggggaggaccagaucaccguguggggcuuccacuccgacaacgagacccagauggccaagcuguacggggacagcaagccccagaaguucacguccagcgccaacggcgucaccacccacuacgugucccagaucggcggguuccccaaccagaccgaggacggcgggcugccgcagagcggccggaucguggucgacuacauggugcagaaguccgggaagacgggcaccaucaccuaccagcgcggcauccuccugccccagaagguguggugcgccagcgggcgguccaaggucaucaagggcagccugccccucaucggggaggcggacugccugcacgagaaguacggcgggcugaacaagagcaagcccuacuacaccggcgagcacgccaaggccaucggcaacugcccgaucugggugaagacgccccucaagcuggccaacgggaccaaguaccgcccgcccgccaagcugcucaaggagcggggcuucuucggggcgaucgccggcuuccuggagggcgggugggagggcaugaucgccggguggcacggcuacaccucccacggggcccacggcguggccgucgcggccgaccugaaguccacccaggaggccaucaacaagaucacgaagaaccucaacucccugagcgagcuggaggugaagaaccuccagcgccuguccggcgccauggacgagcugcacaacgagauccucgagcuggacgagaaggucgacgaccugcgggccgacaccaucagcucccagaucgagcucgcggugcugcugagcaacgaggggaucaucaacuccgaggacgagcaccuccuggcccuggagcgcaagcucaagaagaugcugggccccagcgccguggagaucgggaacggcugcuucgagaccaagcacaagugcaaccagaccugccuggaccggaucgccgcggggaccuucgacgccggcgaguucucccuccccacguucgacagccugaacaucaccgccgccucccugaacgacgacggccucgacaaccacaccauccugcuguacuacagcaccgccgcguccagccuggccgucacgcucaugaucgccaucuucgugguguacauggucucccgcgacaacgugagcugcuccaucugccuguga

SEQ ID NO: 92539 - RNA, 1755 nt, Artificial Sequence; identical to SEQ ID NO: 92476
  derived and/or modified CDS sequence (opt1) from hemagglutinin__InfluenzaB__ALN39797

SEQ ID NO: 92540 - RNA, 1755 nt, Artificial Sequence
  derived and/or modified CDS sequence (opt1) from hemagglutinin__InfluenzaB__ALN39798
augaaggccaucaucgugcugcucauggucgugaccagcaacgccgaccgcaucugcaccggcaucacguccagcuccagcccccacguggucaagaccgcgacccagggggaggugaacgugaccggcgucaucccgcugacgaccacccccaccaaguccuacuucgccaaccugaaggggacgcggacccgcggcaagcucugccccgacugccugaacugcaccgaccuggacguggcccucgggcggcccaugugcgugggcaccacgccgagcgccaaggccuccauccugcacgagguccgccccgugaccagcggcugcuuccccaucaugcacgaccggaccaagauccgccagcugcccaaccuccugcggggguacgagaagauccgccuguccacccagaacgugaucgacgcggagaaggccccgggcgggcccuaccggcucggcacgagcggguccugccccaacgccaccagcaagaucggcuucuucgccaccauggcgugggccguccccaaggacaacuacaagaacgccaccaacccgcagacgguggaggugcccuacaucugcaccgagggcgaggaccagaucaccgucuggggguuccacuccgacaacaagacccagaugaagucccuguacggcgacagcaacccccagaaguucacgagcuccgccaacggggugaccacccacuacgugagccagaucggcgacuuccccgaccagaccgaggacggcgggcugccgcaguccggccgcaucgucguggacuacaugaugcagaagcccgggaagacgggcaccaucguguaccagcgcgggguccuccugccccagaagguguggugcgccagcggccggagcaaggugaucaagggcucccugccccucaucggggaggcggacugccugcacgaggaguacggcgggcugaacaagagcaagccguacuacaccggcaagcacgccaaggccaucgggaacugccccaucugggucaagacgccccucaagcuggccaacggcaccaaguaccggcccccggccaagcugcucaaggagcgcggcuucuucggggcgaucgccggcuuccuggagggcgggugggaggggaugaucgccggcuggcacggcuacaccucccacggggcccacggcguggccgucgcggccgaccucaagagcacccaggaggccaucaacaagaucaccaagaaccugaacucccugagcgagcuggaggugaagaaccuccagcggcuguccggggccauggacgagcugcacaacgagauccucgagcuggacgagaagguggacgaccugcgcgccgacacgaucagcucccagaucgagcucgcgguccugcugagcaacgagggcaucaucaacuccgaggacgagcaccuccuggcccuggagcggaagcucaagaagaugcugggccccagcgccguggacaucgggaacggcugcuucgagaccaagcacaagugcaaccagaccugccuggaccgcaucgccgcggggaccuucaacgccggcgaguucucccuccccaccuucgacagccugaacaucacggccgccucccugaacgacgacgggcucgacaaccacaccauccugcuguacuacagcaccgccgcguccagccuggccgugacccucaugcuggccaucuucaucgucuacauggugucccgggacaacgugagcugcagcaucugccuguga

SEQ ID NO: 92541 - RNA, 1755 nt, Artificial Sequence; identical to SEQ ID NO: 92313
  derived and/or modified CDS sequence (opt1) from hemagglutinin__InfluenzaB__ALN39799

SEQ ID NO: 92542 - RNA, 1755 nt, Artificial Sequence
  derived and/or modified CDS sequence (opt1) from hemagglutinin__InfluenzaB__ALN39800
augaaggccaucaucgugcugcucauggucgugaccagcaacgccgaccgcaucugcaccggcaucacguccagcaacagcccccacguggucaagaccgcgacccagggggaggugaacgugaccggcgucaucccgcugacgaccacccccaccaaguccuacuucgccaaccugaaggggacgcggacccgcggcaagcucugccccgacugccugaacugcaccgaccuggacguggcccucgggcggcccaugugcgugggcaccacgccguccgccaaggccagcauccugcacgagguccgccccgugaccuccggcugcuuccccaucaugcacgaccggaccaagauccgccagcugcccaaccuccugcggggguacgagaagauccgccugagcacccagaacgugaucgacgcggagaaggccccgggcgggcccuaccggcucggcacguccgggagcugccccaacgccaccuccaagaucggcuucuucgccaccauggcgugggccguccccaaggacaacuacaagaacgccaccaacccgcagacgguggaggugcccuacaucugcaccgagggcgaggaccagaucaccgucuggggguuccacagcgacaacaagacccagaugaagucccuguacggcgacagcaacccccagaaguucacguccagcgccaacggggugaccacccacuacgugucccagaucggcgacuuccccgaccagaccgaggacggcgggcugccgcagagcggccgcaucgucguggacuacaugaugcagaagcccgggaagacgggcaccaucguguaccagcgcgggguccuccugccccagaagguguggugcgccuccggccggagcaaggugaucaagggcagccugccccucaucggggaggcggacugccugcacgaggaguacggcgggcugaacaaguccaagccguacuacaccggcaagcacgccaaggccaucgggaacugccccaucugggucaagacgccccucaagcuggccaacggcaccaaguaccggcccccggccaagcugcucaaggagcgcggcuucuucggggcgaucgccggcuuccuggagggcgggugggaggggaugaucgccggcuggcacggcuacaccagccacggggcccacggcguggccgucgcggccgaccugaaguccacccaggaggccaucaacaagaucaccaagaaccucaacagccuguccgagcuggaggugaagaaccuccagcggcugagcggggccauggacgagcugcacaacgagauccucgagcuggacgagaagguggacgaccugcgcgccgacacgaucuccagccagaucgagcucgcgguccugcuguccaacgagggcaucaucaacagcgaggacgagcaccuccuggcccuggagaagaagcucaagaagaugcugggccccuccgccguggacaucgggaacggcugcuucgagaccaagcacaagugcaaccagaccugccuggaccggaucgccgcggggaccuucaacgccggcgaguucagccuccccaccuucgacucccugaacaucacggccgccagccugaacgacgacgggcucgacaaccacaccauccugcuguacuacuccaccgccgcgagcucccuggccgugacccucaugcuggccaucuucaucgucuacauggugagccgcgacaacguguccugcagcaucugccuguga

SEQ ID NO: 92543 - RNA, 1755 nt, Artificial Sequence; identical to SEQ ID NO: 92533
  derived and/or modified CDS sequence (opt1) from hemagglutinin__InfluenzaB__ALN39801

SEQ ID NO: 92544 - RNA, 1755 nt, Artificial Sequence; identical to SEQ ID NO: 92476
  derived and/or modified CDS sequence (opt1) from hemagglutinin__InfluenzaB__ALN39802

SEQ ID NO: 92545 - RNA, 1755 nt, Artificial Sequence; identical to SEQ ID NO: 92533
  derived and/or modified CDS sequence (opt1) from hemagglutinin__InfluenzaB__ALN39803

SEQ ID NO: 92546 - RNA, 1755 nt, Artificial Sequence; identical to SEQ ID NO: 92472
  derived and/or modified CDS sequence (opt1) from hemagglutinin__InfluenzaB__ALN39804

SEQ ID NO: 92547 - RNA, 1758 nt, Artificial Sequence; identical to SEQ ID NO: 92499
  derived and/or modified CDS sequence (opt1) from hemagglutinin__InfluenzaB__ALN39805

SEQ ID NO: 92548 - RNA, 1758 nt, Artificial Sequence; identical to SEQ ID NO: 91013
  derived and/or modified CDS sequence (opt1) from hemagglutinin__InfluenzaB__ACN29380

SEQ ID NO: 92549 - RNA, 1758 nt, Artificial Sequence; identical to SEQ ID NO: 91345
  derived and/or modified CDS sequence (opt1) from hemagglutinin__InfluenzaB__EPI498048

SEQ ID NO: 92550 - RNA, 1758 nt, Artificial Sequence
  derived and/or modified CDS sequence (opt1) from hemagglutinin__InfluenzaB__ANC28539
augaaggccaucaucgugcugcucauggucgugaccagcaacgccgaccgcaucugcaccggcaucacguccagcaacagcccccacguggucaagaccgcgacccagggggaggugaacgugaccggcgucaucccgcugacgaccacccccaccaagagccacuucgccaaccugaaggggacggagacccggggcaagcucugccccaagugccugaacugcaccgaccuggacguggcccucgggcgccccaagugcaccggcaagaucccguccgcccgggugagcauccugcacgagguccgccccgugacguccggcugcuuccccaucaugcacgaccggaccaagauccgccagcugcccaaccuccugcggggguacgagcacauccgccugagcacccacaacgugaucaacgccgagaacgcgccgggcgggcccuacaagaucggcaccuccgggagcugccccaacaucacgaacggcaacggcuucuucgccaccauggccugggccguccccaagaacgacaagaacaagaccgcgaccaacccgcucacgaucgaggugcccuacaucugcaccgagggggaggaccagaucaccguguggggcuuccacuccgacaacgaggcccagauggccaagcuguacggggacagcaagccccagaaguucaccuccagcgccaacggcgucacgacccacuacgugucccagaucggcggguuccccaaccagaccgaggacggcgggcugccgcagagcggccggaucguggucgacuacauggugcagaaguccgggaagaccggcacgaucaccuaccagcgcggcauccuccugccccagaagguguggugcgccagcgggcgguccaaggucaucaagggcagccugccccucaucggggaggcggacugccugcacgagaaguacggcgggcugaacaagagcaagcccuacuacaccggcgagcacgccaaggccaucggcaacugcccgaucugggugaagacgccccucaagcuggccaacgggaccaaguaccgcccgcccgccaagcugcucaaggagcggggcuucuucggggcgaucgccggcuuccuggagggcgggugggagggcaugaucgccggguggcacggcuacaccucccacggggcccacggcguggccgucgcggccgaccugaaguccacccaggaggccaucaacaagaucaccaagaaccucaacucccugagcgagcuggaggugaagaaccuccagcgccuguccggcgccauggacgagcugcacaacgagauccucgagcuggacgagaaggucgacgaccugcgggccgacacgaucagcucccagaucgagcucgcggugcugcugagcaacgaggggaucaucaacuccgaggacgagcaccuccuggcccuggagcgcaagcucaagaagaugcugggccccagcgccguggagaucgggaacggcugcuucgagaccaagcacaagugcaaccagaccugccuggaccggaucgccgcggggaccuucgacgccggcgaguucucccuccccaccuucgacagccugaacaucacggccgccucccugaacgacgacggccucgacaaccacaccauccugcuguacuacagcaccgccgcguccagccuggccgucacccucaugaucgccaucuucgugguguacauggucucccgcgacaacgugagcugcuccaucugccuguga

SEQ ID NO: 92551 - RNA, 1758 nt, Artificial Sequence
  derived and/or modified CDS sequence (opt1) from hemagglutinin__InfluenzaB__EPI827073
augaaggccaucaucgugcugcucauggucgugaccagcaacgccgaccgcaucugcaccggcaucacguccagcaacagcccccacguggucaagaccgcgacccagggggaggugaacgugaccggcgucaucccgcugacgaccacccccaccaagucccacuucgccaaccugaaggggacggagacccggggcaagcucugccccaagugccugaacugcaccgaccuggacguggcccucgggcgccccaagugcaccggcaagaucccguccgcccgggugagcauccugcacgagguccgccccgugacguccggcugcuuccccaucaugcacgaccggaccaagauccgccagcugcccaaccuccugcggggguacgagcacauccgccugagcacccacaacgugaucaacgccgagaacgcgccgggcgggcccuacaagaucggcaccuccgggagcugccccaacaucacgaacggcaacggcuucuucgccaccauggccugggccguccccaagaacgacaagaacaagaccgcgaccaacccgcucacgaucgaggugcccuacaucugcaccgagggggaggaccagaucaccguguggggccugcacuccgacaacgagauccagauggccaagcuguacggggacagcaagccccagaaguucaccuccagcgccaacggcgucacgacccacuacgugucccagaucggcggguuccccaaccagaccgaggacggcgggcucccgcagagcggccggaucguggucgacuacauggugcagaaguccgggaagaccggcacgaucaccuaccagcgcggcauccugcugccccagaagguguggugcgccagcgggcgguccaaggucaucaagggcagccucccccugaucggggaggccgacugccugcacgagaaguacggcgggcucaacaagagcaagcccuacuacaccggcgagcacgcgaaggccaucggcaacugcccgaucugggugaagacgccccugaagcuggccaacgggaccaaguaccgcccgcccgccaagcuccugaaggagcggggcuucuucggggccaucgcgggcuuccuggagggcgggugggagggcaugaucgccggguggcacggcuacaccucccacggggcccacggcguggccgucgccgcggaccucaagagcacccaggaggccaucaacaagaucaccaagaaccugaacucccugagcgagcucgaggugaagaaccugcagcgccuguccggcgccauggacgagcuccacaacgagauccuggagcuggacgagaaggucgacgaccuccgggccgacacgaucagcucccagaucgagcuggccgugcugcucagcaacgaggggaucaucaacuccgaggacgagcaccuccuggcgcuggagcgcaagcugaagaagaugcugggccccagcgccguggagaucgggaacggcugcuucgagaccaagcacaagugcaaccagaccugccucgaccggaucgccgccgggaccuucgacgcgggcgaguucucccugcccaccuucgacagccugaacaucacggccgccucccucaacgacgacggccuggacaaccacaccauccugcuguacuacagcaccgccgccuccagccucgcggucacccugaugaucgccaucuucgugguguacauggucucccgcgacaacgugagcugcuccaucugccuguga

SEQ ID NO: 92552 - RNA, 1758 nt, Artificial Sequence; identical to SEQ ID NO: 90771
  derived and/or modified CDS sequence (opt1) from hemagglutinin__InfluenzaB__EPI244699

SEQ ID NO: 92553 - RNA, 1758 nt, Artificial Sequence; identical to SEQ ID NO: 90764
  derived and/or modified CDS sequence (opt1) from hemagglutinin__InfluenzaB__EPI244702

SEQ ID NO: 92554 - RNA, 1755 nt, Artificial Sequence; identical to SEQ ID NO: 92153
  derived and/or modified CDS sequence (opt1) from hemagglutinin__InfluenzaB__EPI540671

SEQ ID NO: 92555 - RNA, 1755 nt, Artificial Sequence
  derived and/or modified CDS sequence (opt1) from hemagglutinin__InfluenzaB__EPI573303
augaaggccaucaucgugcugcucauggucgugaccagcaacgccgaccgcaucugcaccggcaucacguccagcaacagcccccacguggucaagaccgcgacccagggggaggugaacgugaccggcgucaucccgcugacgaccacccccaccaaguccuacuucgccaaccugaaggggacgcggacccgcggcaagcucugccccgacugccugaacugcaccgaccuggacguggcccucgggcggcccaugugcgugggcaccacgccguccgccaaggccagcauccugcacgagguccgccccgugaccuccggcugcuuccccaucaugcacgaccggaccaagauccgccagcugcccaaccuccugcggggguacgagaagauccgccugagcacccagaacgugaucgacgcggagaaggccccgggcgggcccuaccggcucggcacguccgggagcugccccaacgccaccuccaagaucggcuucuucgccaccauggcgugggccguccccaaggacaacuacaagaacgccaccaacccgcugacgguggaggugcccuacaucugcaccgagggcgaggaccagaucaccgucuggggguuccacagcgacgacaagacccagaugaagucccuguacggcgacagcaacccccagaaguucacguccagcgccaacggggugaccacccacuacgugucccagaucggcgacuuccccgaccagaccgaggacggcgggcucccgcagagcggccgcaucgucguggacuacaugaugcagaagcccgggaagacgggcaccaucguguaccagcgcgggguccugcugccccagaagguguggugcgccuccggccggagcaaggugaucaagggcagccucccccugaucggggaggcggacugccugcacgaggaguacggcgggcucaacaaguccaagccguacuacaccggcaagcacgccaaggccaucgggaacugccccaucugggucaagacgccccugaagcuggccaacggcaccaaguaccggcccccggccaagcuccugaaggagcgcggcuucuucggggcgaucgccggcuuccuggagggcgggugggaggggaugaucgccggcuggcacggcuacaccagccacggggcccacggcguggccgucgcggccgaccucaaguccacccaggaggccaucaacaagaucaccaagaaccugaacagccuguccgagcucgaggugaagaaccugcagcggcugagcggggccauggacgagcuccacaacgagauccuggagcuggacgagaagguggacgaccuccgcgccgacacgaucuccagccagaucgagcuggcgguccugcucuccaacgagggcaucaucaacagcgaggacgagcaccuccuggcccuggagcggaagcugaagaagaugcugggccccuccgccguggacaucgggaacggcugcuucgagaccaagcacaagugcaaccagaccugccucgaccgcaucgccgcggggaccuucaacgccggcgaguucagccugcccaccuucgacucccugaacaucacggccgccagccucaacgacgacgggcuggacaaccacaccauccugcuguacuacuccaccgccgcgagcucccucgccgugacccugaugcuggccaucuucaucgucuacauggugagccgggacaacguguccugcagcaucugccucuga

SEQ ID NO: 92556 - RNA, 1755 nt, Artificial Sequence
  derived and/or modified CDS sequence (opt1) from hemagglutinin__InfluenzaB__EPI829466
augaaggccaucaucgugcugcucauggucgugaccagcaacgccgaccgcaucugcaccggcaucacguccagcaacagcccccacguggucaagaccgcgacccagggggaggugaacgugaccggcgucaucccgcugacgaccacccccaccaaguccuacuucgccaaccugaaggggacgcggacccgcggcaagcucugccccgacugccugaacugcaccgaccuggacguggcccucgggcggcccaugugcgugggcaccacgccguccgccaaggccagcauccugcacgagguccgccccgugaccuccggcugcuuccccaucaugcacgaccggaccaagauccgccagcugcccaaccuccugcggggguacgagaagauccgccugagcacccagaacgugaucgacgcggagaaggccccgggcgggcccuaccggcucggcacguccgggagcugccccaacgccaccuccaagaucggcuucuucgccaccauggcgugggccguccccaaggacaacuacaagaacgccaccaacccgcugacgguggaggugcccuacaucugcaccgagggcgaggaccagaucaccgucuggggguuccacagcgacgacaagacccagaugaagucccuguacggcgacagcaacccccagaaguucacguccagcgccaacggggugaccacccacuacgugucccagaucggcgacuuccccgaccagaccgaggacgagggccucccgcagagcgggcgcaucgucguggacuacaugaugcagaagcccggcaagacggggaccaucguguaccagcggggcguccugcugccccagaagguguggugcgccuccgggcgcagcaaggugaucaagggcagccucccccugaucggcgaggcggacugccugcacgaggaguacgggggccucaacaaguccaagccguacuacaccgggaagcacgccaaggccaucggcaacugccccaucugggucaagacgccccugaagcuggccaacgggaccaaguaccggcccccggccaagcuccugaaggagcgcggcuucuucggcgcgaucgccggguuccuggagggcgggugggagggcaugaucgccggguggcacggcuacaccagccacggcgcccacgggguggccgucgcggccgaccucaaguccacccaggaggccaucaacaagaucaccaagaaccugaacagccuguccgagcucgaggugaagaaccugcagcggcugagcggcgccauggacgagcuccacaacgagauccuggagcuggacgagaagguggacgaccuccgcgccgacacgaucuccagccagaucgagcuggcgguccugcucuccaacgaggggaucaucaacagcgaggacgagcaccuccuggcccuggagcggaagcugaagaagaugcugggccccuccgccguggacaucggcaacgggugcuucgagaccaagcacaagugcaaccagaccugccucgaccgcaucgccgcgggcaccuucaacgccggggaguucagccugcccaccuucgacucccugaacaucacggccgccagccucaacgacgacggccuggacaaccacaccauccugcuguacuacuccaccgccgcgagcucccucgccgugacccugaugcuggccaucuucaucgucuacauggugagccgggacaacguguccugcagcaucugccucuga

SEQ ID NO: 92557 - RNA, 1755 nt, Artificial Sequence
  derived and/or modified CDS sequence (opt1) from hemagglutinin__InfluenzaB__EPI684429
augaaggccaucaucgugcugcucauggucgugaugagcaacgccgaccgcaucugcaccggcaucaccuccagcaacagcccccacguggucaagacggcgacccagggggaggugaacgugaccggcgucaucccgcugaccacgacccccaccaaguccuacuucgccaaccugaaggggacccggacgcgcggcaagcucugccccgacugccugaacugcaccgaccuggacguggcccucgggcggcccaugugcgugggcaccaccccguccgccaaggccagcauccugcacgagguccgccccgugacguccggcugcuuccccaucaugcacgaccggaccaagauccgccagcugcccaaccuccugcggggguacgagaagauccgccugagcacccagaacgugaucgacgcggagaaggccccgggcgggcccuaccggcucggcaccuccgggagcugccccaacgccacguccaagaucggcuucuucgccaccauggcgugggccguccccaaggacaacuacaagaacgccaccaacccgcagaccguggaggugcccuacaucugcacggagggcgaggaccagaucaccgucuggggguuccacagcgacaacaagacccagaugaagucccuguacggcgacagcaacccccagaaguucaccuccagcgccaacggggugacgacccacuacgugucccagaucggcgacuuccccgaccagaccgaggacggcgggcugccgcagagcggccgcaucgucguggacuacauggugcagaagcccgggaagaccggcacgaucgucuaccagcgcggggugcuccugccccagaagguguggugcgucuccggccggagcaaggugaucaagggcagccugccccucaucggggaggccgacugccugcacgaggaguacggcgggcugaacaaguccaagccguacuacaccggcaagcacgcgaaggccaucgggaacugccccaucugggucaagacgccccucaagcuggccaacggcaccaaguaccggcccccggccaagcugcucaaggagcgcggcuucuucggggccaucgcgggcuuccuggagggcgggugggaggggaugaucgccggcuggcacggcuacaccagccacggggcccacggcguggccguggccgcggaccugaaguccacccaggaggccaucaacaagaucaccaagaaccucaacagccuguccgagcuggaggucaagaaccuccagcggcugagcggggccauggacgagcugcacaacgagauccucgagcuggacgagaagguggacgaccugcgcgccgacaccaucuccagccagaucgagcucgccgugcugcuguccaacgagggcaucaucaacagcgaggacgagcaccuccuggcgcuggagcggaagcucaagaagaugcugggccccuccgccgucgacaucgggaacggcugcuucgagacgaagcacaagugcaaccagaccugccuggaccgcaucgccgccgggaccuucaacgcgggcgaguucagccuccccaccuucgacucccugaacaucaccgccgccagccugaacgacgacgggcucgacaaccacacgauccugcuguacuacuccaccgccgccagcucccuggcggugacccucaugcuggccaucuucaucguguacauggucagccgggacaacguguccugcagcaucugccuguga

SEQ ID NO: 92558 - RNA, 1758 nt, Artificial Sequence; identical to SEQ ID NO: 90776
  derived and/or modified CDS sequence (opt1) from hemagglutinin__InfluenzaB__AFH58447

SEQ ID NO: 92559 - RNA, 1758 nt, Artificial Sequence
  derived and/or modified CDS sequence (opt1) from hemagglutinin__InfluenzaB__EPI173279
augaaggccaucaucgugauccugauggucgugaccagcaacgccgaccgcaucugcaccggcaucacguccagcaacagcccccacguggucaagaccgcgacccagggggaggugaacgugaccggcgucaucccgcucacgaccacccccaccaagagccacuucgccaaccugaaggggacggagacccggggcaagcugugccccaagugccucaacugcaccgaccuggacguggcccuggggcgccccaagugcaccggcaagaucccguccgcccgggugagcauccuccacgagguccgccccgugacguccggcugcuuccccaucaugcacgaccggaccaagauccgccagcugcccaaccugcuccggggguacgagcacauccgccugagcacccacaacgugaucaacgccgagaacgcgccgggcgggcccuacaagaucggcaccuccgggagcugccccaacaucacgaacggcaacggcuucuucgccaccauggccugggccguccccaagaacgacaagaacaagaccgcgaccaacccgcugacgaucgaggugcccuacaucugcaccgagggggaggaccagaucaccguguggggcuuccacuccgacagcgagacccagauggccaagcucuacggggacuccaagccccagaaguucacgagcuccgccaacggcgucaccacccacuacgugagccagaucggcggguuccccaaccagaccgaggacggcgggcugccgcaguccggccggaucguggucgacuacauggugcagaaguccgggaagacgggcaccaucaccuaccagcgcggcauccugcucccccagaagguguggugcgccuccgggcggagcaaggucaucaagggcagccugccccugaucggggaggccgacugccuccacgagaaguacggcgggcugaacaaguccaagcccuacuacaccggcgagcacgcgaaggccaucggcaacugcccgaucugggugaagacgccccugaagcucgccaacgggaccaaguaccgcccgcccgccaagcugcugaaggagcggggcuucuucggggccaucgcgggcuuccucgagggcgggugggagggcaugaucgccggguggcacggcuacaccagccacggggcccacggcguggccgucgccgcggaccugaaguccacccaggaggccaucaacaagaucacgaagaaccugaacagccucuccgagcuggaggugaagaaccugcagcgccucagcggcgccauggacgagcugcacaacgagauccuggagcucgacgagaaggucgacgaccugcgggccgacaccaucuccagccagaucgagcuggccgugcuccuguccaacgaggggaucaucaacagcgaggacgagcaccuccuggcgcuggagcgcaagcugaagaagaugcucggccccuccgccguggagaucgggaacggcugcuucgagaccaagcacaagugcaaccagaccugccuggaccggaucgccgccgggaccuucgacgcgggcgaguucagccugcccacguucgacucccucaacaucaccgccgccagccugaacgacgacggccuggacaaccacaccauccuccuguacuacuccaccgccgccagcucccuggcggucacgcugaugaucgccaucuucgugguguacauggucagccgcgacaacguguccugcagcaucugccucuga

SEQ ID NO: 92560 - RNA, 1758 nt, Artificial Sequence; identical to SEQ ID NO: 91345
  derived and/or modified CDS sequence (opt1) from hemagglutinin__InfluenzaB__EPI163726

SEQ ID NO: 92561 - RNA, 1758 nt, Artificial Sequence; identical to SEQ ID NO: 92499
  derived and/or modified CDS sequence (opt1) from hemagglutinin__InfluenzaB__EPI636340

SEQ ID NO: 92562 - RNA, 1758 nt, Artificial Sequence
  derived and/or modified CDS sequence (opt1) from hemagglutinin__InfluenzaB__EPI645995
augaaggccaucaucgugcugcucauggucgugaccagcaacgccgaccgcaucugcaccggcaucacguccagcaacagcccccacguggucaagaccgcgacccagggggaggugaacgugaccggcgucaucccgcugacgaccacccccaccaagagccacuucgccaaccugaaggggacggagacccggggcaagcucugccccaagugccugaacugcaccgaccuggacguggcccucgggcgccccaagugcaccggcaagaucccguccgcccgggugagcauccugcacgagguccgccccgugacguccggcugcuuccccaucaugcacgaccggaccaagauccgccagcugcccaaccuccugcggggguacgagcacgugcgccugagcacccacaacgucaucaacgccgaggacgcgccgggcgggcccuacaagaucggcaccuccgggagcugccccaacaucacgaacggcaacggcuucuucgccaccauggccugggccgugcccaagaacgacaagaacaagaccgcgaccaacccgcucacgaucgaggugcccuacaucugcaccgagggggaggaccagaucaccgucuggggcuuccacuccgacgacgagacccagauggccaagcuguacggggacagcaagccccagaaguucacguccagcgccaacggcgugaccacccacuacgugucccagaucggcggguuccccaaccagaccgaggacggcgggcugccgcagagcggccggaucgucguggacuacauggugcagaaguccgggaagacgggcaccaucaccuaccagcgcggcauccuccugccccagaaggucuggugcgccagcgggcgguccaaggugaucaagggcagccugccccucaucggggaggccgacugccugcacgagaaguacggcgggcugaacaagagcaagcccuacuacaccggcgagcacgcgaaggccaucggcaacugcccgaucugggugaagacgccccucaagcuggccaacgggaccaaguaccgcccgcccgccaagcugcucaaggagcggggcuucuucggggccaucgcgggcuuccuggagggcgggugggagggcaugaucgccggguggcacggcuacaccucccacggggcccacggcgucgccguggccgcggaccugaaguccacccaggaggccaucaacaagaucacgaagaaccucaacucccugagcgagcuggaggucaagaaccuccagcgccuguccggcgccauggacgagcugcacaacgagauccucgagcuggacgagaagguggacgaccugcgggccgacaccaucagcucccagaucgagcucgccgugcugcugagcaacgaggggaucaucaacuccgaggacgagcaccuccuggcgcuggagcgcaagcucaagaagaugcugggccccagcgccgucgagaucgggaacggcugcuucgagaccaagcacaagugcaaccagaccugccuggaccggaucgccgccgggaccuucgacgcgggcgaguucucccuccccacguucgacagccugaacaucaccgccgccucccugaacgacgacggccucgacaaccacaccauccugcuguacuacagcaccgccgccuccagccuggcggugacgcucaugaucgccaucuucguggucuacauggugucccgcgacaacgugagcugcuccaucugccuguga

SEQ ID NO: 92563 - RNA, 1755 nt, Artificial Sequence; identical to SEQ ID NO: 92153
  derived and/or modified CDS sequence (opt1) from hemagglutinin__InfluenzaB__EPI539769

SEQ ID NO: 92564 - RNA, 1755 nt, Artificial Sequence; identical to SEQ ID NO: 92555
  derived and/or modified CDS sequence (opt1) from hemagglutinin__InfluenzaB__EPI551249

SEQ ID NO: 92565 - RNA, 1755 nt, Artificial Sequence
  derived and/or modified CDS sequence (opt1) from hemagglutinin__InfluenzaB__EPI544259
augaaggccaucaucgugcugcucauggucgugaccagcaacgccgaccgcaucugcaccggcaucacguccagcaacagcccccacguggucaagaccgcgacccagggggaggugaacgugaccggcgucaucccgcugacgaccacccccaccaaguccuacuucgccaaccugaaggggacgcggacccgcggcaagcucugccccgacugccugaacugcaccgaccuggacguggcccucgggcggcccaugugcgugggcaccacgccguccgccaaggccagcauccugcacgagguccgccccgugaccuccggcugcuuccccaucaugcacgaccggaccaagauccgccagcugcccaaccuccugcggggguacgagaagauccgccugagcacccagaacgugaucgacgcggagaaggccccgggcgggcccuaccggcucggcacguccgggagcugccccaacgccaccuccaagaucggcuucuucgccaccauggcgugggccguccccaaggacaacuacaagaacgccaccaacccgcugacgguggaggugcccuacaucugcaccgagggcgaggaccagaucaccgucuggggguuccacagcgacaacaagaaccagaugaagucccuguacggcgacagcaacccccagaaguucaccuccagcgccaacggggugacgacccacuacgugucccagaucggcgacuuccccgaccagaccgaggacggcgggcucccgcagagcggccgcaucgucguggacuacaugaugcagaagcccgggaagaccggcacgaucguguaccagcgcgggguccugcugccccagaagguguggugcgccuccggccggagcaaggugaucaagggcagccucccccugaucggggaggcggacugccugcacgaggaguacggcgggcucaacaaguccaagccguacuacaccggcaagcacgccaaggccaucgggaacugccccaucugggucaagacgccccugaagcuggccaacggcaccaaguaccggcccccggccaagcuccugaaggagcgcggcuucuucggggcgaucgccggcuuccuggagggcgggugggaggggaugaucgccggcuggcacggcuacaccagccacggggcccacggcguggccgucgcggccgaccucaaguccacccaggaggccaucaacaagaucaccaagaaccugaacagccuguccgagcucgaggugaagaaccugcagcggcugagcggggccauggacgagcuccacaacgagauccuggagcuggacgagaagguggacgaccuccgcgccgacaccaucuccagccagaucgagcuggcgguccugcucuccaacgagggcaucaucaacagcgaggacgagcaccuccuggcccuggagcggaagcugaagaagaugcugggccccuccgccguggacaucgggaacggcugcuucgagacgaagcacaagugcaaccagaccugccucgaccgcaucgccgcggggaccuucaacgccggcgaguucagccugcccaccuucgacucccugaacaucaccgccgccagccucaacgacgacgggcuggacaaccacacgauccugcuguacuacuccaccgccgcgagcucccucgccgugacccugaugcuggccaucuucaucgucuacauggugagccgggacaacguguccugcagcaucugccucuga

SEQ ID NO: 92566 - RNA, 1755 nt, Artificial Sequence
  derived and/or modified CDS sequence (opt1) from hemagglutinin__InfluenzaB__EPI592699
augaaggccaucaucgugcugcucauggucgugaccagcaacgccgaccgcaucugcaccggcaucacguccagcaacagcccccacguggucaagaccgcgacccagggggaggugaacgugaccggcgucaucccgcugacgaccacccccaccaaguccuacuucgccaaccugaaggggacgcggacccgcggcaagcucugccccgacugccugaacugcaccgaccuggacguggcccucgggcggcccaugugcgugggcaccacgccguccgccaaggccagcauccugcacgagguccgccccgugaccuccggcugcuuccccaucaugcacgaccggaccaagauccgccagcugcccaaccuccugcggggguacgagaagauccgccugagcacccagaacgugaucgacgcggagaaggccccgggcgggcccuaccggcucggcacguccgggagcugccccaacgccaccuccaagaucggcuucuucgccaccauggcgugggccguccccaaggacaacuacaagaacgccaccaacccgcagacgguggaggugcccuacaucugcaccgagggcgaggaccagaucaccgucuggggguuccacagcgacaacaagauccagaugaagucccuguacggcgacagcaacccccagaaguucaccuccagcgccaacggggugacgacccacuacgugucccagaucggcgacuuccccgaccagaccgaggacggcgggcugccgcagagcggccgcaucgucguggacuacauggugcagaagcccgggaagaccggcacgaucgucuaccagcgcggggugcuccugccccagaagguguggugcgccuccggccggagcaaggucaucaagggcagccugccccucaucggggaggcggacugccugcacgaggaguacggcgggcugaacaaguccaagccguacuacaccggcaagcacgccaaggccaucgggaacugccccaucugggugaagacgccccucaagcuggccaacggcaccaaguaccggcccccggccaagcugcucaaggagcgcggcuucuucggggcgaucgccggcuuccuggagggcgggugggaggggaugaucgccggcuggcacggcuacaccagccacggggcccacggcgucgccguggcggccgaccugaaguccacccaggaggccaucaacaagaucaccaagaaccucaacagccuguccgagcuggaggugaagaaccuccagcggcugagcggggccauggacgagcugcacaacgagauccucgagcuggacgagaaggucgacgaccugcgcgccgacaccaucuccagccagaucgagcucgcggugcugcuguccaacgagggcaucaucaacagcgaggacgagcaccuccuggcccuggagcggaagcucaagaagaugcugggccccuccgccguggacaucgggaacggcugcuucgagacgaagcacaagugcaaccagaccugccuggaccgcaucgccgcggggaccuucaacgccggcgaguucagccuccccaccuucgacucccugaacaucaccgccgccagccugaacgacgacgggcucgacaaccacacgauccugcuguacuacuccaccgccgcgagcucccuggccgucacccucaugcuggccaucuucaucguguacauggugagccgggacaacgucuccugcagcaucugccuguga

SEQ ID NO: 92567 - RNA, 1755 nt, Artificial Sequence; identical to SEQ ID NO: 92476
  derived and/or modified CDS sequence (opt1) from hemagglutinin__InfluenzaB__EPI592707

SEQ ID NO: 92568 - RNA, 1755 nt, Artificial Sequence
  derived and/or modified CDS sequence (opt1) from hemagglutinin__InfluenzaB__EPI693094
augaaggccaucaucgugcugcucauggucgugaccagcaacgccgaccgcaucugcaccggcaucacguccagcaacagcccccacguggucaagaccgcgacccagggggaggugaacgugaccggcgucaucccgcugacgaccacccccaccaaguccuacuucgccaaccugaaggggacgcggacccgcggcaagcucugccccgacugccugaacugcaccgaccuggacguggcccucgggcggcccaugugcgugggcaccacgccguccgccaaggccagcauccugcacgagguccgccccgugaccuccggcugcuuccccaucaugcacgaccggaccaagauccgccagcugcccaaccuccugcggggguacgagaagauccgccugagcacccagaacgugaucgacgcggagaaggccccgggcgggcccuaccggcucggcacguccgagagcugccccaacgccaccuccaagaucggguucuucgccaccauggcgugggccguccccaaggacaacuacaagaacgccaccaacccgcagacgguggaggugcccuacaucugcaccgagggcgaggaccagaucaccgucuggggcuuccacagcgacaacaagauccagaugaagucccuguacggggacagcaacccccagaaguucaccuccagcgccaacggcgugacgacccacuacgugucccagaucggggacuuccccgaccagaccgaggacggcggccugccgcagagcgggcgcaucgucguggacuacauggugcagaagcccggcaagaccgggacgaucgucuaccagcggggcgugcuccugccccagaagguguggugcgccuccgggcgcagcaaggucaucaagggcagccugccccucaucggcgaggcggacugccugcacgaggaguacgggggccugaacaaguccaagccguacuacaccgggaagcacgccaaggccaucggcaacugccccaucugggugaagacgccccucaagcuggccaacgggaccaaguaccggcccccggccaagcugcucaaggagcgcggcuucuucggcgcgaucgccggguuccuggagggcgggugggagggcaugaucgccggguggcacggcuacaccagccacggcgcccacggggucgccguggcggccgaccugaaguccacccaggaggccaucaacaagaucaccaagaaccucaacagccuguccgagcuggaggugaagaaccuccagcggcugagcggcgccauggacgagcugcacaacgagauccucgagcuggacgagaaggucgacgaccugcgcgccgacaccaucuccagccagaucgagcucgcggugcugcuguccaacgaggggaucaucaacagcgaggacgagcaccuccuggcccuggagcggaagcucaagaagaugcugggccccuccgccguggacaucggcaacgggugcuucgagacgaagcacaagugcaaccagaccugccuggaccgcaucgccgcgggcaccuucaacgccggggaguucagccuccccaccuucgacucccugaacaucaccgccgccagccugaacgacgacggccucgacaaccacacgauccugcuguacuacuccaccgccgcgagcucccuggccgucacccucaugcuggccaucuucaucguguacauggugagccgggacaacgucuccugcagcaucugccuguga

SEQ ID NO: 92569 - RNA, 1758 nt, Artificial Sequence; identical to SEQ ID NO: 92499
  derived and/or modified CDS sequence (opt1) from hemagglutinin__InfluenzaB__EPI678796

SEQ ID NO: 92570 - RNA, 1758 nt, Artificial Sequence
  derived and/or modified CDS sequence (opt1) from hemagglutinin__InfluenzaB__EPI721064
augaaggccaucaucgugcugcucauggucgugaccagcaacgccgaccgcaucugcaccggcaucacguccagcaacagcccccacguggucaagaccgcgacccagggggaggugaacgugaccggcgucaucccgcugacgaccacccccaccaagagccacuucgccaaccugaaggggacggagacccggggcaagcucugccccaagugccugaacugcaccgaccuggacguggcccucgggcgccccaagugcaccggcaagaucccguccgcccgggugagcauccugcacgagguccgccccgugacguccggcugcuuccccaucaugcacgaccggaccaagauccgccagcugcccaaccuccugcggggguacgagcacgugcgccugagcacccacaacgucaucaacgccgaggacgcgccgggcgggcccuacaagaucggcaccucccggagcugccccaacaucacgaacgggaacggcuucuucgccaccauggccugggccgugcccaagaacgacaagaacaagaccgcgaccaacccgcucacgaucgaggugcccuacaucugcaccgagggcgaggaccagaucaccgucuggggguuccacuccgacaacgagacccagauggccaagcuguacggcgacagcaagccccagaaguucacguccagcgccaacggggugaccacccacuacgugucccagaucggcggcuuccccaaccagaccgaggacgggggccugccgcagagcgggcgcaucgucguggacuacauggugcagaaguccggcaagacggggaccaucaccuaccagcggggcauccuccugccccagaaggucuggugcgccagcggccgcuccaaggugaucaaggggagccugccccucaucggcgaggccgacugccugcacgagaaguacgggggccugaacaagagcaagcccuacuacaccggggagcacgcgaaggccaucggcaacugcccgaucugggugaagacgccccucaagcuggccaacggcaccaaguaccggccgcccgccaagcugcucaaggagcgcggguucuucggcgccaucgcgggguuccuggagggcgggugggagggcaugaucgccggcuggcacggguacaccucccacggcgcccacggggucgccguggccgcggaccugaaguccacccaggaggccaucaacaagaucacgaagaaccucaacucccugagcgagcuggaggucaagaaccuccagcggcuguccggcgccauggacgagcugcacaacgagauccucgagcuggacgagaagguggacgaccugcgcgccgacaccaucagcucccagaucgagcucgccgugcugcugagcaacgagggcaucaucaacuccgaggacgagcaccuccuggcgcuggagcggaagcucaagaagaugcuggggcccagcgccgucgagaucggcaacgggugcuucgagaccaagcacaagugcaaccagaccugccuggaccgcaucgccgccggcaccuucgacgcgggggaguucucccuccccacguucgacagccugaacaucaccgccgccucccugaacgacgacggccucgacaaccacaccauccugcuguacuacagcaccgccgccuccagccuggcggugacgcucaugaucgccaucuucguggucuacauggugucccgggacaacgugagcugcuccaucugccuguga

SEQ ID NO: 92571 - RNA, 1758 nt, Artificial Sequence; identical to SEQ ID NO: 90780
  derived and/or modified CDS sequence (opt1) from hemagglutinin__InfluenzaB__EPI328904

SEQ ID NO: 92572 - RNA, 1755 nt, Artificial Sequence
  derived and/or modified CDS sequence (opt1) from hemagglutinin__InfluenzaB__EPI543191
augaaggccaucaucgugcugcucauggucgugaccagcaacgccgaccgcaucugcaccggcaucacguccagcaacagcccccacguggucaagaccgcgacccagggggaggugaacgugaccggcgucaucccgcugacgaccacccccaccaaguccuacuucgccaaccugaaggggacgcggacccgcggcaagcucugccccgacugccugaacugcaccgaccuggacguggcccucgggcggcccaugugcgugggcaccacgccguccgccaaggccagcauccugcacgagguccgccccgugaccuccggcugcuuccccaucaugcacgaccggaccaagauccgccagcugcccaaccuccugcggggguacgagaagauccgccugagcacccagaacgugaucgacgcggagaaggccccgggcgggcccuaccggcucggcacguccgggagcugccccaacgccaccuccaagaucggcuucuucgccaccauggcgugggccguccccaaggacaacuacaagaacgccaccaacccgcugacgguggaggugcccuacaucugcaccgagggcgaggaccagaucaccgucuggggguuccacagcgacaagaagacccagaugaagucccuguacggcgacagcaacccccagaaguucacguccagcgccaacggggugaccacccacuacgugucccagaucggcgacuuccccgaccagaccgaggacggcgggcucccgcagagcggccgcaucgucguggacuacaugaugcagaagcccgggaagacgggcaccaucguguaccagcgcgggguccugcugccccagaagguguggugcgccuccggccggagcaaggugaucaagggcagccucccccugaucggggaggcggacugccugcacgaggaguacggcgggcucaacaaguccaagccguacuacaccggcaagcacgccaaggccaucgggaacugccccaucugggucaagacgccccugaagcuggccaacggcaccaaguaccggcccccggccaagcuccugaaggagcgcggcuucuucggggcgaucgccggcuuccuggagggcgggugggaggggaugaucgccggcuggcacggcuacaccagccacggggcccacggcguggccgucgcggccgaccucaaguccacccaggaggccaucaacaagaucaccaagaaccugaacagccuguccgagcucgaggugaagaaccugcagcggcugagcggggccauggacgagcuccacaacgagauccuggagcuggacgagaagguggacgaccuccgcgccgacacgaucuccagccagaucgagcuggcgguccugcucuccaacgagggcaucaucaacagcgaggacgagcaccuccuggcccuggagcggaagcugaagaagaugcugggccccuccgccguggacaucgggaacggcugcuucgagaccaagcacaagugcaaccagaccugccucgaccgcaucgccgcggggaccuucaacgccggcgaguucagccugcccaccuucgacucccugaacaucacggccgccagccucaacgacgacgggcuggacaaccacaccauccugcuguacuacuccaccgccgcgagcucccucgccgugacccugaugcuggccaucuucaucgucuacauggugagccgggacaacguguccugcagcaucugccucuga

SEQ ID NO: 92573 - RNA, 1755 nt, Artificial Sequence; identical to SEQ ID NO: 92153
  derived and/or modified CDS sequence (opt1) from hemagglutinin__InfluenzaB__EPI500359

SEQ ID NO: 92574 - RNA, 1755 nt, Artificial Sequence
  derived and/or modified CDS sequence (opt1) from hemagglutinin__InfluenzaB__EPI543185
augaaggccaucaucgugcugcucauggucgugaccagcaacgccgaccgcaucugcaccggcaucacguccagcaacagcccccacguggucaagaccgcgacccagggggaggugaacgugaccggcgucaucccgcugacgaccacccccaccaaguccuacuucgccaaccugaaggggacgcggacccgcggcaagcucugccccgacugccugaacugcaccgaccuggacguggcccucgggcggcccaugugcgugggcaccacgccguccgccaaggccagcauccugcacgagguccgccccgugaccuccggcugcuuccccaucaugcacgaccggaccaagauccgccagcugcccaaccuccugcggggguacgagaagauccgccugagcacccagaacgugaucgacgcggagaaggccccgggcgggcccuaccggcucggcacguccgggagcugccccaacgccaccuccaagaucggcuucuucgccaccauggcgugggccguccccaaggacaacuacaagaacgccaccaacccgcagacgguggaggugcccuacaucugcaccgagggcgaggaccagaucaccgucuggggguuccacagcgacaacaagaaccagaugaagucccuguacggcgacagcaacccccagaaguucaccuccagcgccaacggggugacgacccacuacgugucccagaucggcgacuuccccgaccagaccgaggacggcgggcugccgcagagcggccgcaucgucguggacuacaugaugcagaagcccgggaagaccggcacgaucguguaccagcgcgggguccuccugccccagaagguguggugcgccuccggccggagcaaggugaucaagggcagccugccccucaucggggaggcggacugccugcacgaggaguacggcgggcugaacaaguccaagccguacuacaccggcaagcacgccaaggccaucgggaacugccccaucugggucaagacgccccucaagcuggccaacggcaccaaguaccggcccccggccaagcugcucaaggagcgcggcuucuucggggcgaucgccggcuuccuggagggcgggugggaggggaugaucgccggcuggcacggcuacaccagccacggggcccacggcguggccgucgcggccgaccugaaguccacccaggaggccaucaacaagaucaccaagaaccucaacagccuguccgagcuggaggugaagaaccuccagcggcugagcggggccauggacgagcugcacaacgagauccucgagcuggacgagaagguggacgaccugcgcgccgacaccaucuccagccagaucgagcucgcgguccugcuguccaacgagggcaucaucaacagcgaggacgagcaccuccuggcccuggagcggaagcucaagaagaugcugggccccuccgccguggacaucgggaacggcugcuucgagacgaagcacaagugcaaccagaccugccuggaccgcaucgccgcggggaccuucaacgccggcgaguucagccuccccaccuucgacucccugaacaucaccgccgccagccugaacgacgacgggcucgacaaccacacgauccugcuguacuacuccaccgccgcgagcucccuggccgugacccucaugcuggccaucuucaucgucuacauggugagccgggacaacguguccugcagcaucugccuguga

SEQ ID NO: 92575 - RNA, 1755 nt, Artificial Sequence; identical to SEQ ID NO: 92313
  derived and/or modified CDS sequence (opt1) from hemagglutinin__InfluenzaB__EPI536447

SEQ ID NO: 92576 - RNA, 1755 nt, Artificial Sequence; identical to SEQ ID NO: 90782
  derived and/or modified CDS sequence (opt1) from hemagglutinin__InfluenzaB__NP_056660

SEQ ID NO: 92577 - RNA, 1755 nt, Artificial Sequence
  derived and/or modified CDS sequence (opt1) from hemagglutinin__InfluenzaB__ABG85167
augaaggccaucaucgugcugcucauggucgugaccagcaacgccgaccgcaucugcaccggcaucacguccagcaacagcccccacguggucaagaccgcgacccagggggaggugaacgugaccggcgucaucccgcugacgaccacccccacccggucccacuucgccaaccugaaggggacgcagacccgcggcaagcucugccccaacugcuucaacugcaccgaccuggacguggcccuggggcggcccaagugcaugggcaacaucccguccgccaaggugagcauccuccacgaggucaagcccgugaccuccggcugcuuccccaucaugcacgaccgcacgaagauccggcagcugcccaaccugcuccgcggguacgagaacauccggcugagcaccuccaacgugaucaacgccgagaccgcgccgggcgggcccuacaaggucggcaccagcggguccugccccaacguggccaaccgcaacggcuucuucaacacgauggccugggugauccccaaggacaacaacaagaccgccaucaacccggucaccguggaggugcccuacaucugcagcgagggcgaggaccagaucaccgucuggggguuccacuccgacgacaagacgcagauggagcggcuguacggcgacagcaacccccagaaguucaccuccagcgcgaacggggugaccacccacuacgugucccagaucggcggcuuccccaaccagacggaggacgaggggcucaagcagagcggccgcaucgucguggacuacauggugcagaagccggggaagaccggcaccaucgucuaccagcgggggauccugcugccccagaagguguggugcgccuccggccgcagcaaggucaucaagggcagccucccccugaucggggaggccgacugccugcacgagaaguacggcgggcucaacaaguccaagcccuacuacaccggcgagcacgccaaggccaucgggaacugcccgaucugggugaagacgccccugaagcuggcgaacggcaccaaguaccggccgcccgccaagcuccugaaggagcgcggcuucuucggggccaucgccggcuuccuggagggcgggugggaggggaugaucgccggcuggcacggcuacaccagccacggggcgcacggcguggccgucgccgccgaccucaaguccacccaggaggccaucaacaagaucacgaagaaccugaacagccuguccgagcucgaggugaagaaccugcagcggcugagcggggcgaugaacggccuccacgacgagauccuggagcuggacgagaagguggacgaccuccgcgccgacaccaucuccagccagaucgagcuggccguccugcucuccaacgagggcaucaucaacagcgaggacgagcaccuccuggcccuggagcggaagcugaagaagaugcuggggcccuccgccguggagaucggcaacgggugcuucgagaccaagcacaagugcaaccagaccugccucgaccgcaucgcggccggcacguucaacgccggggacuucagccugcccaccuucgacucccugaacaucaccgccgcgagccucaacgacgacgaccuggacaaccacaccauccugcucuacuacuccaccgccgccagcucccuggccgugacgcugaugaucgccaucuucaucgucuacauggugagccgggacaacguguccugcagcaucugccuguga

SEQ ID NO: 92578 - RNA, 1755 nt, Artificial Sequence
  derived and/or modified CDS sequence (opt1) from hemagglutinin__InfluenzaB__EPI376346
augaaggccaucaucgugcugcucauggucgugaccagcaacgccgaccgcaucugcaccggcaucacguccagcaacagcccccacguggucaagaccgcgacccagggggaggugaacgugaccggcgucaucccgcugacgaccacccccaccaaguccuacuucgccaaccugaaggggacgaagacccggggcaagcucugccccgacugccugaacugcaccgaccuggacguggcccucgggcgccccaugugcgugggcaccacgccguccgccaaggccagcauccugcacgagguccggcccgugaccuccggcugcuuccccaucaugcacgaccgcaccaagauccggcagcuggcgaaccuccugcgcggguacgagaacauccggcugagcacccagaacgugaucgacgccgagaaggcccccggcgggccguaccgccucggcacguccgggagcugccccaacgccaccuccaagagcggcuucuucgcgaccauggccugggccguccccaaggacaacaacaagaacgccaccaacccccugacgguggaggugccguacaucugcgccgagggcgaggaccagaucaccgucuggggguuccacuccgacgacaagacccagaugaagaaccuguacggcgacagcaacccccagaaguucaccuccagcgcgaacggggugacgacccacuacgugucccagaucggcggcuuccccgaccagaccgaggacgggggccucccccagagcgggcggaucgucguggacuacaugaugcagaagccgggcaagaccgggacgaucguguaccagcgcggcguccugcugccccagaagguguggugcgccuccggccggagcaaggugaucaaggggagccucccccugaucggcgaggccgacugccugcacgagaaguacgggggccucaacaaguccaagcccuacuacaccggggagcacgccaaggccaucggcaacugcccgaucugggucaagacgccccugaagcuggcgaacggcaccaaguaccgcccgcccgccaagcuccugaaggagcggggguucuucggcgccaucgccggguuccuggagggcgggugggagggcaugaucgccggcuggcacggguacaccagccacggcgcgcacgggguggccgucgccgccgaccucaaguccacccaggaggccaucaacaagaucaccaagaaccugaacagccuguccgagcucgaggugaagaaccugcagcgccugagcggcgcgauggacgagcuccacaacgagauccuggagcuggacgagaagguggacgaccuccgggccgacaccaucuccagccagaucgagcuggccguccugcucuccaacgagggcaucaucaacagcgaggacgagcaccuccuggcccuggagcgcaagcugaagaagaugcuggggcccuccgcgguggacaucggcaacgggugcuucgagacgaagcacaagugcaaccagaccugccucgaccggaucgccgccggcaccuucaacgccggggaguucagccugcccaccuucgacucccugaacaucaccgccgcgagccucaacgacgacggccuggacaaccacacgauccugcuguacuacuccaccgccgccagcucccucgccgugacccugaugcuggccaucuucaucgucuacauggugagccgcgacaacguguccugcagcaucugccucuga

SEQ ID NO: 92579 - RNA, 1755 nt, Artificial Sequence; identical to SEQ ID NO: 90878
  derived and/or modified CDS sequence (opt1) from hemagglutinin__InfluenzaB__EPI368425

SEQ ID NO: 92580 - RNA, 1755 nt, Artificial Sequence; identical to SEQ ID NO: 90844
  derived and/or modified CDS sequence (opt1) from hemagglutinin__InfluenzaB__ACH53430

SEQ ID NO: 92581 - RNA, 1758 nt, Artificial Sequence; identical to SEQ ID NO: 90669
  derived and/or modified CDS sequence (opt1) from hemagglutinin__InfluenzaB__EPI331151

SEQ ID NO: 92582 - RNA, 1758 nt, Artificial Sequence
  derived and/or modified CDS sequence (opt1) from hemagglutinin__InfluenzaB__EPI356777
augaaggccaucaucgugcugcucauggucgugaccagcaacgccgaccgcaucugcaccggcaucacguccagcaacagcccccacguggucaagaccgcgacccagggggaggugaacgugaccggcgucaucccgcugacgaccacccccaccaagagccacuucgccaaccugaaggggacggagacccggggcaagcucugccccaagugccugaacugcaccgaccuggacguggcccucgggcgccccaagugcaccggcaagaucccguccgcccgggugagcauccugcacgagguccgccccgugacguccggcugcuuccccaucaugcacgaccggaccaagauccgccagcugcccaaccuccugcggggguacgagcacauccgccugagcacccacaacgugaucaacgccgagaacgcgccgggcgggcccuacaagaucggcaccuccgggagcugccccaacgucacgaacggcaacggcuucuucgccaccauggccugggccgugcccaagaacgacaagaacaagaccgcgaccaacccgcucacgaucgaggugcccuacaucugcaccgagggggaggaccagaucaccgucuggggcuuccacuccgacgacgagacccagauggccaagcuguacggggacagcaagccccagaaguucacguccagcgccaacggcgugaccacccacuacgugucccagaucggcggguuccccaaccagaccgaggacggcgggcugccgcagagcggccggaucgucguggacuacauggugcagaaguccgggaagacgggcaccaucaccuaccagcgcggcauccuccugccccagaaggucuggugcgccagcgggcgguccaaggugaucaagggcagccugccccucaucggggaggccgacugccugcacgagaaguacggcgggcugaacaagagcaagcccuacuacaccggcgagcacgcgaaggccaucggcaacugcccgaucugggugaagacgccccucaagcuggccaacgggaccaaguaccgcccgcccgccaagcugcucaaggagcggggcuucuucggggccaucgcgggcuuccuggagggcgggugggagggcaugaucgccggguggcacggcuacaccucccacggggcccacggcgucgccguggccgcggaccugaaguccacccaggaggccaucaacaagaucacgaagaaccucaacucccugagcgagcuggaggucaagaaccuccagcgccuguccggcgccauggacgagcugcacaacgagauccucgagcuggacgagaagguggacgaccugcgggccgacaccaucagcucccagaucgagcucgccgugcugcugagcaacgaggggaucaucaacuccgaggacgagcaccuccuggcgcuggagcgcaagcucaagaagaugcugggccccagcgccgucgagaucgggaacggcugcuucgagaccaagcacaagugcaaccagaccugccuggaccggaucgccgccgggaccuucgacgcgggcgaguucucccuccccacguucgacagccugaacaucaccgccgccucccugaacgacgacggccucgacaaccacaccauccugcuguacuacagcaccgccgccuccagccuggcggugacgcucaugaucgccaucuucguggucuacauggugucccgcgacaacgugagcugcuccaucugccuguga

SEQ ID NO: 92583 - RNA, 1752 nt, Artificial Sequence; identical to SEQ ID NO: 90451
  derived and/or modified CDS sequence (opt1) from hemagglutinin__InfluenzaB__CY018349

SEQ ID NO: 92584 - RNA, 1752 nt, Artificial Sequence
  derived and/or modified CDS sequence (opt1) from hemagglutinin__InfluenzaB__AY581945
augaaggccaucaucgugcugcucauggucgugaccagcaacgccgaccgcaucugcaccggcaucacguccagcaacuccccgcacguggucaagaccgcgacccagggggaggugaacgugaccggcgucaucccgcugacgaccacccccaccaagagccacuucgccaaccugaaggggacgaagacccggggcaagcucugccccaacugccugaacugcaccgaccuggacguggcccucgcccgccccaugugcguggggaccacgccguccgccaaggcgagcauccugcacgagguccggcccgugaccuccggcugcuuccccaucaugcacgaccgcaccaagauccggcagcugcccaaccuccugcgcggcuacgagaacauccggcugagcacccagaacgugaucaacgccgagcgcgcccccgggggccccuaccggcucgggacguccggcagcugccccaacgucaccucccgcgacggguucuucgccaccauggcgugggccgugccccgggacaacaagaccgccacgaacccgcugaccguggagguccccuacaucugcaccaagggcgaggaccagaucaccguguggggcuuccacagcgacaacaagacgcagaugaagaaccuguacggggacuccaacccccagaaguucaccagcuccgccaacggcgugaccacccacuacgucagccagaucgggggcuuccccaaccagacggaggacggcgggcucccgcaguccggccgcaucgugguggacuacaugguccagaagcccgggaagaccggcaccaucguguaccagcgcggggugcugcugccccagaaggucuggugcgccagcggccgguccaaggugaucaagggcagccucccccugaucggggaggcggacugccugcacgagaaguacggcgggcucaacaagagcaagccguacuacaccggcgagcacgccaaggccaucgggaacugccccaucugggucaagacgccccugaagcuggccaacggcaccaaguaccggcccccggccaagcuccugaaggagcgcggcuucuucggggcgaucgccggcuuccuggagggcgggugggaggggaugaucgccggcuggcacggcuacaccucccacggggcccacggcguggccguggcggccgaccucaagagcacccaggaggccaucaacaagaucacgaagaaccugaacucccugagcgagcucgaggucaagaaccugcagcggcuguccggggccauggacgagcuccacaacgagauccuggagcuggacgagaagguggacgaccuccgcgccgacaccaucagcucccagaucgagcuggcggugcugcucagcaacgagggcaucaucaacuccgaggacgagcaccuccuggcccuggagcggaagcugaagaagaugcugggccccagcgccgucgacaucgggaacggcugcuucgagaccaagcacaagugcaaccagaccugccucgaccgcaucgccgcggggaccuucaacgccggcgaguucucccugcccacguucgacagccugaacaucaccgccgccucccucaacgacgacgggcuggacaaccacaccauccugcuguacuacagcaccgccgcguccagccucgccgugacgcugaugaucgccaucuucaucguguacauggucucccgggacaacgugagcugcuccaucugccuguga

SEQ ID NO: 92585 - RNA, 1755 nt, Artificial Sequence; identical to SEQ ID NO: 92332
  derived and/or modified CDS sequence (opt1) from hemagglutinin__InfluenzaB__EPI541351

SEQ ID NO: 92586 - RNA, 1755 nt, Artificial Sequence
  derived and/or modified CDS sequence (opt1) from hemagglutinin__InfluenzaB__EPI541760
augaaggccgugaucguccugcucaugguggugaccagcaacgccgaccgcaucugcaccggcaucacguccagcaacagcccccacgucgugaagaccgcgacccagggggaggugaacgucaccggcgugaucccgcugacgaccacccccaccaaguccuacuucgccaaccugaaggggacgcggacccgcggcaagcucugccccgacugccugaacugcaccgaccuggacguggcccucgggcggcccaugugcgucggcaccacgccguccgccaaggccagcauccugcacgaggugcgccccgugaccuccggcugcuuccccaucaugcacgaccggaccaagauccgccagcugcccaaccuccugcggggguacgagaagauccgccugagcacccagaacgucaucgacgcggagaaggccccgggcgggcccuaccggcucggcacguccgggagcugccccaacgccaccuccaagaucggcuucuucgccaccauggcgugggccgugcccaaggacaacuacaagaacgccaccaacccgcugacgguggagguccccuacaucugcaccgagggcgaggaccagaucaccguguggggguuccacagcgacaacaagacccagaugaagucccuguacggcgacagcaacccccagaaguucacguccagcgccaacggggugaccacccacuacgucucccagaucggcgacuuccccgaccagaccgaggacggcgggcucccgcagagcggccgcaucgugguggacuacaugaugcagaagcccgggaagacgggcaccaucgucuaccagcgcggggugcugcugccccagaagguguggugcgccuccggccggagcaaggucaucaagggcagccucccccugaucggggaggcggacugccugcacgaggaguacggcgggcucaacaaguccaagccguacuacaccggcaagcacgccaaggccaucgggaacugccccaucugggugaagacgccccugaagcuggccaacggcaccaaguaccggcccccggccaagcuccugaaggagcgcggcuucuucggggcgaucgccggcuuccuggagggcgggugggaggggaugaucgccggcuggcacggcuacaccagccacggggcccacggcgucgccguggcggccgaccucaaguccacccaggaggccaucaacaagaucaccaagaaccugaacagccuguccgagcucgaggugaagaaccugcagcggcugagcggggccauggacgagcuccacaacgagauccuggagcuggacgagaaggucgacgaccuccgcgccgacacgaucuccagccagaucgagcuggcggugcugcucuccaacgagggcaucaucaacagcgaggacgagcaccuccuggcccuggagcggaagcugaagaagaugcugggccccuccgccguggacaucgggaacggcugcuucgagaccaagcacaagugcaaccagaccugccucgaccgcaucgccgcggggaccuucaacgccggcgaguucagccugcccaccuucgacucccugaacaucacggccgccagccucaacgacgacgggcuggacaaccacaccauccugcuguacuacuccaccgccgcgagcucccucgccgucacccugaugcuggccaucuucaucguguacauggugagccgggacaacgucuccugcagcaucugccucuga

SEQ ID NO: 92587 - RNA, 1758 nt, Artificial Sequence; identical to SEQ ID NO: 90911
  derived and/or modified CDS sequence (opt1) from hemagglutinin__InfluenzaB__EPI477397

SEQ ID NO: 92588 - RNA, 1758 nt, Artificial Sequence
  derived and/or modified CDS sequence (opt1) from hemagglutinin__InfluenzaB__EPI492571
augaaggccaucaucgugcugcucauggucgugaccagcaacgccgaccgcaucugcaccggcaucacguccagcaacagcccccacguggucaagaccgcgacccagggggaggugaacgugaccggcgucaucccgcugacgaccacccccaccaagagccacuucgccaaccugaaggggacggagacccggggcaagcucugccccaagugccugaacugcaccgaccuggacguggcccucgggcgccccaagugcaccggcaagaucccguccgcccgggugagcauccugcacgagguccgccccgugacguccggcugcuuccccaucaugcacgaccggaccaagauccgccagcugcccaaccuccugcggggguacgagcacauccgccugagcacccacaacgugaucaacgccgaggacgcgccgggcgggcccuacaagaucggcaccuccgggagcugccccaacgucacgaacggcaacggcuucuucgccaccauggccugggccgugcccaagaacgacaagaacaagaccgcgaccaacccgcucacgaucgaggugcccuacaucugcaccgagggggaggaccagaucaccgucuggggcuuccacuccgacaucgagacccagauggccaagcuguacggggacagcaagccccagaaguucacguccagcgccaacggcgugaccacccacuacgugucccagaucggcggguuccccaaccagaccgaggacggcgggcugccgcagagcggccggaucgucguggacuacauggugcagaaguccgggaagacgggcaccaucaccuaccagcgcggcauccuccugccccagaaggucuggugcgccagcgggcgguccaaggugaucaagggcagccugccccucaucggggaggccgacugccugcacgagaaguacggcgggcugaacaagagcaagcccuacuacaccggcgagcacgcgaaggccaucggcaacugcccgaucugggugaagacgccccucaagcuggccaacgggaccaaguaccgcccgcccgccaagcugcucaaggagcggggcuucuucggggccaucgcgggcuuccuggagggcgggugggagggcaugaucgccggguggcacggcuacaccucccacggggcccacggcgucgccguggccgcggaccugaaguccacccaggaggccaucaacaagaucacgaagaaccucaacucccugagcgagcuggaggucaagaaccuccagcgccuguccggcgccauggacgagcugcacaacgagauccucgagcuggacgagaagguggacgaccugcgggccgacaccaucagcucccagaucgagcucgccgugcugcugagcaacgaggggaucaucaacuccgaggacgagcaccuccuggcgcuggagcgcaagcucaagaagaugcugggccccagcgccgucgagaucgggaacggcugcuucgagaccaagcacaagugcaaccagaccugccuggaccggaucgccgccgggaccuucgacgcgggcgaguucucccuccccacguucgacagccugaacaucaccgccgccucccugaacgacgacggccucgacaaccacaccauccugcuguacuacagcaccgccgccuccagccuggcggugacgcucaugaucgccaucuucguggucuacauggugucccgcgacaacgugagcugcuccaucugccuguga

SEQ ID NO: 92589 - RNA, 1758 nt, Artificial Sequence
  derived and/or modified CDS sequence (opt1) from hemagglutinin__InfluenzaB__EPI498340
augaaggccaucaucgugcugcucauggucgugaccagcaacgccgaccgcaucugcaccggcaucacguccagcaacagcccccacguggucaagaccgcgacccagggggaggugaacgugaccggcgucaucccgcugacgaccacccccaccaagagccacuucgccaaccugaaggggacggagacccggggcaagcucugccccaagugccugaacugcaccgaccuggacguggcccucgggcgccccaagugcaccggcaagaucccguccgcccgggugagcauccugcacgagguccgccccgugacguccggcugcuuccccaucaugcacgaccggaccaagauccgccagcugcccaaccuccugcggggguacgagcacauccgccugagcacccacaacgugaucaacaccgaggacgccccgggcgggcccuacaagaucggcacguccgggagcugccccaacgucaccaacggcaacggcuucuucgcgaccauggccugggccgugcccaagaacgacaagaacaagaccgccacgaacccgcucaccaucgaggugcccuacaucugcaccgagggggaggaccagaucaccgucuggggcuuccacuccgacaucgagacgcagauggcgaagcuguacggggacagcaagccccagaaguucaccuccagcgccaacggcgugaccacccacuacgugucccagaucggcggguuccccaaccagacggaggacggcgggcugccgcagagcggccggaucgucguggacuacauggugcagaaguccgggaagaccggcaccaucaccuaccagcgcggcauccuccugccccagaaggucuggugcgccagcgggcgguccaaggugaucaagggcagccugccccucaucggggaggccgacugccugcacgagaaguacggcgggcugaacaagagcaagcccuacuacacgggcgagcacgccaaggcgaucggcaacugcccgaucugggugaagacgccccucaagcuggccaacgggaccaaguaccgcccgcccgccaagcugcucaaggagcggggcuucuucggggccaucgccggcuuccuggagggcgggugggagggcaugaucgcgggguggcacggcuacaccucccacggggcccacggcgucgccguggccgccgaccugaaguccacccaggaggcgaucaacaagaucaccaagaaccucaacucccugagcgagcuggaggucaagaaccuccagcgccuguccggcgccauggacgagcugcacaacgagauccucgagcuggacgagaagguggacgaccugcgggccgacaccaucagcucccagaucgagcucgccgugcugcugagcaacgaggggaucaucaacuccgaggacgagcaccuccuggcccuggagcgcaagcucaagaagaugcugggccccagcgcggucgagaucgggaacggcugcuucgagaccaagcacaagugcaaccagaccugccuggaccggaucgccgccgggacguucgacgccggcgaguucucccuccccaccuucgacagccugaacaucaccgcggccucccugaacgacgacggccucgacaaccacaccauccugcuguacuacagcacggccgccuccagccuggccgugacccucaugaucgcgaucuucguggucuacauggugucccgcgacaacgugagcugcuccaucugccuguga

SEQ ID NO: 92590 - RNA, 1758 nt, Artificial Sequence
  derived and/or modified CDS sequence (opt1) from hemagglutinin__InfluenzaB__EPI516490
augaaggccaucaucgugcugcucauggucgugaccagcaacgccgaccgcaucugcaccggcaucacguccagcaacagcccccacguggucaagaccgcgacccagggggaggugaacgugaccggcgucaucccgcugacgaccacccccaccaagagccacuucgccaaccugaaggggacggagacccggggcaagcucugccccaagugccugaacugcaccgaccuggacguggcccucgggcgccccaagugcaccggcaagaucccguccgcccgggugagcauccugcacgagguccgccccgugacguccggcugcuuccccaucaugcacgaccggaccaagauccgccagcugcccaaccuccugcggggguacgagcacauccgccugagcacccacaacgugaucaacgccgaggacgcgccgggcgggcccuacaagaucggcaccuccgggagcugccccaacgucacgaacggcaacggcuucuucgccaccauggccugggccgugcccaagaacgacaagaacaagaccgcgaccaacccgcucacgaucgaggugcccuacaucugcaccgagggggaggaccagaucaccgucuggggcuuccacuccgacaacgagauccagauggccaagcuguacggggacagcaagccccagaaguucaccuccagcgccaacggcgugacgacccacuacgugucccagaucggcggguuccccaaccagaccgaggacggcgggcugccgcagagcggccggaucgucguggacuacauggugcagaaguccgggaagaccggcacgaucaccuaccagcgcggcauccuccugccccagaaggucuggugcgccagcgggcgguccaaggugaucaagggcagccugccccucaucggggaggccgacugccugcacgagaaguacggcgggcugaacaagagcaagcccuacuacaccggcgagcacgcgaaggccaucggcaacugcccgaucugggugaagacgccccucaagcuggccaacgggaccaaguaccgcccgcccgccaagcugcucaaggagcggggcuucuucggggccaucgcgggcuuccuggagggcgggugggagggcaugaucgccggguggcacggcuacaccucccacggggcccacggcgucgccguggccgcggaccugaaguccacccaggaggccaucaacaagaucaccaagaaccucaacucccugagcgagcuggaggucaagaaccuccagcgccuguccggcgccauggacgagcugcacaacgagauccucgagcuggacgagaagguggacgaccugcgggccgacacgaucagcucccagaucgagcucgccgugcugcugagcaacgaggggaucaucaacuccgaggacgagcaccuccuggcgcuggagcgcaagcucaagaagaugcugggccccagcgccgucgagaucgggaacggcugcuucgagaccaagcacaagugcaaccagaccugccuggaccggaucgccgccgggaccuucgacgcgggcgaguucucccuccccaccuucgacagccugaacaucacggccgccucccugaacgacgacggccucgacaaccacaccauccugcuguacuacagcaccgccgccuccagccuggcggugacccucaugaucgccaucuucguggucuacauggugucccgcgacaacgugagcugcuccaucugccuguga

SEQ ID NO: 92591 - RNA, 1755 nt, Artificial Sequence; identical to SEQ ID NO: 92153
  derived and/or modified CDS sequence (opt1) from hemagglutinin__InfluenzaB__EPI538119

SEQ ID NO: 92592 - RNA, 1755 nt, Artificial Sequence; identical to SEQ ID NO: 92572
  derived and/or modified CDS sequence (opt1) from hemagglutinin__InfluenzaB__EPI538125

SEQ ID NO: 92593 - RNA, 1755 nt, Artificial Sequence
  derived and/or modified CDS sequence (opt1) from hemagglutinin__InfluenzaB__EPI556422
augaaggccaucaucgugcugcucauggucgugaccagcaacgccgaccgcaucugcaccggcaucacguccagcaacagcccccacguggucaagaccgcgacccagggggaggugaacgugaccggcgucaucccgcugacgaccacccccaccaaguccuacuucgccaaccugaaggggacgcggacccgcggcaagcucugccccgacugccugaacugcaccgaccuggacguggcccucgggcggcccaugugcgugggcaccacgccguccgccaaggccagcauccugcacgagguccgccccgugaccuccggcugcuuccccaucaugcacgaccggaccaagauccgccagcugcccaaccuccugcggggguacgagaagauccgccugagcacccagaacgugaucgacgcggagaaggccccgggcgggcccuaccggcucggcacguccgggagcugccccaacgccaccuccaagaucggcuucuucgccaccauggcgugggccguccccaaggacaacuacaagaacgccaccaacccgcugacgguggaggugcccuacaucugcaccgagggcgaggaccagaucaccgucuggggguuccacagcgacaucaagacccagaugaagucccuguacggcgacagcaacccccagaaguucacguccagcgccaacggggugaccacccacuacgugucccagaucggcgacuuccccgaccagaccgaggacggcgggcucccgcagagcggccgcaucgucguggacuacaugaugcagaagcccgggaagacgggcaccaucguguaccagcgcgggguccugcugccccagaagguguggugcgccuccggccggagcaaggugaucaagggcagccucccccugaucggggaggcggacugccugcacgaggaguacggcgggcucaacaaguccaagccguacuacaccggcaagcacgccaaggccaucgggaacugccccaucugggucaagacgccccugaagcuggccaacggcaccaaguaccggcccccggccaagcuccugaaggagcgcggcuucuucggggcgaucgccggcuuccuggagggcgggugggaggggaugaucgccggcuggcacggcuacaccagccacggggcccacggcguggccgucgcggccgaccucaaguccacccaggaggccaucaacaagaucaccaagaaccugaacagccuguccgagcucgaggugaagaaccugcagcggcugagcggggccauggacgagcuccacaacgagauccuggagcuggacgagaagguggacgaccuccgcgccgacacgaucuccagccagaucgagcuggcgguccugcucuccaacgagggcaucaucaacagcgaggacgagcaccuccuggcccuggagcggaagcugaagaagaugcugggccccuccgccguggacaucgggaacggcugcuucgagaccaagcacaagugcaaccagaccugccucgaccgcaucgccgcggggaccuucaacgccggcgaguucagccugcccaccuucgacucccugaacaucacggccgccagccucaacgacgacgggcuggacaaccacaccauccugcuguacuacuccaccgccgcgagcucccucgccgugacccugaugcuggccaucuucaucgucuacauggugagccgggacaacguguccugcagcaucugccucuga

SEQ ID NO: 92594 - RNA, 1755 nt, Artificial Sequence
  derived and/or modified CDS sequence (opt1) from hemagglutinin__InfluenzaB__EPI614608
augaaggccaucaucgugcugcucauggucgugaccagcaacgccgaccgcaucugcaccggcaucacguccagcaacagcccccacguggucaagaccgcgacccagggggaggugaacgugaccggcgucaucccgcugacgaccacccccaccaaguccuacuucgccaaccugaaggggacgcggacccgcggcaagcucugccccgacugccugaacugcaccgaccuggacguggcccucgggcggcccaugugcgugggcaccacgccguccgccaaggccagcauccugcacgagguccgccccaucaccuccggcugcuuccccaucaugcacgaccggaccaagauccgccagcugcccaaccuccugcggggguacgagaagauccgccugagcacccagaacgugaucgacgcggagaaggccccgggcgggcccuaccggcucggcacguccgggagcugccccaacgccaccuccaagaucggcuucuucgccaccauggcgugggccgugcccaaggacaacuacaagaacgccaccaacccgcugacggucgaggugcccuacaucugcaccgagggcgaggaccagaucaccguguggggguuccacagcgacgagaagacccagaugaagucccuguacggcgacagcaacccccagaaguucacguccagcgccaacggggucaccacccacuacgugucccagaucggcgacuuccccgaccagaccgaggacggcgggcucccgcagagcggccgcaucguggucgacuacaugaugcagaagcccgggaagacgggcaccaucguguaccagcgcggggugcugcugccccagaaggucuggugcgccuccggccggagcaaggugaucaagggcagccucccccugaucggggaggcggacugccugcacgaggaguacggcgggcucaacaaguccaagccguacuacaccggcaagcacgccaaggccaucgggaacugccccaucugggugaagacgccccugaagcuggccaacggcaccaaguaccggcccccggccaagcuccugaaggagcgcggcuucuucggggcgaucgccggcuuccuggagggcgggugggaggggaugaucgccggcuggcacggcuacaccagccacggggcccacggcgucgccguggcggccgaccucaaguccacccaggaggccaucaacaagaucaccaagaaccugaacagccuguccgagcucgaggucaagaaccugcagcggcugagcggggccauggacgagcuccacaacgagauccuggagcuggacgagaagguggacgaccuccgcgccgacacgaucuccagccagaucgagcuggcggugcugcucuccaacgagggcaucaucaacagcgaggacgagcaccuccuggcccuggagcggaagcugaagaagaugcugggccccuccgccgucgacaucgggaacggcugcuucgagaccaagcacaagugcaaccagaccugccucgaccgcaucgccgcggggaccuucaacgccggcgaguucagccugcccaccuucgacucccugaacaucacggccgccagccucaacgacgacgggcuggacaaccacaccauccugcuguacuacuccaccgccgcgagcucccucgccgugacccugaugcuggccaucuucaucguguacauggucagccgggacaacguguccugcagcaucugccucuga

SEQ ID NO: 92595 - RNA, 1755 nt, Artificial Sequence
  derived and/or modified CDS sequence (opt1) from hemagglutinin__InfluenzaB__EPI614610
augaaggccaucaucgugcugcucauggucgugaccagcaacgccgaccgcaucugcaccggcaucacguccagcaacagcccccacguggucaagaccgcgacccagggggaggugaacgugaccggcgucaucccgcugacgaccacccccaccaaguccuacuucgccaaccugaaggggacgcggacccgcggcaagcucugccccgacugccugaacugcaccgaccuggacguggcccucgggcggcccaugugcgugggcaccacgccguccgccaaggccagcauccugcacgagguccgccccgugaccuccggcugcuuccccaucaugcacgaccggaccaagauccgccagcugcccaaccuccugcggggguacgagaagauccgccugagcacccagaacgugaucgacgcggagaaggccccgggcgggcccuaccggcucggcacguccgggagcugccccaacgccaccuccaagaucggcuucuucgccaccauggcgugggccguccccaaggacaacuacaagaacgccaccaacccgcugacgguggaggugcccuacaucugcaccgagggcgaggaccagaucaccgucuggggguuccacagcgacgagaagacccagaugaagucccuguacggcgacagcaacccccagaaguucacguccagcgccaacggggugaccacccacuacgugucccagaucggcgacuuccccgaccagaccgaggacggcgggcucccgcagagcggccgcaucgucguggacuacaugaugcagaagcccgggaagacgggcaccaucguguaccagcgcgggguccugcugccccagaagguguggugcgccuccggccggagcaaggugaucaagggcagccucccccugaucggggaggcggacugccugcacgaggaguacggcgggcucaacaaguccaagccguacuacaccggcaagcacgccaaggccaucgggaacugccccaucugggucaagacgccccugaagcuggccaacggcaccaaguaccggcccccggccaagcuccugaaggagcgcggcuucuucggggcgaucgccggcuuccuggagggcgggugggaggggaugaucgccggcuggcacggcuacaccagccacggggcccacggcguggccgucgcggccgaccucaaguccacccaggaggccaucaacaagaucaccaagaaccugaacagccuguccgagcucgaggugaagaaccugcagcggcugagcggggccauggacgagcuccacaacgagauccuggagcuggacgagaagguggacgaccuccgcgccgacacgaucuccagccagaucgagcuggcgguccugcucuccaacgagggcaucaucaacagcgaggacgagcaccuccuggcccuggagcggaagcugaagaagaugcugggccccuccgccguggacaucgggaacggcugcuucgagaccaagcacaagugcaaccagaccugccucgaccgcaucgccgcggggaccuucaacgccggcgaguucagccugcccaccuucgacucccugaacaucacggccgccagccucaacgacgacgggcuggacaaccacaccauccugcuguacuacuccaccgccgcgagcucccucgccgugacccugaugcuggccaucuucaucgucuacauggugagccgggacaacguguccugcagcaucugccucuga

SEQ ID NO: 92596 - RNA, 1758 nt, Artificial Sequence
  derived and/or modified CDS sequence (opt1) from hemagglutinin__InfluenzaB__AAA43697
augaaggccaucaucgugcugcucauggucgugaccagcaacgccgaccgcaucugcaccggcaucacguccagcaacagcccccacguggucaagaccgcgacccagggggaggugaacgugaccggcgucaucccgcugacgaccacccccaccaagagccacuucgccaaccugaaggggacgaagacccggggcaagcucugccccaagugccugaacugcaccgaccuggacguggcccucgcccgccccaagugcauggggaccaucccguccgccaaggcgagcauccugcacgaggugaagcccgucacguccggcugcuuccccaucaugcacgaccggaccaagauccgccagcugcccaaccuccugcggggcuacgagcacauccgccugagcacccacaacgugaucaacgccgagaccgcccccgggggccccuacaagguggggacguccggcagcugccccaacgucaccaacgggaacggcuucuucgccaccauggcgugggccgugcccaagaacgacaacaacaagaccgccacgaacccgcucaccguggagguccccuacaucugcaccgagggcgaggaccagaucaccguguggggguuccacuccgacagcgagacgcagauggugaagcuguacggcgacuccaagccccagaaguucaccagcuccgccaacggggucaccacccacuacgugagccagaucggcggcuuccccaaccaggccgaggacgggggccugccgcaguccgggcggaucguggucgacuacauggugcagaaguccggcaagacggggaccaucaccuaccagcgcggcauccuccugccccagaagguguggugcgcguccggccggagcaaggucaucaaggggagccugccccucaucggcgaggccgacugccugcacgagaaguacgggggccugaacaaguccaagcccuacuacaccggggagcacgccaaggccaucggcaacugcccgaucugggugaagacgccccucaagcuggccaacggcaccaaguaccgcccgcccgcgaagcugcucaaggagcggggguucuucggcgccaucgccggguuccuggagggcgggugggagggcaugaucgccggcuggcacggguacaccagccacggcgcccacggggucgcgguggccgccgaccugaaguccacccaggaggccaucaacaagaucacgaagaaccucaacagccuguccgagcuggaggugaagaaccuccagcgccugagcggcgccauggacgagcugcacaacgagauccucgagcuggacgagaaggucgacgaccugcgggcggacaccaucuccagccagaucgagcucgccgugcugcuguccaacgagggcaucaucaacagcgaggacgagcaccuccuggcccuggagcgcaagcucaagaagaugcuggggccguccgccguggagaucggcaacgggugcuucgagaccaagcacaagugcaaccagaccugccuggaccggaucgcggccggcaccuucaacgccggggaguucagccuccccacguucgacucccugaacaucaccgccgccagccugaacgacgacggccucgacaaccacaccauccugcuguacuacuccaccgcggccagcucccuggccgucacgcucaugaucgccaucuucaucguguacauggugagccgcgacaacgucuccugcagcaucugccuguga

SEQ ID NO: 92597 - RNA, 1755 nt, Artificial Sequence
  derived and/or modified CDS sequence (opt1) from hemagglutinin__InfluenzaB__EPI271545
augaaggccaucaucgugcugcucauggucgugaccagcaacgccgaccgcaucugcaccggcaucacguccagcaacagcccccacguggucaagaccgcgacccagggggaggugaacgugaccggcgucaucccgcugacgaccacccccaccaaguccuacuucgccaaccugaaggggacgcggacccgcggcaagcucugccccgacugccugaacugcaccgaccuggacguggcccucgggcggcccaugugcgugggcaccacgccguccgccaaggccagcauccugcacgagguccgccccgugaccuccggcugcuuccccaucaugcacgaccggaccaagauccgccagcugcccaaccuccugcggggguacgagaacauccgccugagcacccagaacgugaucgacgcggagaaggccccgggcgggcccuaccggcucggcacguccgggagcugccccaacgccaccuccaagaucggcuucuucgccaccauggcgugggccguccccaaggacaacuacaagaacgccaccaacccgcugacgguggaggugcccuacaucugcaccgagggcgaggaccagaucaccgucuggggguuccacagcgacaacaagacccagaugaagucccuguacggcgacagcaacccccagaaguucacguccagcgccaacggggugaccacccacuacgugucccagaucggcgacuuccccgaccagaccgaggacggcgggcucccgcagagcggccgcaucgucguggacuacaugaugcagaagcccgggaagacgggcaccaucguguaccagcgcgggguccugcugccccagaagguguggugcgccuccggccggagcaaggugaucaagggcagccucccccugaucggggaggcggacugccugcacgagaaguacggcgggcucaacaaguccaagccguacuacaccggcgagcacgccaaggccaucgggaacugccccaucugggucaagacgccccugaagcuggccaacggcaccaaguaccggcccccggccaagcuccugaaggagcgcggcuucuucggggcgaucgccggcuuccuggagggcgggugggaggggaugaucgccggcuggcacggcuacaccagccacggggcccacggcguggccgucgcggccgaccucaaguccacccaggaggccaucaacaagaucaccaagaaccugaacagccuguccgagcucgaggugaagaaccugcagcggcugagcggggccauggacgagcuccacaacgagauccuggagcuggacgagaagguggacgaccuccgcgccgacacgaucuccagccagaucgagcuggcgguccugcucuccaacgagggcaucaucaacagcgaggacgagcaccuccuggcccuggagcggaagcugaagaagaugcugggccccuccgccguggacaucgggaacggcugcuucgagaccaagcacaagugcaaccagaccugccucgaccgcaucgccgcggggaccuucaacgccggcgaguucagccugcccaccuucgacucccugaacaucacggccgccagccucaacgacgacgggcuggacaaccacaccauccugcuguacuacuccaccgccgcgagcucccucgccgugacccugaugcuggccaucuucaucgucuacauggugagccgggacaacguguccugcagcaucugccucuga

SEQ ID NO: 92598 - RNA, 1755 nt, Artificial Sequence
  derived and/or modified CDS sequence (opt1) from hemagglutinin__InfluenzaB__AGB08329
augaaggccaucaucgugcugcucauggucgugaccagcaacgccgaccgcaucugcaccggcaucacguccagcaacagcccccacguggucaagaccgcgacccagggggaggugaacgugaccggcgucaucccgcugacgaccacccccaccaaguccuacuucgccaaccugaaggggacgcggacccgcggcaagcucugccccgacugccugaacugcaccgaccuggacguggcccucgggcggcccaugugcgugggcaccacgccguccgccaaggccagcauccugcacgagguccgccccgugaccuccggcugcuuccccaucaugcacgaccggaccaagauccgccagcugcccaaccuccugcggggguacgagaacauccgccugagcacccagaacgugaucgacgcggagaaggccccgggcgggcccuaccggcucggcacguccgggagcugccccaacgccaccuccaagaucggcuucuucgccaccauggcgugggccguccccaaggacaacuacaagaacgccaccaacccgcugacgguggaggugcccuacaucugcaccgagggcgaggaccagaucaccgucuggggguuccacagcgacaacaagauccagaugaagucccuguacggcgacagcaacccccagaaguucaccuccagcgccaacggggugacgacccacuacgugucccagaucggcgacuuccccgaccagaccgaggacggcgggcucccgcagagcggccgcaucgucguggacuacaugaugcagaagcccgggaagaccggcacgaucguguaccagcgcgggguccugcugccccagaagguguggugcgccuccggccggagcaaggugaucaagggcagccucccccugaucggggaggcggacugccugcacgagaaguacggcgggcucaacaaguccaagccguacuacaccggcgagcacgccaaggccaucgggaacugccccaucugggucaagacgccccugaagcuggccaacggcaccaaguaccggcccccggccaagcuccugaaggagcgcggcuucuucggggcgaucgccggcuuccuggagggcgggugggaggggaugaucgccggcuggcacggcuacaccagccacggggcccacggcguggccgucgcggccgaccucaaguccacccaggaggccaucaacaagaucaccaagaaccugaacagccuguccgagcucgaggugaagaaccugcagcggcugagcggggccauggacgagcuccacaacgagauccuggagcuggacgagaagguggacgaccuccgcgccgacaccaucuccagccagaucgagcuggcgguccugcucuccaacgagggcaucaucaacagcgaggacgagcaccuccuggcccuggagcggaagcugaagaagaugcugggccccuccgccguggacaucgggaacggcugcuucgagacgaagcacaagugcaaccagaccugccucgaccgcaucgccgcggggaccuucaacgccggcgaguucagccugcccaccuucgacucccugaacaucaccgccgccagccucaacgacgacgggcuggacaaccacacgauccugcuguacuacuccaccgccgcgagcucccucgccgugacccugaugcuggccaucuucaucgucuacauggugagccgggacaacguguccugcagcaucugccucuga

SEQ ID NO: 92599 - RNA, 1755 nt, Artificial Sequence; identical to SEQ ID NO: 90779
  derived and/or modified CDS sequence (opt1) from hemagglutinin__InfluenzaB__EPI294880

SEQ ID NO: 92600 - RNA, 1752 nt, Artificial Sequence; identical to SEQ ID NO: 90490
  derived and/or modified CDS sequence (opt1) from hemagglutinin__InfluenzaB__CY018765

SEQ ID NO: 92601 - RNA, 1401 nt, Artificial Sequence
  derived and/or modified CDS sequence (opt1) from neuraminidase__InfluenzaB__AAN39743
augcugcccagcaccauccagacccucacgcuguuccugaccuccggcggggugcuccugagccuguacgucuccgcccuccugagcuaccugcucuacuccgacauccugcugaaguucagcccgaccaaggugaucgcccccaccaugucccucgacugcgcgaacgccagcaacgugcaggccgucaaccacuccgccacggaggagaugaccuuccugcugcccgagcccgaguggaccuacccgcgccucagcugccagggcuccaccuuccagaaggcccugcugaucagcccccaccgguucggggaggcgaagggcaacuccgcgccccucaucauccgcgagcccuucaucgccugcgggccgaaggagugcauccacuucgcccugacgcacuacgccgcccagcccggcggcuacuacaacgggacccgggaggaccgcaacaagcugcggcaccucaucagcgugaaccugggcaagauccccaccguggagaacuccaucuuccacauggccgccuggagcggguccgccugccacgacggccgcgaguggaccuacaucggggucgacggccccgacagcaacgcgcugaucaagaucaaguacggcgaggccuacacggacaccuaccacuccuacgccaacaacauccuccggacccaggagagcgccugcaacugcaucgggggcgacugcuaccugaugaucaccgacgggagcgccuccggcaucagccgcugccgguuccugaagauccgcgagggccggaucaucaaggagaucuucccgacggggcgcguggagcacaccgaggagugcacgugcggcuucgcguccaacaagaccaucgagugcgugugccgggacaacagcuacaccgccaagcgccccuucgucaagcucaacguggagaccgacaccgccgagauccggcugaugugcaccgagacguaccuggacacgccccgccccgacgacggguccaucaccggcccgugcgagagcaacggggacaagggcaacggcgggaucaagggcggguucgugcaccagcggauggccucccgcaucggccggugguacagccgcaccauguccaagaccaagcggauggggauggagcucuacgucaaguacgacggcgaccccuggaccgacagcgacgcccuggcgcccuccggcgugauggugagcauggaggagcccgggugguacuccuucggcuucgagaucaaggacaagaagugcgacgucccgugcaucgggaucgagauggugcacgacggcgggaagaagaccuggcacagcgccgccaccgccaucuacugccugaugggcuccggccagcuccugugggacacggugaccggggucgacauggcccuguga

SEQ ID NO: 92602 - RNA, 1401 nt, Artificial Sequence
  derived and/or modified CDS sequence (opt1) from neuraminidase__InfluenzaB__AAN39747
augcugcccagcaccauccagacccucauccuguuccugacguccggcggggugcuccugagccuguacgucuccgcccuccugagcuaccugcucuacuccgacauccugcugaaguucagcccgaccaagaucaucgcccccaccaugucccucgacugcgcgaacgccagcaacgugcaggccgugaaccacuccgccaccaaggagaugacguuccugcugcccgagcccgaguggaccuacccgcgccucagcugccagggcuccaccuuccagaaggcccugcugaucagcccccaccgguucggggaggcgaagggcaacuccgcgccccucaucauccgcgagcccuucaucgccugcgggccgaaggagugcaagcacuucgcccugacccacuacgccgcccagcccggcggcuacuacaacgggacgcgggaggaccgcaacaagcugcggcaccucaucagcgucaaccugggcaagauccccaccguggagaacuccaucuuccacauggccgccuggagcggguccgccugccacgacggccgcgaguggaccuacaucgggguggacggccccgacagcaacgcgcugaucaagaucaaguacggcgaggccuacaccgacacguaccacuccuacgccaacaacauccuccggacccaggagagcgccugcaacugcaucgggggcgacugcuaccugaugaucaccgacgggagcgccuccggcaucagcaagugccgcuuccugaagauccgggagggccgcaucaucaaggagaucuucccgaccgggcgggucgagcacacggaggagugcacgugcggcuucgcguccaacaagaccaucgagugcgccugccgcgacaacagcuacaccgccaagcggcccuucgugaagcucaacguggagaccgacaccgccgagauccgccugaugugcaccaagaccuaccuggacacgccccggcccgacgacggguccaucaccggcccgugcgagagcaacggggacaagggcuccggcgggaucaagggcggguucguccaccagcgcauggccagcaagaucggccggugguacucccgcaccaugagcaagaccaagcggauggggauggagcucuacgugaaguacgacggcgaccccuggacggacuccgacgcgcuggcccccagcggcgugauggucuccaucgaggagcccgggugguacagcuucggcuucgagaucaaggacaagaagugcgacgugccgugcaucgggaucgagauggugcacgacggcgggaagaagaccuggcacuccgccgccaccgccaucuacugccugaugggcagcggccagcuccugugggacaccgucacggggguggacauggcgcuguga

SEQ ID NO: 92603 - RNA, 1401 nt, Artificial Sequence
  derived and/or modified CDS sequence (opt1) from neuraminidase__InfluenzaB__AAN39749
augcugcccagcaccauccagacccucacgcuguuccugaccuccggcggggugcuccugagccuguacgucuccgcccuccugagcuaccugcucuacuccgacauccugcugaaguucagcccgaccaaggugaucgcccccaccaugucccucgacugcgcgaacgccagcaacgugcaggccgucaaccacuccgccacggaggagaugaccuuccugcugcccgagcccgaguggaccuacccgcgccucagcugccagggcuccaccuuccagaaggcccugcugaucagcccccaccgguucggggaggcgaagggcaacuccgcgccccucaucauccgcgagcccuucaucgccugcgggccgaaggagugcaagcacuucgcccugacgcacuacgccgcccagcccggcggcuacuacaacgggacccgggaggaccgcaacaagcugcggcaccucaucagcgugaaccugggcaagauccccaccguggagaacuccaucuuccacauggccgccuggagcggguccgccugccacgacggccgcgaguggaccuacaucggggucgacggccccgacagcaacgcgcugaucaagaucaaguacggcgaggccuacacggacaccuaccacuccuacgccaacaacauccuccggacccaggagagcgccugcaacugcaucgggggcgacugcuaccugaugaucaccgacgggagcgccuccggcaucagccgcugccgguuccugaagauccgcgagggccggaucaucaaggagaucuucccgacggggcgcguggagcacaccgaggagugcacgugcggcuucgcguccaacaagaccaucgagugcgccugccgggacaacagcuacaccgccaagcgccccuucgugaagcucaacgucgagaccgacaccgccgagauccggcugaugugcaccgagacguaccuggacacgccccgccccgacgacggguccaucaccggcccgugcgagagcaacggggacaagggcaacggcgggaucaagggcggguucgugcaccagcggauggccucccgcaucggccggugguacagccgcaccauguccaagaccaagcggauggggauggagcucuacgugaaguacgacggcgaccccuggaccgacagcgacgcgcuggcccccuccggcgucauggugagcauggaggagcccgggugguacuccuucggcuucgagaucaaggacaagaagugcgacgugccgugcaucgggaucgagaugguccacgacggcgggaagaagaccuggcacagcgccgccaccgccaucuacugccugaugggcuccggccagcuccugugggacacggugaccgggguggacauggcgcuguga

SEQ ID NO: 92604 - RNA, 1401 nt, Artificial Sequence
  derived and/or modified CDS sequence (opt1) from neuraminidase__InfluenzaB__AAN39751
augcugcccagcaccauccagacccucacgcuguuccugaccuccggcggggugcuccugagccuguacgucuccgcccuccugagcuaccugcucuacuccgacauccugcugaaguucagcccgaccaaggugaucgcccccaccaugucccucgacugcgcgaacgccagcaacgugcaggccgucaaccacuccgccacggaggagaugaccuuccugcugcccgagcccgaguggaccuacccgcgccucagcugccagggcuccaccuuccagaaggcccugcugaucagcccccaccgguucggggaggcgaagggcaacuccgcgccccucaucauccgcgagcccuucaucgccugcgggccgaaggagugcaagcacuucgcccugacgcacuacgccgcccagcccggcggcuacuacaacgggacccgggaggaccgcaacaagcugcggcaccucaucagcgugaaccugggcaagauccccaccguggagaacuccaucuuccacauggccgccuggagcggguccgccugccacgacggccgcgaguggaccuacaucggggucgacggccccgacagcaacgcgcugaucaagaucaaguacggcgaggccuacacggacaccuaccacuccuacgccaacaacauccuccggacccaggagagcgccugcaacugcaucgggggcgacugcuaccugaugaucaccgacgggagcgccuccggcaucagccgcugccgguuccugaagauccgcgagggccggauccucaaggagaucuucccgacggggcgcguggagcacaccgaggagugcacgugcggcuucgcguccaacaagaccaucgagugcgccugccgggacaacagcuacaccgccaagcgccccuucgugcagcugaacgucgagaccgacaccgccgagauccggcugaugugcaccgagacguaccucgacacgccccgccccgacgacggguccaucaccggcccgugcgagagcaacggggacaagggcaacggcgggaucaagggcggguucgugcaccagcggauggccucccgcaucggccggugguacagccgcaccauguccaagaccaagcggauggggauggaccuguacgugaaguacgacggcgaccccuggaccgacagcgacgcgcuggcccccuccggcgucauggugagcauggaggagcccgggugguacuccuucggcuucgagaucaaggacaagaagugcgacgugccgugcaucgggaucgagaugguccacgacggcgggaagaagaccuggcacagcgccgccaccgccaucuacugccucaugggcuccggccagcugcugugggacacggugaccgggguggacauggcgcucuga

SEQ ID NO: 92605 - RNA, 1401 nt, Artificial Sequence
  derived and/or modified CDS sequence (opt1) from neuraminidase__InfluenzaB__AAN39753
augcugcccagcaccauccagacccucacgcuguuccugaccuccggcggggugcuccugagccuguacgucuccgcccuccugagcuaccugcucuacuccgacauccugcugaaguucagcccgaccaaggugaucgcccccaccaugucccucgacugcgcgaacgccagcaacgugcaggccgucaaccacuccgccacggaggagaugaccuuccugcugcccgagcccgaguggaccuacccgcgccucagcugccagggcuccaccuuccagaaggcccugcugaucagcccccaccgguucggggaggcgaagggcaacuccgcgccccucaucauccgcgagcccuucaucgccugcgggccgaaggagugcaagcacuucgcccugacgcacuacgccgcccagcccggcgaguacuacaacggcacccgggaggaccgcaacaagcugcggcaccucaucagcgugaaccuggggaagauccccaccguggagaacuccaucuuccacauggccgccuggagcggcuccgccugccacgacgggcgcgaguggaccuacaucggcgucgacgggcccgacagcaacgcgcugaucaagaucaaguacggcgaggccuacacggacaccuaccacuccuacgccaacaacauccuccggacccaggagagcgccugcaacugcaucggcggggacugcuaccugaugaucaccgacggcagcgccuccgggaucagccgcugccgguuccugaagauccgcgagggccggaucaucaaggagaucuucccgacgggccgcguggagcacaccgaggagugcacgugcggguucgcguccaacaagaccaucgagugcgccugccgggacaacagcuacaccgccaagcgccccuucgugaagcucaacgucgagaccgacaccgccgagauccggcugaugugcaccgagacguaccuggacacgccccgccccgacgacggcuccaucaccgggccgugcgagagcaacggcgacaaggggaacggcggcaucaagggcggguucgugcaccagcggauggccucccgcaucgggcggugguacagccgcaccauguccaagaccaagcggaugggcauggagcucuacgugaaguacgacggggaccccuggaccgacagcgacgcgcuggcccccuccggcgucauggugagcauggaggagcccggcugguacuccuucggguucgagaucaaggacaagaagugcgacgugccgugcaucggcaucgagaugguccacgacgggggcaagaagaccuggcacagcgccgccaccgccaucuacugccugaugggguccggccagcuccugugggacacggugaccggcguggacauggcgcuguga

SEQ ID NO: 92606 - RNA, 1401 nt, Artificial Sequence
  derived and/or modified CDS sequence (opt1) from neuraminidase__InfluenzaB__AAN39759
augcugcccagcaccauccagacccucacgcuguuccugaccuccggcggggugcuccugagccuguacgucuccgccagccucuccuaccugcuguacagcgacauccuccugaagcuguccccgaccgagaucaccgcccccacgaugccccucgacugcgcgaacgccagcaacgugcaggccgugaaccgcuccgccaccaagggcgucacccugcugcuccccgagccggaguggaccuacccccggcugagcugccccggguccacguuccagaaggcccugcucaucagcccccaccgcuucggcgagaccaaggggaacuccgcgccgcugaucauccgggagcccuucaucgccugcggccccaaggagugcaagcacuucgcccugacccacuacgccgcgcagcccggcggguacuacaacggcacccgcgaggaccggaacaagcuccgccaccugaucagcgugaagcuggggaagaucccgacgguggagaacuccaucuuccacauggccgccuggagcggcuccgccugccacgacgggaaggaguggaccuacaucggcgucgacggccccgacagcaacgcccuccugaagaucaaguacggggaggcguacaccgacaccuaccacuccuacgccaacaacauccugcggacgcaggagagcgccugcaacugcaucggcgggaacugcuaccucaugaucaccgacggcagcgccuccggcaucagcgagugccgcuuccugaagauccgggaggggcgcaucaucaaggagaucuuccccaccggccgggugaagcacaccgaggagugcacgugcggguucgccuccaacaagaccaucgagugcgcgugccgcgacaacagcuacaccgccaagcggcccuucgugaagcugaacgucgagaccgacacggccgagauccgccucaugugcaccgagaccuaccuggacaccccgcggcccgacgacggcuccaucacggggcccugcgagagcaacggcgacaagggcuccgggggcaucaagggcggguucgugcaccagcgcauggagagcaagaucgggcggugguacucccgcaccaugagcaagaccaagcggaugggcaugggccuguacgugaaguacgacggggaccccuggaccgacuccgacgcccucgcccugagcggcgucaugguguccaucgaggagccggggugguacagcuucggcuucgagaucaaggacaagaagugcgacgugcccugcaucgggaucgagaugguccacgacggcggcaaggagacguggcacuccgcggccaccgccaucuacugccugauggggagcggccagcuccugugggacaccgugaccgggguggacauggcccuguga

SEQ ID NO: 92607 - RNA, 1401 nt, Artificial Sequence
  derived and/or modified CDS sequence (opt1) from neuraminidase__InfluenzaB__AAN39761
augcugcccagcaccauccagacccucacgcuguuccugaccuccggcggggugcuccugagccuguacgucuccgccagccucuccuaccugcuguacagcgacauccuccugaaguucucccagaccgagaucaccgccccgacgaugccccuggacugcgcgaacgccagcaacgugcaggccgugaaccgcuccgccaccaagggcgucacccuccugcugcccgagcccgaguggaccuacccgcggcucagcugccccggguccacguuccagaaggcccugcugaucagcccccaccgcuucggcgagaccaaggggaacuccgcgccccucaucauccgggagccguucaucgccugcggccccaaggagugcaagcacuucgcccugacccacuacgccgcgcagcccggcggguacuacaacggcacccgcgaggaccggaacaagcugcgccaccucaucagcgugaagcuggggaagauccccacgguggagaacuccaucuuccacauggccgccuggagcggcuccgccugccacgacgggcgggaguggaccuacaucggcgucgacggcccggacagcaacgcccugcucaagaucaaguacggggaggcguacaccgacaccuaccacuccuacgccaagaacauccugcgcacgcaggagagcgccugcaacugcaucggcggggacugcuaccugaugaucaccgacggcagcgccuccggcaucagcgagugccgguuccucaagauccgcgaggggcggaucaucaaggagaucuuccccaccggccgcaucaagcacaccgaggagugcacgugcggguucgccuccaacaagaccaucgagugcgcgugccgggacaacagcuacaccgccaagcgccccuucgugaagcugaacguggagaccgacacggccgagauccggcugaugugcaccgagaccuaccucgacacgccccgcccggacgacggcuccaucaccgggcccugcgagagcaacggcgacaagggcuccgggggcaucaagggcggguucguccaccagcggauggccagcaagaucgggcgcugguacucccggaccaugagcaagaccaagcgcaugggcaugggccuguacgugaaguacgacggggaccccuggaccgacuccgaggcccuggcgcucagcggcgugauggucuccauggaggagcccgggugguacagcuucggcuucgagaucaaggacaagaagugcgacgugccgugcaucgggaucgagauggugcacgacggcggcaagacgaccuggcacuccgccgccaccgccaucuacugccugauggggagcggccagcugcucugggacaccgucacggggguggacauggcccuguga

SEQ ID NO: 92608 - RNA, 1401 nt, Artificial Sequence
  derived and/or modified CDS sequence (opt1) from neuraminidase__InfluenzaB__AAN39769
augcugcccagcaccauccagacccucacgcuguuccugaccuccggcggggugcuccugagccuguacgucuccgcccuccugagcuaccugcucuacuccgacauccugcugaaguucagcccgaccaagaucaucgcccccaccacgucccucgacagcgcgaacgccuccaacuuccaggccgugaaccacagcgccaccaaggagaugaccuuccugcugcccgagcccgaguggaccuacccgcgccucuccugccagggcagcacguuccagaaggcccugcugaucagcccccaccgguucggggaggcgaagggcaacuccgcgccccucaucauccgcgagcccuucaucgccugcgggccgaaggagugcaagcacuucgcccugacccacuacgccgcccagcccggcggcuacuacaacgggacccgggaggaccgcaacaagcugcggcaccucaucuccgugaaccugggcaagauccccaccgucgagaacagcaucuuccacauggccgccugguccgggagcgccugccacgacggccgcgaguggacguacaucgggguggacggccccgacuccaacgcgcugaucaagaucaaguacggcgaggccuacaccgacaccuaccacagcuacgccaacaacauccuccggacccaggagagcgccugcaacugcaucgggggcgacugcuaccugaugaucacggacggguccgccagcggcaucuccaagugccgcuuccugaagauccgggagggccgcaucaucaaggagaucuucccgaccgggcggguggagcacaccgaggagugcacgugcggcuucgcgagcaacaagaccaucgagugcgccugccgcgacaacuccuacaccgccaagcggcccuucgucaagcucaacguggagaccgacaccgccgagauccgccugaugugcacggagaccuaccuggacacgccccggcccgacgacgggagcaucaccggcccgugcgaguccaacggggacaagggcagcggcgggaucaagggcggguucgugcaccagcgcauggccuccaagaucggccggugguacagccgcaccauguccaagaccaagcggauggggauggagcucuacgucaaguacgacggcgaccccuggaccgacagcgacgcgcuggcccccuccggcgugauggugagcaucgaggagcccgggugguacuccuucggcuucgagaucaaggacaagaagugcgacgucccgugcaucgggaucgagauggugcacgacggcgggaagaccacguggcacagcgccgccaccgccaucuacugccugaugggcuccggccagcuccugugggacaccgugaccggggucgacauggcgcuguga

SEQ ID NO: 92609 - RNA, 1401 nt, Artificial Sequence
  derived and/or modified CDS sequence (opt1) from neuraminidase__InfluenzaB__AAN39771
augcugcccagcaccauccagacccucacgcuguuccugaccuccggcggggugcuccugagccuguacgucuccgcccuccugagcuaccugcucuacuccgacauccugcugaaguucagcccgaccaagaucaucgcccccaccacgucccucgacagcgcgaacgccuccaacuuccaggccgugaaccacagcgccaccaaggagaugaccuuccugcugcccgagcccgaguggaccuacccgcgccucuccugccagggcagcacguuccagaaggcccugcugaucagcccccaccgguucggggaggcgaagggcaacuccgcgccccucaucauccgcgagcccuucaucgccugcgggccgaaggagugcaagcacuucgcccugacccacuacgccgcccagcccggcggcuacuacaacgggacccgggaggaccgcaacaagcugcggcaccucaucuccgugaaccugggcaagauccccaccgucgagaacagcaucuuccacauggccgccugguccgggagcgccugccacgacggccgcgaguggacguacaucgggguggacggccccgacuccaacgcgcugaucaagaucaaguacggcgaggccuacaccgacaccuaccacagcuacgccaacaacauccuccggacccaggagagcgccugcaacugcaucgggggcgacugcuaccugaugaucacggacggguccgccagcggcaucuccaagugccgcuuccugaagauccgggagggccgcaucgugaaggagaucuucccgaccgggcgggucgagcacaccgaggagugcacgugcggcuucgcgagcaacaagaccaucgagugcgccugccgcgacaacuccuacaccgccaagcggcccuucgugaagcucaacguggagaccgacaccgccgagauccgccugaugugcacggagaccuaccuggacacgccccggcccgacgacgggagcaucaccggcccgugcgaguccaacggggacaagggcagcggcgggaucaagggcggguucguccaccagcgcauggccuccaagaucggccggugguacagccgcaccauguccaagaccaagcggauggggauggagcucuacgugaaguacgacggcgaccccuggaccgacagcgacgcgcuggaccccuccggcgugauggucagcaucgaggagcccgggugguacuccuucggcuucgagaucaaggacaagaagugcgacgugccgugcaucgggaucgagauggugcacgacggcgggaagaccacguggcacagcgccgccaccgccaucuacugccugaugggcuccggccagcuccugugggacaccaucaccggggucgacauggcccuguga

SEQ ID NO: 92610 - RNA, 1401 nt, Artificial Sequence
  derived and/or modified CDS sequence (opt1) from neuraminidase__InfluenzaB__AAN39773
augcugcccagcaccauccagacccucacgcuguuccugaccuccggcggggugcuccugagccuguacgucuccgcccuccugagcuaccugcucuacuccgacauccugcugaaguucagcccgaccaagaucaucgcccccaccacgucccucgacagcgcgaacgccuccaacuuccaggccgugaaccacagcgccaccaaggagaugaccuuccugcugcccgagcccgaguggaccuacccgcgccucuccugccagggcagcacguuccagaaggcccugcugaucagcccccaccgguucggggaggcgaagggcaacuccgcgccccucaucauccgcgagcccuucaucgccugcgggccgaaggagugcaagcacuucgcccugacccacuacgccgcccagcccggcggcuacuacaacgggacccgggaggaccgcaacaagcugcggcaccucaucuccgugaacuucggcaagauccccaccgucgagaacagcaucuuccacauggccgccugguccgggagcgccugccacgacggccgcgaguggacguacaucgggguggacggccccgacuccaacgcgcugaucaagaucaaguacggcgaggccuacaccgacaccuaccacagcuacgccaacaacauccugcggacccaggagagcgccugcaacugcaucgggggcgacugcuaccucaugaucacggacggguccgccagcggcaucuccaagugccgcuuccugaagauccgggagggccgcaucgugaaggagaucuucccgaccgggcgggucgagcacaccgaggagugcacgugcggcuucgcgagcaacaagaccaucgagugcgccugccgcgacaacuccuacaccgccaagcggcccuucgugaagcugaacguggagaccgacaccgccgagauccgccucaugugcacggagaccuaccuggacacgccccggcccgacgacgggagcaucaccggcccgugcgaguccaacggggacaagggcagcggcgggaucaagggcggguucguccaccagcgcauggccuccaagaucggccggugguacagccgcaccauguccaagaccaagcggauggggauggagcuguacgugaaguacgacggcgaccccuggaccgacagcgacgcgcucgcccccuccggcgugauggucagcaucgaggagcccgggugguacuccuucggcuucgagaucaaggacaagaagugcgacgugccgugcaucgggaucgagauggugcacgacggcgggaagaccacguggcacagcgccgccaccgccaucuacugccugaugggcuccggccagcugcucugggacaccaucaccggggucgacauggcgcuguga

SEQ ID NO: 92611 - RNA, 1401 nt, Artificial Sequence
  derived and/or modified CDS sequence (opt1) from neuraminidase__InfluenzaB__AAN39775
augcugcccagcaccauccagacccucacgcuguuccugaccuccggcggggugcuccugagccuguacgucuccgcccuccugagcuaccugcucuacuccgacauccugcugaaguucagcccgaccaagaucaucgcccccaccacgucccucgacagcgcgaacgccuccaacuuccaggccgugaaccacagcgccaccaaggagaugaccuuccugcugcccgagcccgaguggaccuacccgcgccucuccugccagggcagcacguuccagaaggcccugcugaucagcccccaccgguucggggaggcgaagggcaacuccgcgccccucaucauccgcgagcccuucaucgccugcgggccgaaggagugcaagcacuucgcccugacccacuacgccgcccagcccggcggcuacuacaacgggacccgggaggaccgcaacaagcugcggcaccucaucuccgugaaccugggcaagauccccaccgucgagaacagcaucuuccacauggccgccugguccgggagcgccugccacgacggcaaggaguggacguacaucgggguggacggccccgacuccaacgcgcugaucaagaucaaguacggcgaggccuacaccgacaccuaccacagcuacgccaacaacauccuccgcacccaggagagcgccugcaacugcaucgggggcgacugcuaccugaugaucacggacggguccgccagcggcaucuccaagugccgguuccugaagauccgcgagggccggaucaucaaggagaucuucccgaccgggcgcguggagcacaccgaggagugcacgugcggcuucgcgagcaacaagaccaucgagugcgccugccgggacaacuccuacaccgccaagcgccccuucgucaagcucaacguggagaccgacaccgccgagauccggcugaugugcacggagaccuaccuggacacgccccgccccgacgacgggagcaucaccggcccgugcgaguccaacggggacaagggcagcggcgggaucaagggcggguucgugcaccagcggauggccuccaagaucggccgcugguacagccggaccauguccaagaccaagcgcauggggauggagcucuacgucaaguacgacggcgaccccuggaccgacagcgacgcgcuggcccccuccggcgugauggugagcaucgaggagcccgggugguacuccuucggcuucgagaucaaggacaagaagugcgacgucccgugcaucgggaucgagauggugcacgacggcgggaagaccacguggcacagcgccgccaccgccaucuacugccugaugggcuccggccagcuccugugggacaccgugaccggggucgacauggcgcuguga

SEQ ID NO: 92612 - RNA, 1401 nt, Artificial Sequence
  derived and/or modified CDS sequence (opt1) from neuraminidase__InfluenzaB__AAN39777
augcugcccagcaccauccagacccucacgcuguuccugaccuccggcggggugcuccugagccuguacgucuccgccagccucuccuaccugcuguacagcgacauccuccugaaguucucccagaccgagaucaccgccccgacgaugccccuggacugcgcgaacgccagcaacgugcaggccgugaaccgcuccgccaccaagggcgucacccuccugccgcccgagcccgaguggaccuacccccggcugagcugccccggguccacguuccagaaggcccuccugaucagcccccaccgcuucggcgagaccaaggggaacuccgcgccgcugaucauccgggagcccuucaucgccugcggccccaaggagugcaagcacuucgcccucacccacuacgccgcgcagcccggcggguacuacaacggcacccgcgaggaccggaacaagcugcgccaccugaucagcgugaagcucgggaagaucccgacgguggagaacuccaucuuccacauggccgccuggagcggcuccgccugccacgacgggcgggaguggaccuacaucggcgucgacggccccgacagcaacgcccugcugaagaucaaguacggggaggcguacaccgacaccuaccacuccuacgccaagaacauccuccgcacgcaggagagcgccugcaacugcaucggcggggacugcuaccugaugaucaccgacggcagcgccuccggcaucagcgagugccgguuccugaagauccgcgaggggcggaucaucaaggagaucuuccccaccggccgcgugaagcacaccgaggagugcacgugcggguucgccuccaacaagaccaucgagugcgcgugccgggacaacagcuacaccgccaagcgccccuucgugaagcucaacgucgagaccgacacggccgagauccggcugaugugcaccgagaccuaccuggacaccccgcgccccgacgacggcuccaucacggggcccugcgagagcaacggcaacaagggcuccgggggcaucaagggcggguucgugcaccagcggauggccagcaagaucgggcgcugguacucccggaccaugagcaagaccaagcgcaugggcaugggccucuacgugaaguacgacggggaccccuggaccgacuccgaggcccuggcgcugagcggcgucaugguguccauggaggagccggggugguacagcuucggcuucgagaucaaggacaagaagugcgacgugcccugcaucgggaucgagaugguccacgacggcggcaagacgaccuggcacuccgccgccaccgccaucuacugccucauggggagcggccagcugcugugggacaccgugacggggguggacauggcccucuga

SEQ ID NO: 92613 - RNA, 1401 nt, Artificial Sequence; identical to SEQ ID NO: 92608
  derived and/or modified CDS sequence (opt1) from neuraminidase__InfluenzaB__AAN39779

SEQ ID NO: 92614 - RNA, 1401 nt, Artificial Sequence
  derived and/or modified CDS sequence (opt1) from neuraminidase__InfluenzaB__AAN39781
augcugcccagcaccauccagacccucacgcuguuccugaccuccggcggggugcuccugagccuguacgucuccgccagccucuccuaccugcuguacagcgacauccuccugaaguucuccagcaccgagaucaccgccccgacgaugccccugaacugcgcgaacgccuccaacgugcaggccgugaaccacagcgccaccaagggcgucacccucccccugcccgagccggaguggaccuacccccgccuguccugccccgggagcacguuccagaaggcccuccugaucagcccccaccgguucggcgagaccaaggggaacuccgcgccgcugaucauccgcgagcccuucaucgccugcggccccaaggagugcaagcacuucgcccucacccacuacgccgcgcagcccggcggguacuacaacggcacccgggaggaccgcaacaagcugcggcaccugaucuccgugaagcucgggaagaucccgacgguggagaacagcaucuuccacauggccgccugguccggcagcgccugccacgacgggcgcgaguggaccuacaucggcgucgacggccccgacuccaacgcccugcugaagaucaaguacggggaggcguacaccgacaccuaccacagcuacgccaacaacauccuccggacgcaggagagcgccugcaacugcaucggcggggacugcuaccugaugaucaccgacggcuccgccagcggcguguccgagugccgcuuccugaagauccgggaggggcgcaucaucaaggagaucuuccccaccggccggguggagcacaccgaggagugcacgugcggguucgccagcaacaagaccaucgagugcgcgugccgcgacaacuccuacaccgccaagcggcccuucgucaagcucaacguggagaccgacacggccgagauccgccugaugugcaccgagaccuaccuggacaccccgcggcccgacgacggcagcaucacggggcccugcgaguccaacggcgacaagggcagcgggggcaucaagggcggguucgugcaccagcgcauggccuccaagaucgggcggugguacagccgcaccauguccaagaacaagcggaugggcaugggccucuacgucaaguacgacggggaccccuggaucgacagcgacgcccugacccuguccggcgugauggugagcauggaggagccggggugguacuccuucggcuucgagaucaaggacaagaagugcgacguccccugcaucgggaucgagauggugcacgacggcggcaaggagaccuggcacagcgcggccacggccaucuacugccucaugggguccggccagcugcugugggacaccgugaccggggucaacauggcccucuga

SEQ ID NO: 92615 - RNA, 1401 nt, Artificial Sequence
  derived and/or modified CDS sequence (opt1) from neuraminidase__InfluenzaB__AAN39783
augcugcccagcaccauccagacccucacgcuguuccugaccuccggcggggugcuccugagccuguacgucuccgccagccucuccuaccugcuguacagcgacauccuccugaaguucucccagaccgagaucaccgccccgacgaugccccuggacugcgcgaacgccagcaacgugcaggccgugaaccgcuccgccaccaagggcgucacccuccugcugcccgagcccgaguggaccuacccgcggcucagcugccccggguccacguuccagaaggcccugcugaucagcccccaccgcuucggcgagaccaaggggaacuccgcgccccucaucauccgggagccguucaucgccugcggccccaaggagugcaagcacuucgcccugacccacuacgccgcgcagcccggcggguacuacaacggcacccgcgaggaccggaacaagcugcgccaccucaucagcgugaagcuggggaagauccccacgguggagaacuccaucuuccacauggccgccuggagcggcuccgccugccacgacgggcgggaguggaccuacaucggcgucgacggcccggacagcaacgcccugcucaagaucaaguacggggaggcguacaccgacaccuaccacuccuacgccaagaacauccugcgcacgcaggagagcgccugcaacugcaucggcggggacugcuaccugaugaucaccgacggcagcgccuccggcaucagcgagugccgguuccucaagauccgcgaggggcggaucaucaaggagaucuuccccaccggccgcgugaagcacaccgaggagugcacgugcggguucgccuccaacaagaccaucgagugcgcgugccgggacaacagcuacaccgccaagcgccccuucgugaagcugaacgucgagaccgacacggccgagauccggcugaugugcaccgagaccuaccucgacacgccccgcccgaacgacggcuccaucaccgggcccugcgagagcaacggcgacaagggcuccgggggcaucaagggcggguucgugcaccagcggauggccagcaagaucgggcgcugguacucccggaccaugagcaagaccaagcgcaugggcaugggccuguacgugaaguacgacggggaccccuggaccgacuccgaggcccuggcgcucagcggcgucaugguguccauggaggagcccgggugguacagcuucggcuucgagaucaaggacaagaagugcgacgugccgugcaucgggaucgagaugguccacgacggcggcaagacgaccuggcacuccgccgccaccgccaucuacugccugauggggagcggccagcugcucugggacaccgugacggggguggacauggcccuguga

SEQ ID NO: 92616 - RNA, 1401 nt, Artificial Sequence
  derived and/or modified CDS sequence (opt1) from neuraminidase__InfluenzaB__AAN39785
augcugcccagcaccauccagacccucacgcuguuccugaccuccggcggggugcuccugagccuguacgucuccgcccuccugagcuaccugcucuacuccgacauccugcugaaguucagcccgaccaaggugaucgcccccaccaugucccucgacuacgcgaacgccagcaacgugcaggccgucaaccacuccgccacggaggagaugaccuuccugcugcccgagcccgaguggaccuacccgcgccucagcugccagggcuccaccuuccagaaggcccugcugaucagcccccaccgguucggggaggcgaagggcaacuccgcgccccucaucauccgcgagcccuucaucgccugcgggccgaaggagugcaagcacuucgcccugacgcacuacgccgcccagcccggcggcuacuacaacgggacccgggaggaccgcaacaagcugcggcaccucaucagcgugaaccugggcaagauccccaccguggagaacuccaucuuccacauggccgccuggagcggguccgccugccacgacggccgcgaguggaccuacaucggggucgacggccccgacagcaacgcgcugaucaagaucaaguacggcgaggccuacacggacaccuaccacuccuacgccaacaacauccuccggacccaggagagcgccugcaacugcaucgggggcgacugcuaccugaugaucaccgacgggagcgccuccggcaucagccgcugccgguuccugaagauccgcgagggccggaucaucaaggagaucuucccgacggggcgcguggagcacaccgaggagugcacgugcggcuucgcguccaacaagaccaucgagugcgccugccgggacaacagcuacaccgccaagcgccccuucgugaagcucaacgucgagaccgacaccgccgagauccggcugaugugcaccgagacguaccuggacacgccccgccccgacgacggguccaucaccggcccgugcgagagcaacggggacaagggcuccggcgggaucaagggcggguucgugcaccagcggaugaccagccgcaucggccggugguacucccgcaccaugagcaagaccaagcggauggggauggagcucuacgugaaguacgacggcgaccccuggaccgacuccgacgcccuggcgcccagcggcgucaugguguccauggaggagcccgggugguacagcuucggcuucgagaucaaggacaagaagugcgacgugccgugcaucgggaucgagaugguccacgacggcgggaagaagaccuggcacuccgccgccacggccaucuacugccugaugggcagcggccagcuccugugggacaccgugaccgggguggacauggcccuguga

SEQ ID NO: 92617 - RNA, 1401 nt, Artificial Sequence
  derived and/or modified CDS sequence (opt1) from neuraminidase__InfluenzaB__AAN39787
augcugcccagcaccauccagacccucacgcuguuccugaccuccggcggggugcuccugagccuguacgucuccgcccuccugagcuaccugcucuacuccgacauccugcugaaguucagcccgaccaaggugaucgcccccaccaugucccucgacuacgcgaacgccagcaacgugcaggccgucaaccacuccgccacggaggagaugaccuuccugcugcccgagcccgaguggaccuacccgcgccucagcugccagggcuccaccuuccagaaggcccugcugaucagcccccaccgguucggggaggcgaagggcaacuccgcgccccucaucauccgcgagcccuucaucgccugcgggccgaaggagugcaagcacuucgcccugacgcacuacgccgcccagcccggcggcuacuacaacgggacccgggaggaccgcaacaagcugcggcaccucaucagcgugaaccugggcaagauccccaccguggagaacuccaucuuccacauggccgccuggagcggguccgccugccacgacggccgcgaguggaccuacaucggggucgacggccccgacagcaacgcgcugaucaagaucaaguacggcgaggccuacacggacaccuaccacuccuacgccaacaacauccuccggacccaggagagcgccugcaacugcaucgggggcgacugcuaccugaugaucaccgacgggagcgccuccggcaucagccgcugccgguuccugaagauccgcgagggccggaucaucaaggagaucuucccgacggggcgcguggagcacaccgaggagugcacgugcggcuucgcguccaacaagaccaucgagugcgccugccgggacaacagcuacaccgccaagcgccccuucgugaagcucaacgucgagaccgacaccgccgagauccggcugaugugcaccgagacguaccuggacacgccccgccccgacgacggguccaucaccggcccgugcgagagcaacggggacaagggcaacggcgggaucaagggcggguucgugcaccagcggauggccucccgcaucggccggugguacagccgcaccauguccaagaccaagcggauggggauggagcucuacgugaaguacgacggcgaccccuggaccgacagcgacgcgcuggcccccuccggcgucauggugagcauggaggagcccgggugguacuccuucggcuucgagaucaaggacaagaagugcgacgugccgugcaucgggaucgagaugguccacgacggcgggaagaagaccuggcacagcgccgccaccgccaucuacugccugaugggcuccggccagcuccugugggacacggugaccgggguggacauggcgcuguga

SEQ ID NO: 92618 - RNA, 1401 nt, Artificial Sequence
  derived and/or modified CDS sequence (opt1) from neuraminidase__InfluenzaB__AAN39795
augcugcccagcaccauccagacccucacgcuguuccugaccuccggcggggugcuccugagccuguacgucuccgccagccucuccuaccugcuguacagcgacauccuccugaaguucuccccgaccgagaucaccgcccccacgaugccccuggacugcgcgaacgccagcaacgugcaggccgugaaccgcuccgccaccaagggcgucacccuccugcugcccgagccggaguggaccuacccccggcucagcugccccggguccacguuccagaaggcccugcugaucagcccccaccgcuucggcgagacccgggggaacuccgcgccgcucaucauccgcgagcccuucaucgccugcggccccaaggagugcaagcacuucgcccugacccacuacgccgcgcagcccggcggguacuacaacggcacccgggaggaccgcaacaagcugcggcaccucaucagcgugaagcuggggaagaucccgacgguggagaacuccaucuuccacauggccgccuggagcggcuccgccugccacgacgggcgcgaguggaccuacaucggcgucgacggccccgacagcaacgcccugcucaagaucaaguacggggaggcguacaccgacaccuaccacuccuacgccaacaacauccugcggacgcaggagagcgccugcaacugcaucggcggggacugcuaccugaugaucaccgacggcagcgccuccggcaccagcaagugccgcuuccucaagauccgggaggggcgcaucaucaaggagaucuuccccaccggccggguggagcacacggaggagugcacgugcggguucgccuccaacaagaccaucgagugcgcgugccgcgacaacaacuacaccgccaagcggcccuucgugaagcugaacgucgagaccgacgccgccgagauccgccugaugugcaccgagaccuaccucgacaccccgcggcccgacgacggcagcaucacggggcccugcgaguccaacggcgacaagggccgcgggggcaucaagggcggguucgugcaccagcggauggccagcaagaucgggcgcugguacucccggaccaugagcaagaccgagcgcaugggcauggagcuguacgugaaguacgacggcgaccccuggaccgacuccgacgcgcuggcccucagcggggucaugguguccauggaggagccgggcugguacagcuucggguucgagaucaaggacaagaagugcgacgugcccugcaucggcaucgagaugguccacgacgggggcaagaagacguggcacuccgccgccaccgccaucuacugccugaugggcagcgggcagcugcucugggacaccgugaccggcguggacauggcgcuguga

SEQ ID NO: 92619 - RNA, 1401 nt, Artificial Sequence; identical to SEQ ID NO: 92603
  derived and/or modified CDS sequence (opt1) from neuraminidase__InfluenzaB__AAN39797

SEQ ID NO: 92620 - RNA, 1401 nt, Artificial Sequence
  derived and/or modified CDS sequence (opt1) from neuraminidase__InfluenzaB__AAN39799
augcugcccagcaccauccagacccucacgcuguuccugaccuccggcggggugcuccugagccuguacgucuccgcccuccugagcuaccugcucuacuccgacgugcugcugaaguucagcccgaccaagaucaucgcccccaccaugucccucgacugcgcgaacgccagcaacgugcaggccgucaaccacuccgccacggaggagaugaccuuccugcugcccgagcccgaguggaccuacccgcgccucagcugccagggcuccaccuuccagaaggcccugcugaucagcccccaccgguucggggaggcgaagggcaacuccgcgccccucaucauccgcgagcccuucaucgccugcgggccgaaggagugcaagcacuucgcccugacgcacuacgccgcccagcccggcggcuacuacaacgggacccgggaggaccgcaacaagcugcggcaccucaucagcgugaaccugggcaagauccccaccguggagaacuccaucuuccacauggccgccuggagcggguccgccugccacgacggccgcgaguggaccuacaucggggucgacggccccgacagcaacgcgcugaucaagaucgaguacggcgaggccuacacggacaccuaccacuccuacgccuacaacauccuccggacccaggagagcgccugcaacugcaucgggggcgacugcuaccugaugaucaccgacgggagcgccuccggcaucagcaagugccgcuuccugaagauccgggagggccgcaucaucaaggagaucuucccgacggggcggguggagcacaccgaggagugcacgugcggcuucgcguccaacaagaccaucgagugcgccugccgcgacaacagcuacaccgccaagcggcccuucgugaagcucaacgucgagaccgacaccgccgagauccgccugaugugcaccgagacguaccuggacacgccccggcccgacgacggguccaucaccggcccgugcgagagcaacggggacaagggcuccggcgggaucaagggcggguucgugcaccagcgcauggccagcaagaucggccggugguacucccgcaccaugagcaagaccaagcggauggggauggagcucuacgugaaguacgacggcgaccccuggaccgacuccgacgcgcuggcccccagcggcgucaugguguccauggaggagcccgggugguacagcuucggcuucgagaucaaggacaagaagugcgacgugccgugcaucgggaucgagaugguccacgacggcgggaagaagaccuggcacuccgccgccaccgccaucuacugccugaugggcagcggccagcuccugugggacacggugaccgggguggacauggcgcuguga

SEQ ID NO: 92621 - RNA, 1401 nt, Artificial Sequence
  derived and/or modified CDS sequence (opt1) from neuraminidase__InfluenzaB__AAN39801
augcugcccagcaccauccagacccucacgcuguuccugaccuccggcggggugcuccugagccuguacgucuccgccagccucuccuaccugcuguacagcgacauccuccugaaguucuccccgaccgagaucaccgcccccacgaugccccuggacugcgcgaacgccagcaacgcccaggccgugaaccgcuccgccaccaagggcgugacccuccugcugcccgagccggaguggaccuacccccggcucagcugccccggguccacguuccagaaggcgcugcugaucagcccccaccgcuucggcgagaccaaggggaacuccgccccgcucaucauccgggagcccuucaucgccugcggccccaaggagugcaagcacuucgcccugacccacuacgcggcccagcccggcggguacuacaacggcacccgcgaggaccggaacaagcugcgccaccucaucagcgucaagcuggggaagaucccgacgguggagaacuccaucuuccacauggccgccuggagcggcuccgccugccacgacgggaaggaguggaccuacaucggcguggacggccccgacagcaacgcgcugcucaagaucaaguacggggaggccuacaccgacaccuaccacuccuacgccaacaacauccugcggacgcaggagagcgccugcaacugcaucggcgggaacugcuaccugaugaucaccgacggcagcgccuccggcaucagcgagugccgcuuccucaagauccgggaggggcgcaucaucaaggagaucuuccccaccggccgggucaagcacaccgaggagugcacgugcggguucgcguccaacaagaccaucgagugcgccugccgcgacaacagcuacaccgccaagcggcccuucgugaagcugaacguggagaccgacacggccgagauccgccugaugugcaccgagaccuaccucgacaccccgcggcccgacgacggcuccaucacggggcccugcgagagcaacggcgacaagggcuccgggggcaucaagggcggguucguccaccagcgcauggccagcaagaucgggcggugguacucccgcaccaugagcaagaccaagcggaugggcaugggccuguacgugaaguacgacggggaccccuggaccgacuccgacgcgcuggcccucagcggcgugauggucuccauggaggagccggggugguacagcuucggcuucgagaucaaggacaagaagugcgacgugcccugcaucgggaucgagauggugcacgacggcggcaaggagacguggcacuccgccgccaccgccaucuacugccugauggggagcggccagcugcucugggacaccgucaccgggguggacauggcgcuguga

SEQ ID NO: 92622 - RNA, 1401 nt, Artificial Sequence
  derived and/or modified CDS sequence (opt1) from neuraminidase__InfluenzaB__AAN39803
augcugcccagcaccauccagacccucacgcuguuccugaccuccggcggggugcuccugagccuguacgucuccgccagccucuccuaccugcuguacagcgacauccuccugaaguucuccccgaccgagaucaccgcccccaaggugccccuggacugcgcgaacgccagcaacgugcaggccgucaaccgcuccgccacgaagggcaugacccuccugcugagcgagcccgaguggaccuacccgcggcucuccugccaggggagcaccuuccagaaggcccugcugaucagcccccaccgcuucggcgagacgcgggggaacuccgcgccccucaucauccgcgagcccuucaucgccugcggcccgaaggagugcaagcacuucgcccugacccacuacgccgcgcagcccggcggguacuacaacggcacccgggaggaccgcaacaagcugcggcaccucaucuccgugaagcuggggaagauccccaccguggagaacagcaucuuccacauggccgccugguccggcagcgccugccacgacgggcgcgaguggacguacaucggccuggacggccccgacuccaacgcccucaucaagaucaaguacggggaggcguacaccgacaccuaccacagcuacgccaacaacauccugcggacccaggagagcgccugcaacugcaucggcggggacugcuaccugaugaucacggacggcuccgccagcggcaucuccaagugccgcuuccucaagauccgggaggggcgcaucaucaaggagaucuucccgaccggccgggucgagcacaccgaggagugcacgugcggguucgccagcaacaagaccaucgagugcgcgugccgcgacaacuccuacaccgccaagcggcccuucgugaagcugaacguggagaccgacaccgccgagauccgccugaugugcacggagaccuaccucgacacgccccggcccgacgacggcagcaucaccgggccgugcgaguccaacggcgacaagggccgcgggggcaucaagggcggguucguccaccagcggauggccagcaagaucgggcgcugguacucccggaccaugagcaagaccgagcgcaugggcauggagcuguacgugaaguacgacggcgaccccuggaccgacuccgacgcccuggcgcccagcggggugauggucuccaugaaggagcccggcugguacagcuucggguucgagaucaaggacaagaagugcgacgugccgugcaucggcaucgagauggugcacgacgggggcaaggagaccuggcacuccgccgccacggccaucuacugccucaugggcagcgggcagcugcugugggacaccgucaccggcguggacauggcccucuga

SEQ ID NO: 92623 - RNA, 1401 nt, Artificial Sequence
  derived and/or modified CDS sequence (opt1) from neuraminidase__InfluenzaB__ABA02232
augcugcccagcaccauccagacccucacgcuguuccugaccuccggcggggugcuccugagccuguacgucuccgccagccucuccuaccugcuguacagcgacauccuccugaaguucuccccgaccgagaucaccgcccccacgaugccccuggacugcgcgaacgccagcaacgugcaggccgugaaccgcuccgccaccaagggcgucacccuccugcugcccgagccggaguggaccuacccccggcucagcugccccggguccacguuccagaaggcccugcugaucagcccccaccgcuucggcgagaccaaggggaacuccgcgccgcucaucauccgggagcccuucaucgccugcggccccaaggagugcaagcacuucgcccugacccacuacgccgcgcagcccggcggguacuacaacggcacccgcggggaccggaacaagcugcgccaccucaucagcgugaagcugggcaagaucccgacgguggagaacuccaucuuccacauggccgccuggagcggguccgccugccacgacggcaaggaguggaccuacaucggcgucgacgggcccgagaacaacgcccugcucaagaucaaguacggcgaggcguacaccgacaccuaccacagcuacgccaacaacauccugcggacgcaggaguccgccugcaacugcaucgggggcaacugcuaccugaugaucaccgacggcagcgccagcgggaucuccgagugccgcuuccucaagauccgggagggccgcaucaucaaggagaucuuccccaccgggcgggugaagcacaccgaggagugcacgugcggcuucgccagcaacaagaccaucgagugcgcgugccgcgacaacuccuacaccgccaagcggcccuucgugaagcugaacgucgagaccgacacggccgagauccgccugaugugcaccgagaccuaccucgacaccccgcggcccgacgacgggagcaucacgggccccugcgaguccaacggcgacaaggggagcggcgggaucaagggcggguucgugcaccagcgcauggccuccaagaucggccggugguacagccgcaccauguccaagaccaagcggaugggcauggggcuguacgugaaguacgacggcgaccccuggaccgacagcgacgcccuggcgcucuccggggucauggugagcauggaggagccgggcugguacuccuucggguucgagaucaaggacaagaagugcgacgugcccugcaucggcaucgagaugguccacgacggcgggaaggagacguggcacagcgccgccaccgccaucuacugccugaugggcuccgggcagcugcucugggacaccgugaccggcguggacauggcccuguga

SEQ ID NO: 92624 - RNA, 1401 nt, Artificial Sequence
  derived and/or modified CDS sequence (opt1) from neuraminidase__InfluenzaB__ABI84039
augcugcccagcaccauccagacccucacgcuguuccugaccuccggcggggugcuccugagccuguacgucuccgccagccucuccuaccugcuguacagcgacauccuccugaaguucuccccgaccgagaucaccgcccccacgaugccccuggacugcgcgaacgccagcaacgugcaggccgugaaccgcuccgccaccaagggcgucacccuccugcugcccgagccggaguggaccuacccccggcucagcugccccggguccacguuccagaaggcccugcugaucagcccccaccgcuucggcgagaccaaggggaacuccgcgccgcucaucauccgggagcccuucaucgccugcggccccaacgagugcaagcacuucgcccugacccacuacgccgcgcagcccggcggguacuacaacggcacccgcggggaccggaacaagcugcgccaccucaucagcgugaagcugggcaagaucccgacgguggagaacuccaucuuccacauggccgccuggagcggguccgccugccacgacggcaaggaguggaccuacaucggcgucgacgggcccgacaacaacgcccugcucaagaucaaguacggcgaggcguacaccgacaccuaccacagcuacgccaacaacauccugcggacgcaggaguccgccugcaacugcaucgggggcaacugcuaccugaugaucaccgacggcagcgccagcgggguguccgagugccgcuuccucaagauccgggagggccgcaucaucaaggagaucuuccccaccgggcgggugaaguacaccgaggagugcacgugcggcuucgccagcaacaagaccaucgagugcgcgugccgcgacaacuccuacaccgccaagcggcccuucgucaagcugaacguggagaccgacacggccgagauccgccugaugugcaccgacaccuaccucgacaccccgcggcccgacgacgggagcaucacgggccccugcgaguccaacggcgacaaggggagcggcgggaucaagggcggguucgugcaccagcgcauggccuccaagaucggccggugguacagccgcaccauguccaagaccgagcggaugggcauggggcuguacgucaaguacgacggcgaccccugggccgacagcgacgcgcuggccuucuccggggugauggugagcaugaaggagccgggcugguacuccuucggguucgagaucaaggacaagaagugcgacguccccugcaucggcaucgagauggugcacgacggcgggaaggagaccuggcacagcgccgccacggccaucuacugccucaugggcuccgggcagcugcugugggacaccgugaccggcgucgacauggcgcucuga

SEQ ID NO: 92625 - RNA, 1401 nt, Artificial Sequence
  derived and/or modified CDS sequence (opt1) from neuraminidase__InfluenzaB__ABI84051
augcugcccagcaccauccagacccucacgcuguuccugaccuccggcggggugcuccugagccuguacgucuccgccagccucuccuaccugcuguacagcgacauccuccugcgcuucucccagaccgagaucaccgccccgaucaugccccuggacugcgcgaacgccagcaacgugcaggccgugaaccacuccgccacgaagggcgucacccuccugcugcccgagcccgaguggaccuacccgcggcucagcugccccggguccaccuuccagaaggcccugcugaucagcccccaccgcuucggcgagacgaaggggaacuccgcgccccucaucauccgggagccguucaucgccugcggccccaaggagugcaagcacuucgcccugacccacuacgccgcgcagcccggcggguacuacaacggcacccgcgaggaccggaacaagcugcgccaccucaucagcgugaagcuggggaagauccccaccguggagaacuccaucuuccacauggccgccuggagcggcuccgccugccacgacgggcgggaguggacguacaucggcgucgacggcccggacagcaacgcccugcucaagaucaaguacggggaggcguacaccgacaccuaccacuccuacgccaagaacauccugcgcacccaggagagcgccugcaacugcaucggcggggacugcuaccugaugaucacggacggccccgccagcggcaucuccgagugccgguuccucaagauccgcgaggggcggaucaucaaggagaucuuccccaccggccgcgugaagcacaccgaggagugcacgugcggguucgccagcaacaagaccaucgagugcgcgugccgggacaacuccuacaccgccaagcgccccuucgugaagcugaacgucgagaccgacaccgccgagauccggcugaugugcacggagaccuaccucgacaccccgcgccccaacgacggcagcaucaccgggcccugcgaguccaacggcgacaagggcagcgggggcaucaagggcggguucgugcaccagcggauggccuccaagaucgggcgcugguacagccggacgauguccaagaccaagcgcaugggcaugggccuguacgugaaguacgacggggaccccuggaccgacagcgaggcccuggcgcucuccggcgucauggugagcauggaggagccggggugguacuccuucggcuucgagaucaaggacaagaagugcgacgugcccugcaucgggaucgagaugguccacgacggcggcaagaccacguggcacagcgccgccaccgccaucuacugccugaugggguccggccagcugcucugggacaccgugaccgggguggacauggcccuguga

SEQ ID NO: 92626 - RNA, 1401 nt, Artificial Sequence
  derived and/or modified CDS sequence (opt1) from neuraminidase__InfluenzaB__ABI84062
augcugcccagcaccauccagacccucacgcuguuccugaccuccggcggggugcuccugagccuguacgucuccgccagccucuccuaccugcuguacagcgacauccuccugaaguucuccccgaccgagaucaucgcccccaucaugccccuggacugcgcgaacgccagcaacgugcaggccgugaaccgcuccaccacgaagggcgucacccuccugcugcccgagccggaguggaccuacccccggcucagcugccccggguccaccuuccagaaggcccugcugaucagcccccaccgcuucggcgagacgaaggggaacuccgccccgcucaucauccgggagcccuucaucgcgugcggccccaaggagugcaagcacuucgcccugacccacuacgccgcccagcccggcggguacuacaacggcacccgcggggaccggaacaagcugcgccaccucaucagcgugaagcugggcaagaucccgaccguggagaacuccaucuuccacauggcggccuggagcggguccgccugccacgacggcaaggaguggacguacaucggcgucgacgggcccgacaacaacgcccugcucaagaucaaguacggcgaggccuacaccgacaccuaccacagcuacgcgaacaacauccugcggacccaggaguccgccugcaacugcaucgggggcaacugcuaccugaugaucacggacggccccgccagcgggaucagcgagugccgcuuccucaagauccgggagggccgcaucaucaaggagaucuuccccaccgggcgggugaagcacaccgaggagugcacgugcggcuucgccuccaacaagaccaucgagugcgccugccgcgacaacagcuacaccgcgaagcggccguucgugaagcugaacgucgagaccgacaccgccgagauccgccugaugugcacggagaccuaccucgacacgccccggcccgacgacggguccaucaccggccccugcgagagcaacggcgacaagggguccggcgggaucaagggcggguucgugcaccagcgcauggccagcaagaucggccggugguacucccgcaccaugagcaagaccgagcggaugggcauggggcuguacgugaaguacgacggcgacccgugggccgacuccgacgcccuggcgcucagcggggucaugguguccauggaggagcccggcugguacagcuucggguucgagaucaaggacaagaagugcgacgugcccugcaucggcaucgagaugguccacgacggcgggaaggagaccuggcacuccgccgccaccgccaucuacugccugaugggcagcgggcagcugcucugggacacggugaccggcguggacauggcccuguga

SEQ ID NO: 92627 - RNA, 1401 nt, Artificial Sequence
  derived and/or modified CDS sequence (opt1) from neuraminidase__InfluenzaB__ABL76280
augcugcccagcaccauccagacccucacgcuguuccugaccuccggcggggugcuccugagccuguacgucuccgccagccucuccuaccugcuguacagcgacauccuccugaaguucuccccgaccgagaucaccgcccccacgaugccccugaacugcgcgaacgccagcaacgugcaggccgugaaccgcuccgccaccaagggcgucacccuccugcugcccgagccggaguggaccuacccccggcucagcugccccggguccacguuccagaaggcccugcugaucagcccccaccgcuucggcgagaccaaggggaacuccgcgccgcucaucauccgggagcccuucaucgccugcggccccaaggagugcaagcacuucgcccugacccacuacgccgcgcagcccggcggguacuacaacggcacccgcgaggaccggaacaagcugcgccaccucaucagcgugaagcuggggaagaucccgacgguggagaacuccaucuuccacauggccgccuggagcggcuccgccugccacgacgggcgggaguggaccuacaucggcgucgacggccccgacagcaacgcccugcucaagaucaaguacggggaggcguacaccgacaccuaccacuccuacgccaacaacauccugcgcacgcaggagagcgccugcaacugcaucggcggggacugcuaccugaugaucaccgacggcagcgccuccggcaucagcgagugccgguuccucaagauccgcgaggggcggaucaucaaggagaucuuccccaccggccgcguggagcacaccgaggagugcacgugcggguucgccuccaacaagaccaucgagugcgcgugccgggacaacagcuacaccgccaagcgccccuucgugaagcugaacgucgagaccgacacggccgagauccggcugaugugcaccgagaccuaccucgacaccccgcgccccgacgacggcuccaucacggggcccugcgagagcaacggcgacaagggcuccgggggcaucaagggcggguucgugcaccagcggauggccagcaagaucgggcgcugguacucccggaccaugagcaagaccaagcgcaugggcaugggccuguacgugaaguacgacggggaccccuggaucgacuccgacgcccugacccucagcggcgucaugguguccauggaggagccggggugguacagcuucggcuucgagaucaaggacaagaagugcgacgugcccugcaucgggaucgagaugguccacgacggcggcaagaagacguggcacuccgcggccaccgccaucuacugccugauggggagcggccagcugcucugggacaccgugaccgggguggacauggcccuguga

SEQ ID NO: 92628 - RNA, 1401 nt, Artificial Sequence
  derived and/or modified CDS sequence (opt1) from neuraminidase__InfluenzaB__ABL76302
augcugcccagcaccauccagacccucacgcuguuccugaccuccggcggggugcuccugagccuguacgucuccgccagccucuccuaccugcuguacagcgacauccuccugaaguucccgcccaccgagaucaccgcccccacgaugccccuggacugcgcgaacgccuccaacgugcaggccgugaaccgcagcgccaccaagggcgucacccuccugcugccggagcccgaguggaccuacccccggcucuccugccccgggagcacguuccagaaggcccugcugaucuccccgcaccgcuucggcgagaccaaggggaacagcgcgccccucaucauccgggagcccuucaucgccugcggccccaaggagugcaagcacuucgcccugacccacuacgccgcgcagccgggcggguacuacaacggcacccgcgaggaccggaacaagcugcgccaccucaucuccgugaagcuggggaagauccccacgguggagaacagcaucuuccacauggccgccugguccggcagcgccugccacgacgggcgggaguggaccuacaucggcgucgacggccccgacuccaacgcccugcucaagaucaaguacggggaggcguacaccgacaccuaccacagcuacgccaacaacauccugcgcacgcaggaguccgccugcaacugcaucggcgggaacugcuaccugaugaucaccgacggcagcgccagcggcaucuccgagugccgguuccucaagauccgcgaggggcggaucaucaaggagaucuuccccaccggccgcgugaagcacaccgaggagugcacgugcggguucgccagcaacaagaccaucgagugcgcgugccgggacaacuccuacaccgccaagcgcccguucgugaagcugaacgucgagaccgacacggccgagauccggcugaugugcaccgagaccuaccucgacacgccccgccccgacgacggcagcaucaccgggcccugcgaguccaacggcgacaagggcagcgggggcaucaagggcggguucgugcaccagcggauggccuccaagaucgggcgcugguacagccggaccauguccaagaccaagcgcaugggcaugggccuguacgugaaguacgacggggacccguggaccgacagcgacccccuggcccucuccggcgucauggugagcauggaggagcccgggugguacuccuucggcuucgagaucaaggacaagaagugcgacgugcccugcaucgggaucgagaugguccacgacggcggcaaggagacguggcacagcgcggccaccgccaucuacugccugaugggguccggccagaugcugugggacaccgugaccgggguggacauggcccucuga

SEQ ID NO: 92629 - RNA, 1401 nt, Artificial Sequence
  derived and/or modified CDS sequence (opt1) from neuraminidase__InfluenzaB__ABL76313
augcugcccagcaccauccagacccucacgcuguuccugaccuccggcggggugcuccugagccuguacgucuccgccagccucuccuaccugcuguacagcgacauccuccugaaguucuccccgaaggagaucaccgcccccaccaugccccugaacugcgcgaacgccagcaacgugcaggccgugaaccgcuccgccacgaagggcgucaccuucccccucccggagcccgaguggaccuacccccggcugagcugccccggguccaccuuccagaaggcccugcucaucagcccgcaccgcuucggcgagacgaaggggaacuccgcgccccugaucauccgggagcccuucaucgccugcggccccaaggagugcaagcacuucgcccugacccacuacgccgcgcagccgggcggguacuacaacggcacccgcgaggaccggaacaagcuccgccaccugaucagcgugaagcuggggaagauccccaccguggagaacuccaucuuccacauggccgccuggagcggcuccgccugccacgacgggcgggaguggacguacaucggcgucgacggccccgacagcaacgcccuccugaagaucaaguacggggaggcguacaccgacaccuaccacuccuacgccaacaacauccugcgcacccaggagagcgccugcaacugcaucggcggggacugcuaccucaugaucacggacggcagcgccuccggcaucagcgagugccgguuccugaagauccgcgaggggcggaucaucaaggagaucuuccccaccggccgcguggagcacaccgaggagugcacgugcggguucgccuccaacaagaccaucgagugcgcgugccgggacaacagcuacaccgccaagcgcccguucgugaagcugaacgucgagaccgacaccgccgagauccggcucaugugcacggagaccuaccuggacacgccccgccccgacgacggcuccaucaccgggcccugcgagagcaacggcgacaagggcuccgggggcaucaagggcggguucgugcaccagcggauggccagcaagaucgggcgcugguacucccggaccaugagcaagaccaagcgcaugggcaugggccuguacgugaaguacgacggggacccguggaucgacuccgacgcccucacccugagcggcgucaugguguccguggaggagcccgggugguacagcuucggcuucgagaucaaggacaagaagugcgacguccccugcaucgggaucgagauggugcacgacggcggcaagaccacguggcacuccgcggccaccgccaucuacugccugauggggagcggccagcuccugugggacaccgugaccggggucgacauggcccuguga

SEQ ID NO: 92630 - RNA, 1401 nt, Artificial Sequence
  derived and/or modified CDS sequence (opt1) from neuraminidase__InfluenzaB__ABL76335
augcugcccagcaccauccagacccucacgcuguuccugaccuccggcggggugcuccugagccuguacgucuccgccagccucuccuaccugcuguacagcgacauccuccugaaguucuccccgaccgagaucaccgcccccacgaugccccugaacugcgcgaacgccagcaacgugcaggccgugaaccgcuccgccaccaagggcgucacccucccccugccggagcccgaguggaccuacccccggcugagcugccccggguccacguuccagaaggcccuccugaucagcccgcaccgcuucggcgagaccaaggggaacuccgcgccccugaucauccgggagcccuucaucgccugcggccccaaggagugcaagcacuucgcccucacccacuacgccgcgcagccgggcggguacuacaacggcacccgcgaggaccggaacaagcugcgccaccugaucagcgugaagcucgggaagauccccacgguggagaacuccaucuuccacauggccgccuggagcggcuccgccugccacgacgggcgggaguggaccuacaucggcgucgacggccccgacagcaacgcccugcugaagaucaaguacggggaggcguacaccgacaccuaccacuccuacgccaacaacauccuccgcacgcaggagagcgccugcaacugcaucggcggggacugcuaccugaugaucaccgacggcagcgccuccggcaucagcgagugccgguuccugaagauccgcgaggggcggaucaucaaggagaucuuccccaccggccgcguggagcacaccgaggagugcacgugcggguucgccuccaacaagaccaucgagugcgcgugccgggacaacagcuacaccgccaagcgcccguucgugaagcucaacgucgagaccgacacggccgagauccggcugaugugcaccgagaccuaccuggacacgccccgccccgacgacggcuccaucaccgggcccugcgagagcaacggcgacaagggcuccgggggcaucaagggcggguucgugcaccagcggauggccagcaagaucgggcgcugguacucccggaccaugagcaagaccaagcgcaugggcaugggccucuacgugaaguacgacggggacccguggaucgacuccgacgcccugacccugagcggcgucaugguguccauggaggagcccgggugguacagcuucggcuucgagaucaaggacaagaagugcgacgugcccugcaucgggaucgagaugguccacgacggcggcaagacgaccuggcacuccgcggccaccgccaucuacugccucauggggagcggccagcugcugugggacaccgugacggggguggacauggcccucuga

SEQ ID NO: 92631 - RNA, 1401 nt, Artificial Sequence
  derived and/or modified CDS sequence (opt1) from neuraminidase__InfluenzaB__ABL76346
augcugcccagcaccauccagacccucacgcuguuccugaccuccggcggggugcuccugagccuguacgucuccgccagccucuccuaccugcuguacagcgacauccuccugaaguucuccccgaaggagaucaccacccccacgaugccccugaacugcgccaacgcgagcaacgugcaggccgugaaccgcuccgccaccaagggcgucacccuccugcugcccgagccggaguggaccuacccccggcucagcugccccggguccacguuccagaaggcccugcugaucagcccccaccgcuucggcgagaccaaggggaacuccgccccgcucaucauccgggagcccuucaucgcgugcggccccaaggagugcaagcacuucgcccugacccacuacgccgcccagcccggcggguacuacaacggcacccgcgaggaccggaacaagcugcgccaccucaucagcgugaagcuggggaagaucccgacgguggagaacuccaucuuccacauggcggccuggagcggcuccgccugccacgacgggcgggaguggaccuacaucggcgucgacggccccgacagcaacgcccugcucaagaucaaguacggggaggccuacaccgacaccuaccacuccuacgcgaacaacauccugcgcacgcaggagagcgccugcaacugcaucggcggggacugcuaccugaugaucaccgacggcagcgccuccggcaucagcgagugccgguuccucaagauccgcgaggggcggaucaucaaggagaucuuccccaccggccgcguggagcacaccgaggagugcacgugcggguucgccuccaacaagaccaucgagugcgccugccgggacaacagcuacaccgcgaagcgccccuucgugaagcugaacgucgagaccgacacggccgagauccggcugaugugcaccgagaccuaccucgacaccccgcgccccgacgacggcuccaucacggggcccugcgagagcaacggcgacaagggcuccgggggcaucaagggcggguucgugcaccagcggauggccagcaagaucgggcgcugguacucccggaccaugagcaagaccaagcgcaugggcaugggccuguacgugaaguacgacggggaccccuggaucgacuccgacgcccugacccucagcggcgucaugguguccauggaggagccggggugguacagcuucggcuucgagaucaaggacaagaagugcgacgugcccugcaucgggaucgagaugguccacgacggcggcaagacgaccuggcacuccgccgcgaccgccaucuacugccugauggggagcggccagcugcucugggacaccgugacggggguggacauggcccuguga

SEQ ID NO: 92632 - RNA, 1401 nt, Artificial Sequence; identical to SEQ ID NO: 92631
  derived and/or modified CDS sequence (opt1) from neuraminidase__InfluenzaB__ABL76357

SEQ ID NO: 92633 - RNA, 1401 nt, Artificial Sequence
  derived and/or modified CDS sequence (opt1) from neuraminidase__InfluenzaB__ABL76368
augcugcccagcaccauccagacccucacgcuguuccugaccuccggcggggugcuccugagccuguacgucuccgccagccucuccuaccugcuguacagcgacauccuccugaaguucuccccgaccgagaucaccgcccccacgaugccccuggacugcgcgaacgccagcaacgugcaggccgugaaccgcuccgccaccaagggcgucacccuccugcugcccgagccggaguggaccuacccccggcucagcugccccggguccacguuccagaaggcccugcugaucagcccccaccgcuucggcgagaccaaggggaacuccgcgccgcucaucauccgggagcccuucaucgccugcggccccaaggagugcaagcacuucgcccugacccacuacgccgcgcagcccggcggguacuacaacggcacccgcgaggaccggaacaagcugcgccaccucaucagcgugaagcuggggaagaucccgacgguggagaacuccaucuuccacauggccgccuggagcggcuccgccugccacgacgggaaggaguggaccuacaucggcgucgacggccccgacagcaacgcccugcucaagaucaaguacggggaggcguacaccgacaccuaccacuccuacgccaacaacauccugcggacgcaggagagcgccugcaacugcaucggcgggaacugcuaccugaugaucaccgacggcagcgccuccggcaucagcgagugccgcuuccucaagauccgggaggggcgcaucaucaaggagaucuuccccaccggccgggugaagcacaccgaggagugcacgugcggguucgccuccaacaagaccaucgagugcgcgugccgcgacaacagcuacaccgccaagcggcccuucgugaagcugaacgucgagaccgacacggccgagauccgccugaugugcaccgagaccuaccucgacaccccgcggcccgacgacggcuccaucacggggcccugcgagagcaacggcgacaagggcuccgggggcaucaagggcggguucgugcaccagcgcauggccagcaagaucgggcggugguacucccgcaccaugagcaagaccaagcggaugggcaugggccuguacgugaaguacgacggggaccccuggaccgacuccggcgcccuggcgcucagcggggucaugguguccauggaggagccgggcugguacagcuucggguucgagaucaaggacaagaagugcgacgugcccugcaucggcaucgagaugguccacgacggcgggaaggagacguggcacuccgccgccaccgccaucuacugccugaugggcagcgggcagcugcucugggacaccgugaccggcguggacauggcccuguga

SEQ ID NO: 92634 - RNA, 1404 nt, Artificial Sequence
  derived and/or modified CDS sequence (opt1) from neuraminidase__InfluenzaB__ABL76379
augcugcccagcaccauccagacccucacgcuguuccugaccuccggcggggugcuccugagccuguacgucuccgccagccucuccuaccugcuguacagcgacauccuccugaaguucuccccgaccgagaucaccgcccccacgaugccccuggacugcgcgaacgccagcaacgugcaggccgugaaccgcuccgccaccaagggcgucaccuuccuccugcugcccgagccggaguggaccuacccccggcucagcugccccggguccacguuccagaaggcccugcugaucagcccccaccgcuucggcgagaccaaggggaacuccgcgccgcucaucauccgggagcccuucaucgccugcggccccaaggagugcaagcacuucgcccugacccacuacgccgcgcagcccggcggguacuacaacggcacccgcggggaccggaacaagcugcgccaccucaucagcgugaagcugggcaagaucccgacgguggagaacuccaucuuccacauggccgccuggagcggguccgccugccacgacggcaaggaguggaccuacaucggcgucgacgggcccgacagcaacgcccugcucaagaucaaguacggcgaggcguacaccgacaccuaccacuccuacgccaacaacauccugcggacgcaggagagcgccugcaacugcaucgggggcaacugcuaccugaugaucaccgacggcagcgccuccgggaucagcgagugccgcuuccucaagauccgggagggccgcaucaucaaggagaucuuccccaccgggcgggugaagcacaccgaggagugcacgugcggcuucgccuccaacaagaccaucgagugcgcgugccgcgacaacagcuacaccgccaagcggcccuucgugaagcugaacgucgagaccgacacggccgagauccgccugaugugcaccgagaccuaccucgacaccccgcggcccgacgacggguccaucacgggccccugcgagagcaacggcgacaagggguccggcgggaucaagggcggguucgugcaccagcgcauggccagcaagaucggccggugguacucccgcaccaugagcaagaccaagcggaugggcauggggcuguacgugaaguacgacggcgaccccuggaccgacuccgacgcccuggcgcucagcggggucaugguguccauggaggagccgggcugguacagcuucggguucgagaucaaggacaagaagugcgacgugcccugcaucggcaucgagaugguccacgacggcgggaaggagacguggcacuccgccgccaccgccaucuacugccugaugggcagcgggcagcugcucugggacaccgugaccggcguggacauggcccuguga

SEQ ID NO: 92635 - RNA, 1401 nt, Artificial Sequence
  derived and/or modified CDS sequence (opt1) from neuraminidase__InfluenzaB__ABL76390
augcugcccagcaccauccagacccucacgcuguuccugaccuccggcggggugcuccugagccuguacgucuccgccagccucuccuaccugcuguacagcgacauccuccugaaguucuccccgaccgagaucaccgcccccacgaugccccuggacugcgcgaacgccagcaacgugcaggccgugaaccgcuccagcaccaagggcgucaccuuccuccugcccgagccggaguggaccuacccccggcuguccugccccgggagcacguuccagaaggcccuccugaucagcccccaccgcuucggcgagaccaaggggaacuccgccccgcugaucauccgggagcccuucaucgcgugcggccccaaggagugcaagcacuucgcccucacccacuacgccgcccagcccggcggguacuacaacggcacccgcgaggaccggaacaagcugcgccaccugaucuccgugaagcucgggaagaucccgacgguggagaacagcaucuuccacauggcggccugguccggcagcgccugccacgacgggaaggaguggaccuacaucggcgucgacggccccgacuccaacgcccugcugaagaucaaguacggggaggccuacaccgacaccuaccacagcuacgcgaacaacauccuccggacgcaggagagcgccugcaacugcaucggcgggaacugcuaccugaugaucaccgacggcuccgccagcggcaucuccgagugccgcuuccugaagauccgggaggggcgcaucaucaaggagaucuuccccaccggccgggugaagcacaccgaggagugcacgugcggguucgccagcaacaagaccaucgagugcgccugccgcgacaacuccuacaccgcgaagcggcccuucgugaagcucaacgucgagaccgacacggccgagauccgccugaugugcaccgagaccuaccuggacaccccgcggcccgacgacggcagcaucacgggguccugcgagagcgacggcgacaagggcuccgggggcaucaagggcggguucgugcaccagcgcauggccagcaagaucgggcggugguacucccgcaccaugagcaagaccaagcggaugggcaugggccucuacgugcgcuacgacggggaccccuggaccgacuccagcgcccuggcccuguccggcgucauggugagcauggaggagcccgggugguacuccuucggcuucgagaucaaggacaagaagugcgacgugccgugcaucgggaucgagaugguccacgacggcggcaaggagacguggcacagcgcggccaccgccaucuacugccucaugggguccggccagcugcugugggacaccgugaccgggguggacauggcccucuga

SEQ ID NO: 92636 - RNA, 1401 nt, Artificial Sequence
  derived and/or modified CDS sequence (opt1) from neuraminidase__InfluenzaB__ABL76412
augcugcccagcaccauccagacccucacgcuguuccugaccuccggcggggugcuccugagccuguacgucuccgccagccucuccuaccugcuguacagcgacauccuccugaaguucuccccgaccgagaucaccgcccccacgaugccccuggacugcgcgaacgccagcaacgugcaggccgugaaccgcuccgccaccaagggcgucacccuccugauccccgagccggaguggaccuacccccggcugagcugccccggguccacguuccagaaggcccuccugaucagcccccaccgcuucggcgagaccaaggggaacuccgcgccgcugaucauccgggagcccuucaucgccugcggccccaaggagugcaagcacuucgcccucacccacuacaccgcccagcccggcggguacuacaacggcacgcgcggggaccggaacaagcugcgccaccugaucagcgugaagcucggcaagaucccgaccguggagaacuccaucuuccacauggcggccuggagcggguccgccugccacgacggcaaggaguggaccuacaucggcgucgacgggcccgacagcaacgcccugcugaagaucaaguacggcgaggccuacaccgacacguaccacuccuacgcgaacaacauccuccggacccaggagagcgccugcaacugcaucgggggcaacugcuaccugaugaucaccgacggcagcgccuccgggaucagcgagugccgcuuccugaagauccgggagggccgcaucaucaaggagaucuuccccaccgggcgggugaagcacacggaggagugcacgugcggcuucgccuccaacaagaccaucgagugcgccugccgcgacaacagcuacaccgcgaagcggcccuucgugaagcucaacgucgagaccgacaccgccgagauccgccugaugugcaccgagaccuaccuggacacgccgcggcccgacgacggguccaucaccggccccugcgagagcaacggcgacaagggguccggcgggaucaagggcggguucgugcaccagcgcauggccagcaagaucggccggugguacucccgcaccaugagcaagaccaagcggaugggcauggggcucuacgugaaguacgacggcgaccccuggacggacuccgacgcccuggcccugagcggggucaugguguccauggaggagccgggcugguacagcuucggguucgagaucaaggacaagaagugcgacgugcccugcaucggcaucgagaugguccacgacggcgggaaggagaccuggcacuccgcggccaccgccaucuacugccucaugggcagcgggcagcugcugugggacaccgugacgggcguggacauggcccucuga

SEQ ID NO: 92637 - RNA, 1401 nt, Artificial Sequence
  derived and/or modified CDS sequence (opt1) from neuraminidase__InfluenzaB__ABL76423
augcugcccagcaccauccagacccucacgcuguuccugaccuccggcggggugcuccugagccuguacgucuccgccagccucuccuaccugcuguacagcgacauccuccugaaguucuccccgaccgagaucaccgcccccacgaugccccuggacugcgcgaacgccagcaacgugcaggccgugaaccacuccgccaccaagggcgucacccuccugcugcccgagccggaguggaccuacccccgccucagcugccccggguccacguuccagaaggcccugcugaucagcccccaccgguucggcgagaccaaggggaacuccgcgccgcucaucauccgcgagcccuucaucgccugcggccccaaggagugcaagcacuucgcccugacccacuacgccgcgcagcccggcggguacuacaacggcacccgcggggaccggaacaagcugcggcaccucaucagcgugaagcugggcaagaucccgacgguggagaacuccaucuuccacauggccgccuggagcggguccgccugccacgacggcaaggaguggaccuacaucggcgucgacgggcccgacagcaacgcccugcucaagaucaaguacggcgaggcguacaccgacaccuaccacuccuacgccaacaacauccugcgcacgcaggagagcgccugcaacugcaucgggggcaacugcuaccugaugaucaccgacggcagcgccuccgggaucagcgagugccgguuccucaagauccgcgagggccggaucaucaaggagaucuuccccaccgggcgcgugaagcacaccgaggagugcacgugcggcuucgccuccaacaagaccaucgagugcgcgugccgggacaacagcuacaccgccaagcgccccuucgugaagcugaacgucgagaccgacacggccgagauccggcugaugugcaccgagaccuaccucgacaccccgcgccccgacgacggguccaucacgggccccugcgagagcaacggcgacaagggguccggcgggaucaagggcggguucgugcaccagcggauggccagcaagaucggccgcugguacucccggaccaugagcaagaccaagcgcaugggcauggggcuguacgugaaguacgacggcgaccccuggaccgacuccgacgcccuggcguucagcggggucaugguguccauggaggagccgggcugguacagcuucggguucgagaucaaggacaagaagugcgacgugcccugcaucggcaucgagaugguccacgacggcgggaaggagacguggcacuccgccgccaccgccaucuacugccucaugggcagcgggcagcugcugugggacaccgugaccggcguggacauggcccucuga

SEQ ID NO: 92638 - RNA, 1401 nt, Artificial Sequence
  derived and/or modified CDS sequence (opt1) from neuraminidase__InfluenzaB__ABL76434
augcugcccagcaccauccagacccucacgcuguuccugaccuccggcggggugcuccugagccuguacgucuccgccagccucuccuaccugcuguacagcgacauccuccugaaguucuccccgaccgagaucaccgcccccacgaugccccuggacugcgcgaacgccagcaacgugcaggccgugaaccgcuccgccaccaagggcgucacccuccugcugcccgagccggaguggaccuacccccggcucagcugccccggguccacguuccagaaggcccugcugaucagcccccaccgcuucggcgagaccaaggggaacuccgcgccgcucaucauccgggagcccuucaucgccugcggccccaaggagugcaagcacuucgcccugacccacuacgccgcgcagcccggcggguacuacaacggcacccgcggggaccggaacaagcugcgccaccucaucagcgugaagcugggcaagaucccgacgguggagaacuccaucuuccacauggccgccuggagcggguccgccugccacgacggcaaggaguggaccuacaucggcgucgacgggcccgacaacaacgcccugcucaagaucaaguacggcgaggcguacaccgacaccuaccacagcuacgccaacaacauccugcggacgcaggaguccgccugcaacugcaucgggggcaacugcuaccugaugaucaccgacggcagcgccagcgggaucuccgagugccgcuuccucaagauccgggagggccgcaucaucaaggagaucuuccccaccgggcgggugaagcacaccgaggagugcacgugcggcuucgccagcaacaagaccaucgagugcgcgugccgcgacaacuccuacaccgccaagcggcccuucgugaagcugaacgucgagaccgacacggccgagauccgccugaugugcaccgagaccuaccucgacaccccgcggcccgacgacgggagcaucacgggccccugcgaguccaacggcgacaaggggagcggcgggaucaagggcggguucgugcaccagcgcauggccuccaagaucggccggugguacagccgcaccauguccaagaccaagcggaugggcauggggcuguacgugaaguacgacggcgaccccugggccgacagcgacgcgcuggcccucuccggggucauggugagcauggaggagccgggcugguacuccuucggguucgagauccgcgacaagaagugcgacgugcccugcaucggcaucgagaugguccacgacggcgggaaggagaccuggcacagcgccgccacggccaucuacugccugaugggcuccgggcagcugcucugggacaccgugaccggcguggacauggcgcuguga

SEQ ID NO: 92639 - RNA, 1401 nt, Artificial Sequence
  derived and/or modified CDS sequence (opt1) from neuraminidase__InfluenzaB__ABL76456
augcugcccagcaccauccagacccucacgcuguuccugaccuccggcggggugcuccugagccuguacgucuccgccagccucuccuaccugcuguacagcgacauccuccugaaguucuccccgaccgagaucaccgcccccacgaugccccuggacugcgcgaacgccagcaacgugcaggccgugaaccgcuccgccaccaagggcgucaagcuccugcugcccgagccggaguggaccuacccccggcucagcugccccggguccaccuuccagaaggcccugcugaucagcccccaccgcuucggcgagacgaaggggaacuccgcgccgcucaucauccgggagcccuucaucgccugcggccccaaggagugcaagcacuucgcccugacccacuacgccgcgcagcccggcggguacuacaacggcacccgcggggaccggaacaagcugcgccaccucaucagcgugaagcugggcaagaucccgaccguggagaacuccaucuuccacauggccgccuggagcggguccgccugccacgacggcaaggaguggacguacaucggcgucgacgggcccgacaacaacgcccugcucaagaucaaguacggcgaggcguacaccgacaccuaccacagcuacgccaacaacauccugcggacccaggaguccgccugcaacugcaucgggggcaacugcuaccugaugaucacggacggcagcgccagcgggguguccgagugccgcuuccucaagauccgggagggccgcaucaucaaggagaucuuccccaccgggcgggugaagcacaccgaggagugcacgugcggcuucgccagcaacaagaccaucgagugcgcgugccgcgacaacuccuacaccgccaagcggcccuucgucaagcugaacguggagaccgacaccgccgagauccgccugaugugcacggagaccuaccucgacaccccgcggcccgacgacgggagcaucaccggccccugcgaguccaacggcgacaaggggagcggcgggaucaagggcggguucgugcaccagcgcauggccuccaagaucggccggugguacagccgcacgauguccaagaccaagcggaugggcauggggcuguacgucaaguacgacggcgaccccugggccgacagcgacgcgcuggcccucuccggggugauggugagcauggaggagccgggcugguacuccuucggguucgagaucaaggacaagaagugcgacguccccugcaucggcaucgagauggugcacgacggcgggaaggagaccuggcacagcgccgccaccgccaucuacugccugaugggcuccgggcagcugcucugggacacggugaccggcgucgacauggcgcuguga

SEQ ID NO: 92640 - RNA, 1401 nt, Artificial Sequence
  derived and/or modified CDS sequence (opt1) from neuraminidase__InfluenzaB__ABL76467
augcugcccagcaccauccagacccucacgcuguuccugaccuccggcggggugcuccugagccuguacgucuccgccagccucuccuaccugcuguacagcgacauccuccugaaguucuccccgaccgagaucaccgcccccacgaugccccuggacugcgcgaacgccagcaacgugcaggccgugaaccgcuccgccaccaagggcgucacccuccugcugcccgagccggaguggaccuacccccggcucagcugccccggguccacguuccagaaggcccugcugaucagcccccaccgcuucggcgagaccaaggggaacuccgcgccgcucaucauccgggagcccuucaucgccugcggccccaaggagugcaagcacuucgcccugacccacuacgccgcgcagcccggcggguacuacaacggcacccgcggggaccggaacaagcugcgccaccucaucagcgugaagcugggcaagaucccgacgguggagaacuccaucuuccacauggccgccuggagcggguccgccugccacgacggcaaggaguggaccuacaucggcgucgacgggcccgacaacaacgcccugcucaagaucaaguacggcgaggcguacaccgacaccuaccacagcuacgccaacaacauccugcggacgcaggaguccgccugcaacugcaucgggggcaacugcuaccugaugaucaccgacggcagcgccagcgggaucuccgagugccgcuuccucaagauccgggagggccgcaucaucaaggagaucuuccccaccgggcgggugaagcacaccgaggagugcacgugcggcuucgccagcaacaagaccaucgagugcgcgugccgcgacaacuccuacaccgccaagcggcccuucgugaagcugaacgucgagaccgacacggccgagauccgccugaugugcaccgagaccuaccucgacaccccgcggcccgacgacgggagcaucacgggccccugcgaguccaacggcgacaaggggagcggcgggaucaagggcggguucgugcaccagcgcauggccuccaagaucggccggugguacagccgcaccauguccaagaccaagcggaugggcauggggcuguacgugaaguacgacggcgaccccugggccgacagcgacgcgcuggcccucuccggggucauggugagcauggaggagccgggcugguacuccuucggguucgagaucaaggacaagaagugcgacgugcccugcaucggcaucgagaugguccacgacggcgggaaggagaccuggcacagcgccgccacggccaucuacugccugaugggcuccgggcagcugcucugggacaccgugaccggcguggacauggcgcuguga

SEQ ID NO: 92641 - RNA, 1401 nt, Artificial Sequence
  derived and/or modified CDS sequence (opt1) from neuraminidase__InfluenzaB__ABL76478
augcugcccagcaccauccagacccucacgcuguuccugaccuccggcggggugcuccugagccuguacgucuccgccagccucuccuaccugcuguacagcgacauccuccugaaguucuccccgaccgagaucaccgcccccacgaugccccuggacugcgcgaacgccagcaacgugcaggccgugaaccgcuccgccaccaagggcgucaagcuccugcugcccgagccggaguggaccuacccccggcucagcugccccggguccaccuuccagaaggcccugcugaucagcccccaccgcuucggcgagacgaaggggaacuccgcgccgcucaucauccgggagcccuucaucgccugcggccccaaggagugcaagcacuucgcccugacccacuacgccgcgcagcccggcggguacuacaacggcacccgcggggaccggaacaagcugcgccaccucaucagcgugaagcugggcaagaucccgaccguggagaacuccaucuuccacauggccgccuggagcggguccgccugccacgacggcaaggaguggacguacaucggcgucgacgggcccgacaacaacgcccugcucaagaucaaguacggcgaggcguacaccgacaccuaccacagcuacgccaacaacauccugcggacccaggaguccgccugcaacugcaucgggggcaacugcuaccugaugaucacggacggcagcgccagcgggguguccgagugccgcuuccucaagauccgggagggccgcaucaucaaggagaucuuccccaccgggcgggugaagcacaccgaggagugcacgugcggcuucgccagcaacaagaccaucgagugcgcgugccgcgacaacuccuacaccgccaagcggcccuucgucaagcugaacguggagaccgacaccgccgagauccgccugaugugcacgaagaccuaccucgacaccccgcggcccgacgacgggagcaucaccggccccugcgaguccaacggcgacaaggggagcggcgggaucaagggcggguucgugcaccagcgcauggccuccaagaucggccggugguacagccgcacgauguccaagaccaagcggaugggcauggggcuguacgucaaguacgacggcgaccccugggccgacagcgacgcgcuggcccucuccggggugauggugagcauggaggagccgggcugguacuccuucggguucgagaucaaggacaagaagugcgacguccccugcaucggcaucgagauggugcacgacggcgggaaggagaccuggcacagcgccgccaccgccaucuacugccugaugggcuccgggcagcugcucugggacacggugaccggcgucgacauggcgcuguga

SEQ ID NO: 92642 - RNA, 1401 nt, Artificial Sequence
  derived and/or modified CDS sequence (opt1) from neuraminidase__InfluenzaB__ABL76522
augcugcccagcaccauccagacccucacgcuguuccugaccuccggcggggugcuccugagccuguacgucuccgccagccucuccuaccugcuguacagcgacauccuccugaaguucuccccgaccgagaucaccgcccccacgaugccccuggacugcgcgaacgccagcaacgugcaggccgugaaccgcuccgccaccaagggcgucacccuccugcugcccgagccggaguggaccuacccccggcucagcugccccggguccacguuccagaaggcccugcugaucagcccccaccgcuucggcgagaccaaggggaacuccgcgccgcucaucauccgggagcccuucaucgccugcggccccaacgagugcaagcacuucgcccugacccacuacgccgcgcagcccggcggguacuacaacggcacccgcggggaccggaacaagcugcgccaccucaucagcgugaagcugggcaagaucccgacgguggagaacuccaucuuccacauggccgccuggagcggguccgccugccacgacggcaaggaguggaccuacaucggcgucgacgggcccgacaacaacgcccugcucaagaucaaguacggcgaggcguacaccgacaccuaccacagcuacgccaacaacauccugcggacgcaggaguccgccugcaacugcaucgggggcaacugcuaccugaugaucaccgacggcagcgccagcgggguguccgagugccgcuuccucaagauccgggagggccgcaucaucaaggagaucuuccccaccgggcgggugaagcacaccgaggagugcacgugcggcuucgccagcaacaagaccaucgagugcgcgugccgcgacaacuccuacaccgccaagcggcccuucgucaagcugaacguggagaccgacacggccgagauccgccugaugugcaccgagaccuaccucgacaccccgcggcccgacgacgggagcaucacgggccccugcgaguccaacggcgacaaggggagcggcgggaucaagggcggguucgugcaccagcgcauggccuccaagaucggccggugguacagccgcaccauguccaagaccgagcggaugggcauggggcuguacgucaaguacgacggcgaccccugggccgacagcgacgcgcuggcccucuccggggugauggugagcauggaggagccgggcugguacuccuucggguucgagaucaaggacaagaagugcgacguccccugcaucggcaucgagauggugcacgacggcgggaaggagaccuggcacagcgccgccacggccaucuacugccugaugggcuccgggcagcugcucugggacaccgugaccggcgucgacauggcgcuguga

SEQ ID NO: 92643 - RNA, 1401 nt, Artificial Sequence
  derived and/or modified CDS sequence (opt1) from neuraminidase__InfluenzaB__ABL76533
augcugcccagcaccauccagacccucacgcuguuccugaccuccggcggggugcuccugagccuguacgucuccgccagccucuccuaccugcuguacagcgacauccuccugaaguucuccccgaccgagaucaccgcccccacgaugccccuggacugcgcgaacgccagcaacgugcaggccgugaaccgcuccgccaccaagggcgucacccuccugcugcccgagccggaguggaccuacccccggcucagcugccccggguccacguuccagaaggcccugcugaucagcccccaccgcuucggcgagaccaaggggaacuccgcgccgcucaucauccgggagcccuucaucgccugcggccccaacgagugcaagcacuucgcccugacccacuacgccgcgcagcccggcggguacuacaacggcaagcgcggggaccggaacaagcugcgccaccucaucagcgugaagcugggcaagaucccgaccguggagaacuccaucuuccacauggccgccuggagcggguccgccugccacgacggcaaggaguggacguacaucggcgucgacgggcccgacaacaacgcccugcucaagaucaaguacggcgaggcguacaccgacaccuaccacagcuacgccaacaacauccugcggacccaggaguccgccugcaacugcaucgggggcaacugcuaccugaugaucacggacggcagcgccagcgggguguccgagugccgcuuccucaagauccgggagggccgcaucaucaaggagaucuuccccaccgggcgggugaagcacaccgaggagugcacgugcggcuucgccagcaacaagaccaucgagugcgcgugccgcgacaacuccuacaccgccaagcggcccuucgucaagcugaacguggagaccgacaccgccgagauccgccugaugugcacggagaccuaccucgacaccccgcggcccgacgacgggagcaucaccggccccugcgaguccaacggcgacaaggggagcggcgggaucaagggcggguucgugcaccagcgcauggccuccaagaucggccggugguacagccgcacgauguccaagaccgagcggaugggcauggggcuguacgucaaguacgacggcgaccccugggccgacagcgacgcgcuggcccucuccggggugauggugagcauggaggagccgggcugguacuccuucggguucgagaucaaggacaagaagugcgacguccccugcaucggcaucgagauggugcacgacggcgggaaggagaccuggcacagcgccgccaccgccaucuacugccugaugggcuccgggcagcugcucugggacacggugaccggcgucgacauggcgcuguga

SEQ ID NO: 92644 - RNA, 1401 nt, Artificial Sequence
  derived and/or modified CDS sequence (opt1) from neuraminidase__InfluenzaB__ABL76544
augcugcccagcaccauccagacccucacgcuguuccugaccuccggcggggugcuccugagccuguacgucuccgccagccucuccuaccugcuguacagcgacauccuccugaaguucuccccgaccgagaucaccgcccccacgaugccccuggacugcgcgaacgccagcaacgugcaggccgugaaccgcuccgccaccaagggcgucacccuccugcugcccgagccggaguggaccuacccccggcucagcugccccggguccacguuccagaaggcccugcugaucagcccccaccgcuucggcgagaccaaggggaacuccgcgccgcucaucauccgggagcccuucaucgccugcggccccaacgagugcaagcacuucgcccugacccacuacgccgcgcagcccggcggguacuacaacggcacccgcggggagcggaacaagcugcgccaccucaucagcgugaagcugggcaagaucccgacgguggagaacuccaucuuccacauggccgccuggagcggguccgccugccacgacggcaaggaguggaccuacaucggcgucgacgggcccgacaacaacgcccugcucaagaucaaguacggcgaggcguacaccgacaccuaccacagcuacgccaacaacauccugcggacgcaggaguccgccugcaacugcaucgggggcaacugcuaccugaugaucaccgacggcagcgccagcgggguguccgagugccgcuuccucaagauccgggagggccgcaucaucaaggagaucuuccccaccgggcgggugaagcacaccgaggagugcacgugcggcuucgccagcaacaagaccaucgagugcgcgugccgcgacaacuccuacaccgccaagcggcccuucgucaagcugaacguggagaccgacacggccgagauccgccugaugugcaccgagaccuaccucgacaccccgcggcccgacgacgggagcaucacgggccccugcgaguccaacggcgacaaggggagcggcgggaucaagggcggguucgugcaccagcgcauggccuccaagaucggccggugguacagccgcaccauguccaagaccgagcggaugggcauggggcuguacgucaaguacgacggcgaccccugggccgacagcgacgcgcuggcccucuccggggugauggugagcauggaggagccgggcugguacuccuucggguucgagaucaaggacaagaagugcgacguccccugcaucggcaucgagauggugcacgacggcgggaaggagaccuggcacagcgccgccacggccaucuacugccugaugggcuccgggcagcugcucugggacaccgugaccggcgucgacauggcgcuguga

SEQ ID NO: 92645 - RNA, 1401 nt, Artificial Sequence; identical to SEQ ID NO: 92643
  derived and/or modified CDS sequence (opt1) from neuraminidase__InfluenzaB__ABL76566

SEQ ID NO: 92646 - RNA, 1401 nt, Artificial Sequence
  derived and/or modified CDS sequence (opt1) from neuraminidase__InfluenzaB__ABL76588
augcugcccagcaccauccagacccucacgcuguuccugaccuccggcggggugcuccugagccuguacgucuccgccagccucuccuaccugcuguacagcgacauccuccugaaguucuccccgaccgagaucaccgcccccacgaugccccuggacuacgcgaacgccagcaacgugcaggccgugaaccgcuccgccaccaagggcgucacccuccugcugcccgagccggaguggaccuacccccggcucagcugccccggguccacguuccagaaggcccugcugaucagcccccaccgcuucggcgagaccaaggggaacuccgcgccgcucaucauccgggagcccuucaucgccugcggccccaacgagugcaagcacuucgcccugacccacuacgccgcgcagcccggcggguacuacaacggcacccgcggggaccggaacaagcugcgccaccucaucagcgugaagcugggcaagaucccgacgguggagaacuccaucuuccacauggccgccuggagcggguccgccugccacgacggcaaggaguggaccuacaucggcgucgacgggcccgacaacaacgcccugcucaagaucaaguacggcgaggcguacaccgacaccuaccacagcuacgccaacaacauccugcggacgcaggaguccgccugcaacugcaucgggggcaacugcuaccugaugaucaccgacggcagcgccagcgggguguccgagugccgcuuccucaagauccgggagggccgcaucaucaaggagaucuuccccaccgggcgggugaagcacaccgaggagugcacgugcggcuucgccagcaacaagaccaucgagugcgcgugccgcgacaacuccuacaccgccaagcggcccuucgucaagcugaacguggagaccgacacggccgagauccgccugaugugcaccgagaccuaccucgacaccccgcggcccgacgacgggagcaucacgggccccugcgaguccaacggcgacaaggggagcggcgggaucaagggcggguucgugcaccagcgcauggccuccaagaucggccggugguacagccgcaccauguccaagaccgagcggaugggcauggggcuguacgucaaguacgacggcgaccccugggccgacagcgacgcgcuggcccucuccggggugauggugagcauggaggagccgggcugguacuccuucggguucgagaucaaggacaagaagugcgacguccccugcaucggcaucgagauggugcacgacggcgggaaggagaccuggcacagcgccgccacggccaucuacugccugaugggcuccgggcagcugcucugggacaccgugaccggcgucgacauggcgcuguga

SEQ ID NO: 92647 - RNA, 1401 nt, Artificial Sequence; identical to SEQ ID NO: 92642
  derived and/or modified CDS sequence (opt1) from neuraminidase__InfluenzaB__ABL76599

SEQ ID NO: 92648 - RNA, 1401 nt, Artificial Sequence; identical to SEQ ID NO: 92642
  derived and/or modified CDS sequence (opt1) from neuraminidase__InfluenzaB__ABL76610

SEQ ID NO: 92649 - RNA, 1401 nt, Artificial Sequence
  derived and/or modified CDS sequence (opt1) from neuraminidase__InfluenzaB__ABL76621
augcugcccagcaccauccagacccucacgcuguuccugaccuccggcggggugcuccugagccuguacgucuccgccagccucuccuaccugcuguacagcgacauccuccugaaguucuccccgaccgagaucaccgcccccacgaugccccuggacugcgcgaacgccagcaacgugcaggccgugaaccgcuccgccaccaagggcgucacccuccugcugcccgagccggaguggaccuacccccggcucagcugccccggguccacguuccagaaggcccugcugaucagcccccaccgcuucggcgagaccaaggggaacuccgcgccgcucaucauccgggagcccuucaucgccugcggccccaaggagugcaagcacuucgcccugacccacuacgccgcgcagcccggcggguacuacaacggcacccgcggggaccggaacaagcugcgccaccucaucagcgugaagcugggcaagaucccgacgguggagaacuccaucuuccacauggccgccuggagcggguccgccugccacgacggcaaggaguggaccuacaucggcgucgacgggcccgacaacaacgcccugcucaagaucaaguacggcgaggcguacaccgacaccuaccacagcuacgccaacaacauccugcggacgcaggaguccgccugcaacugcaucgggggcaacugcuaccugaugaucaccgacggcagcgccagcgggguguccgagugccgcuuccucaagauccgggagggccgcaucaucaaggagaucuuccccaccgggcgggugaagcacaccgaggagugcacgugcggcuucgccagcaacaagaccaucgagugcgcgugccgcgacaacuccuacaccgccaagcggcccuucgucaagcugaacguggagaccgacacggccgagauccgccugaugugcaccgagaccuaccucgacaccccgcggcccgacgacgggagcaucacgggccccugcgaguccaacggcgagaaggggagcggcgggaucaagggcggguucgugcaccagcgcauggccuccaagaucggccggugguacagccgcaccauguccaagaccaagcggaugggcauggggcuguacgucaaguacgacggcgaccccugggccgacagcgacgcgcuggcccucuccggggugauggugagcauggaggagccgggcugguacuccuucggguucgagaucaaggacaagaagugcgacauccccugcaucggcaucgagaugguccacgacggcgggaaggagaccuggcacagcgccgccacggccaucuacugccugaugggcuccgggcagcugcucugggacaccgugaccggcguggacauggcgcuguga

SEQ ID NO: 92650 - RNA, 1401 nt, Artificial Sequence
  derived and/or modified CDS sequence (opt1) from neuraminidase__InfluenzaB__ABL76632
augcugcccagcaccauccagacccucacgcuguuccugaccuccggcggggugcuccugagccuguacgucuccgccagccucuccuaccugcuguacagcgacauccuccugaaguucucccagaccgagaucaccgccccgaucaugccccuggacugcgcgaacgccagcaacgugcaggccgugaaccgcuccgccacgaagggcgucacccuccugcugcccgagcccgaguggaccuacccgcggcucagcugccccggguccaccuuccagaaggcccugcugaucagcccccaccgcuucggcgagacgaaggggaacuccgcgccccucaucauccgggagccguucaucgccugcggccccaccgagugcaagcacuucgcccugacccacuacgccgcgcagcccggcggguacuacaacggcacccgcgaggaccggaacaagaugcgccaccugaucagcgugaagcucgggaagauccccacgguggagaacuccaucuuccacauggccgccuggagcggcuccgccugccacgacgggaaggaguggaccuacaucggcgucgacggcccggacagcaacgcccugcugaagaucaaguacggggaggcguacaccgacaccuaccacuccuacgccaagaacauccuccggacgcaggagagcgccugcaacugcaucggcggggacugcuaccugaugaucaccgacggccccgccagcggcaucuccgagugccgcuuccugaagauccgggaggggcgcaucaucaaggagaucuuccccaccggccgggugaagcacaccgaggagugcacgugcggguucgccagcaacaagaccaucgagugcgcgugccgcgacaacuccuacaccgccaagcggcccuucgugaagcucaacgucgagaccgacacggccgagauccgccugaugugcaccgagaccuaccuggacaccccgcggcccaacgacggcagcaucacggggcccugcgaguccgacggcgacaagggcagcgggggcaucaagggcggguucgugcaccagcgcauggccuccaagaucgggcggugguacagccgcaccauguccaagaccaagcggaugggcaugggccucuacgugaaguacgacggggaccccuggaccgacagcgaggcccuggcgcuguccggcgucauggugagcauggaggagccggggugguacuccuucggcuucgagaucaaggacaagaagugcgacgugcccugcaucgggaucgagaugguccacgacggcggcaagacgaccuggcacagcgccgccaccgccguguacugccucaugggguccggccagcugcugugggacaccgugacgggggucgacauggcccucuga

SEQ ID NO: 92651 - RNA, 1401 nt, Artificial Sequence
  derived and/or modified CDS sequence (opt1) from neuraminidase__InfluenzaB__ABL76643
augcugcccagcaccauccagacccucacgcuguuccugaccuccggcggggugcuccugagccuguacgucuccgccagccucuccuaccugcuguacagcgacauccuccugaaguucucccagaccgagaucaccgccccgaucaugccccuggacugcgcgaacgccagcaacgugcaggccgugaaccgcuccgccacgaagggcgucacccuccugcugcccgagcccgaguggaccuacccgcggcucagcugccccggguccaccuuccagaaggcccugcugaucagcccccaccgcuucggcgagacgaaggggaacuccgcgccccucaucauccgggagccguucaucgccugcggccccaccgagugcaagcacuucgcccugacccacuacgccgcgcagcccggcggguacuacaacggcacccgcgaggaccggaacaagcugcgccaccucaucagcgugaagcuggggaagauccccacgguggagaacuccaucuuccacauggccgccuggagcggcuccgccugccacgacgggaaggaguggaccuacaucggcgucgacggcccggacagcaacgcccugcucaagaucaaguacggggaggcguacaccgacaccuaccacuccuacgccaagaacauccugcggacgcaggagagcgccugcaacugcaucggcggggacugcuaccugaugaucaccgacggccccgccagcggcaucuccgagugccgcuuccucaagauccgggaggggcgcaucaucaaggagaucuuccccaccggccgggugaagcacaccgaggagugcacgugcggguucgccagcaacaagaccaucgagugcgcgugccgcgacaacuccuacaccgccaagcggcccuucgugaagcugaacgucgagaccgacacggccgagauccgccugaugugcaccgagaccuaccucgacaccccgcggcccaacgacggcagcaucacggggcccugcgaguccgacggcgacaagggcagcgggggcaucaagggcggguucgugcaccagcgcauggccuccaagaucgggcggugguacagccgcaccauguccaagaccaagcggaugggcaugggccuguacgugaaguacgacggggaccccuggaccgacagcgaggcccuggcgcucuccggcgucauggugagcauggaggagccggggugguacuccuucggcuucgagaucaaggacaagaagugcgacgugcccugcaucgggaucgagaugguccacgacggcggcaagacgaccuggcacagcgccgccaccgccaucuacugccugaugggguccggccagcugcucugggacaccgugacggggguggacauggcccuguga

SEQ ID NO: 92652 - RNA, 1401 nt, Artificial Sequence
  derived and/or modified CDS sequence (opt1) from neuraminidase__InfluenzaB__ABL76654
augcugcccagcaccauccagacccucacgcuguuccugaccuccggcggggugcuccugagccuguacgucuccgccagccucuccuaccugcuguacagcgacauccuccugaaguucucccagaccgagaucaccgccccgaucaugccccuggacugcgcgaacgccagcaacgugcaggccgugaaccgcuccacgaccaagggcgucacccuccugcugcccgagcccgaguggaccuacccgcggcucagcugccccggguccacguuccagaaggcccugcugaucagcccccaccgcuucggcgagaccaaggggaacuccgcgccccucaucauccgggagccguucaucgccugcggccccaccgagugcaagcacuucgcccugacccacuacgccgcccagcccggcggguacuacaacggcacgcgcgaggaccggaacaagcugcgccaccucaucagcgugaagcuggggaagauccccaccguggagaacuccaucuuccacauggcggccuggagcggcuccgccugccacgacgggaaggaguggaccuacaucggcgucgacggcccggacagcaacgcccugcucaagaucaaguacggggaggccuacaccgacacguaccacuccuacgcgaagaacauccugcggacccaggagagcgccugcaacugcaucggcggggacugcuaccugaugaucaccgacggccccgccagcggcaucuccgagugccgcuuccucaagauccgggaggggcgcaucaucaaggagaucuuccccaccggccgggugaagcacacggaggagugcacgugcggguucgccagcaacaagaccaucgagugcgccugccgcgacaacuccuacaccgcgaagcggcccuucgugaagcugaacgucgagaccgacaccgccgagauccgccugaugugcaccgagaccuaccucgacacgccgcggcccaacgacggcagcaucaccgggcccugcgaguccgacggcgacaagggcagcgggggcaucaagggcggguucgugcaccagcgcauggccuccaagaucgggcggugguacagccgcaccauguccaagaccaagcggaugggcaugggccuguacgugaaguacgacggggaccccuggacggacagcgaggcccuggcccucuccggcgucauggugagcauggaggagccggggugguacuccuucggcuucgagaucaaggacaagaagugcgacgugcccugcaucgggaucgagaugguccacgacggcggcaagaccaccuggcacagcgcggccaccgccaucuacugccugaugggguccggccagcugcucugggacacggugaccgggguggacauggcccuguga

SEQ ID NO: 92653 - RNA, 1401 nt, Artificial Sequence
  derived and/or modified CDS sequence (opt1) from neuraminidase__InfluenzaB__ABL76665
augcugcccagcaccauccagacccucacgcuguuccugaccuccggcggggugcuccugagccuguacgucuccgccagccucuccuaccugcuguacagcgacauccuccugaaguucucccagaccgagaucaccgccccgaucaugccccuggacugcgcgaacgccagcaacgugcaggccgugaaccgcuccgccacgaagggcgucacccuccugcugcccgagcccgaguggaccuacccgcggcucagcugccccggguccaccuuccagaaggcccugcugaucagcccccaccgcuucggcgagacgaaggggaacuccgcgccccucaucauccgggagccguucaucgccugcggccccaccgagugcaagcacuucgcccugacccacuacgccgcgcagcccggcggguacuacaacggcacccgcgaggaccggaacaagcugcgccaccucaucagcgugaagcuggggaagauccccacgguggagaacuccaucuuccacauggccgccuggagcggcuccgccugccacgacgggaaggaguggaccuacaucggcgucgacggcccggacagcaacgcccugcucaagaucaaguacggggaggcguacaccgacaccuaccacuccuacgccaagaacauccugcggacgcaggagagcgccugcaacugcaucggcggggacugcuaccugaugaucaccgacggccccgccagcggcaucuccgagugccgcuuccucaagauccgggaggggcgcaucaucaaggagaucuuccccaccggccgggugaagcacaccgaggagugcacgugcggguucgccagcaacaagaccaucgagugcgcgugccgcgacaacuccuacaccgccaagcggcccuucgugaagcugaacgucgagaccgacacggccgagauccgccugaugugcaccgagaccuaccucgacaccccgcggcccaacgacggcagcaucacggggcccugcgaguucgacggcgacaagggcuccgggggcaucaagggcggguucgugcaccagcgcauggccagcaagaucgggcggugguacucccgcaccaugagcaagaccaagcggaugggcaugggccuguacgugaaguacgacggggaccccuggaccgacuccgaggcccuggcgcucagcggcgucaugguguccauggaggagccggggugguacagcuucggcuucgagaucaaggacaagaagugcgacgugcccugcaucgggaucgagaugguccacgacggcggcaagacgaccuggcacuccgccgccaccgccaucuacugccugauggggagcggccagcugcucugggacaccgugacggggguggacauggcccuguga

SEQ ID NO: 92654 - RNA, 1401 nt, Artificial Sequence
  derived and/or modified CDS sequence (opt1) from neuraminidase__InfluenzaB__ABL76676
augcugcccagcaccauccagacccucacgcuguuccugaccuccggcggggugcuccugagccuguacgucuccgccagccucuccuaccugcuguacagcgacauccuccugaaguucucccagaccggcaucaccgccccgaucaugccccuggacugcgcgaacgccagcaacgugcaggccgugaaccgcuccgccacgaagggggucacccuccugcugcccgagcccgaguggaccuacccgcggcucagcugccccggcuccaccuuccagaaggcccugcugaucagcccccaccgcuucggggagacgaagggcaacuccgcgccccucaucauccgggagccguucaucgccugcggccccaaggagugcaagcacuucgcccugacccacuacgccgcgcagcccgggggcuacuacaacgggacccgcgaggaccggaacaagcugcgccaccucaucagcgugaagcugggcaagauccccaccguggagaacuccaucuuccacauggccgccuggagcggguccgccugccacgacggccgggaguggacguacaucggcgucgacgggccggacagcaacgcccugcucaagaucaaguacggcgaggcguacaccgacaccuaccacuccuacgccaagaacauccugcgcacccaggagagcgccugcaacugcaucgggggcgacugcuaccugaugaucacggacggccccgccagcgggaucuccgagugccgguuccucaagauccgcgagggccggaucaucaaggagaucuuccccaccgggcgcgugaagcacaccgaggagugcacgugcggcuucgccagcaacaagaccaucgagugcgcgugccgggacaacuccuacaccgccaagcgccccuucgugaagcugaacgucgagaccgacaccgccgagauccggcugaugugcacggagaccuaccucgacaccccgcgccccaacgacgggagcaucaccggccccugcgaguccaacggcgacaaggggagcggcgggaucaagggcggguucgugcaccagcggauggccuccaagaucggccgcugguacagccggacgauguccaagaccaagcgcaugggcauggggcuguacgugaaguacgacggcgaccccuggaccgacagcgaggcccuggcgcucuccggggucauggugagcauggaggagccgggcugguacuccuucggguucgagaucaaggacaagaagugcgacgugcccugcaucggcaucgagaugguccacgacggcgggaagaccacguggcacagcgccgccaccgccaucuacugccugaugggcuccgggcagcugcucugggacaccgugaccggcguggacauggcccuguga

SEQ ID NO: 92655 - RNA, 1401 nt, Artificial Sequence
  derived and/or modified CDS sequence (opt1) from neuraminidase__InfluenzaB__ABL76687
augcugcccagcaccauccagacccucacgcuguuccugaccuccggcggggugcuccugagccuguacgucuccgccagccucuccuaccugcuguacagcgacauccuccugaaguucucccagaccgagaucaccgccccgaucaugccccuggacugcgcgaacgccagcaacgugcaggccgugaaccgcuccgccacgaagggcgucacccuccugcugcccgagcccgaguggaccuacccgcggcucagcugccccggguccaccuuccagaaggcccugcugaucagcccccaccgcuucggcgagacgaaggggaacuccgcgccccucaucauccgggagccguucaucgccugcggccccaccgagugcaagcacuucgcccugacccacuacgccgcgcagcccggcggguacuacaacggcacccgcgaggaccggaacaagcugcgccaccucaucagcgugaagcuggggaagauccccacgguggagaacuccaucuuccacauggccgccuggagcggcuccgccugccacgacgggaaggaguggaccuacaucggcgucgacggcccggacagcaacgcccugcucaagaucaaguacggggaggcguacaccgacaccuaccacuccuacgccaagaacauccugcggacgcaggagagcgccugcaacugcaucggcggggacugcuaccugaugaucaccgacggccccgccagcggcaucuccgagugccgcuuccucaagauccgggaggggcgcaucaucaaggagaucuuccccaccggccgggugaagcacaccgaggagugcacgugcggguucgccagcaacaagaccaucgagugcgcgugccgcgacaacuccuacaccgccaagcggcccuucgugaagcugaacgucgagaccgacacggccgagauccgccugaugugcaccgagaccuaccucgacaccccgcggcccaacgacggcagcaucacggggcccugcgaguucgacggcgacaagggcuccgggggcaucaagggcggguucgugcaccagcgcauggccagcaagaucgggcggugguacucccgcaccaugagcaagaccaagcggaugggcaugggccuguacgugaaguacgacggggaccccuggaccgacuccgaggcccuggcgcucagcggcgucauggugccgauggaggagcccgggugguacuccuucggcuucgagaucaaggacaagaagugcgacgugcccugcaucgggaucgagaugguccacgacggcggcaagacgaccuggcacagcgccgccaccgccaucuacugccugaugggguccggccagcugcucugggacaccgugacggggguggacauggcccuguga

SEQ ID NO: 92656 - RNA, 1401 nt, Artificial Sequence
  derived and/or modified CDS sequence (opt1) from neuraminidase__InfluenzaB__ABL76698
augcugcccagcaccauccagacccucacgcuguuccugaccuccggcggggugcuccugagccuguacgucuccgccagccucuccuaccugcuguacagcgacauccuccugaaguucuccccgaccgagaucaccgcccccacgaugccccuggacugcgcgaacgccagcaacgugcaggccgugaaccgcuccgccaccaagggcaugacccuccugcugcccgagccggaguggaccuacccccggcucagcugccccggguccacguuccagaaggcccugcugaucagcccccaccgcuucggcgagacccgggggaacuccgcgccgcucaccauccgcgagcccuucaucgccugcggccccaaggagugcaagcacuucgcccugacccacuacgccgcgcagcccggcggguacuacaacggcacgcgggaggaccgcaacaagcugcggcaccucaucagcgucaagcuggggaagaucccgaccguggagaacuccaucuuccacauggccgccuggagcggcuccgccugccacgacgggcgcgaguggaccuacaucggcguggacggccccgacagcaacgcccugaucaagaucaaguacggggaggcguacaccgacacguaccacuccuacgccaacaacauccuccggacccaggagagcgccugcaacugcaucggcggggacugcuaccugaugaucaccgacggcagcgccuccggcaucagcaagugccgcuuccugaagauccgggaggggcgcaucaucaaggagaucuuccccaccggccgggucgagcacacggaggagugcacgugcggguucgccuccaacaagaccaucgagugcgcgugccgcgacaacagcuacaccgccaagcggcccuucgugaagcucaacguggagaccgacaccgccgagauccgccugaugugcaccgagaccuaccuggacacgccgcggcccgacgacggcuccaucaccgggcccugcgagagcaacggcgacaagggccgcgggggcaucaagggcggguucguccaccagcggauggccuccaagaucgggcgcugguacagccggaccauguccaagaccgagcgcaugggcauggagcucuacgugaaguacgacggcgaccccuggacggacagcgaggcccuggcgccguccggggugauggucagcauggaggagcccggcugguacuccuucggguucgagaucaaggacaagaagugcgacgugcccugcaucggcaucgagauggugcacgacgggggcaagaagaccuggcacagcgccgccaccgccaucuacugccugaugggcuccgggcagcuccugugggacaccgucacgggcguggacauggcccuguga

SEQ ID NO: 92657 - RNA, 1401 nt, Artificial Sequence
  derived and/or modified CDS sequence (opt1) from neuraminidase__InfluenzaB__ABL76720
augcugcccagcaccauccagacccucacgcuguuccugaccuccggcggggugcuccugagccuguacgucuccgccagccucuccuaccugcuguacagcgacauccuccugaaguucuccccgaccgagaucaccgcccccacgaugccccuggacugcgcgaacgccagcaacgugcaggccgugaaccgcuccgccaccaagggcgucacccuccugcugcccgagccggaguggaccuacccccggcucagcugccccggguccacguuccagaaggcccugcugaucagcccccaccgcuucggcgagaccaaggggaacuccgcgccgcucaucauccgggagcccuucaucgccugcggccccaacgagugcaagcacuucgcccugacccacuacgccgcgcagcccggcggguacuacaacggcacccgcggggaccggaacaagcugcgccaccucaucagcgugaagcugggcaagaucccgacgguggagaacuccaucuuccacauggccgccuggagcggguccgccugccacgacggcaaggaguggaccuacaucggcgucgacgggcccgacaacaacgcccugcucaagaucaaguacggcgaggcguacaccgacaccuaccacagcuacgccaacaagauccugcggacgcaggaguccgccugcaacugcaucgggggcaacugcuaccugaugaucaccgacggcagcgccagcgggguguccgagugccgcuuccucaagauccgggagggccgcaucaucaaggagaucuuccccaccgggcgggugaagcacaccgaggagugcacgugcggcuucgccagcaacaagaccaucgagugcgcgugccgcgacaacuccuacaccgccaagcggcccuucgucaagcugaacguggagaccgacacggccgagauccgccugaugugcaccgacaccuaccucgacaccccgcggcccgacgacgggagcaucacgggccccugcgaguccaacggcgacaaggggagcggcgggaucaagggcggguucgugcaccagcgcauggccuccaagaucggccggugguacagccgcaccauguccaagaccgagcggaugggcauggggcuguacgucaaguacgacggcgaccccugggccgacagcgacgcgcuggccuucuccggggugauggugagcaugaaggagccgggcugguacuccuucggguucgagaucaaggacaagaagugcgacguccccugcaucggcaucgagauggugcacgacggcgggaaggagaccuggcgcagcgccgccacggccaucuacugccucaugggcuccgggcagcugcugugggacaccgugaccggcgucgacauggcgcucuga

SEQ ID NO: 92658 - RNA, 1401 nt, Artificial Sequence
  derived and/or modified CDS sequence (opt1) from neuraminidase__InfluenzaB__ABL76731
augcugcccagcaccauccagacccucacgcuguuccugaccuccggcggggugcuccugagccuguacgucuccgccagccucuccuaccugcuguacagcgacauccuccugaaguucuccccgaccgagaucaccgcccccacgaugccccuggacugcgcgaacgccagcaacgugcacgccgugaaccgcuccgccaccaagggcgucacccuccugcugcccgagccggaguggaccuacccccggcucagcugccccggguccacguuccagaaggcccugcugaucagcccccaccgcuucggcgagaccaaggggaacuccgcgccgcucaucauccgggagcccuucaucgccugcggccccaacgagugcaagcacuucgccaucacccacuacgccgcgcagcccggcggguacuacaacggcacccgcggggaccggaacaagcugcgccaccugaucagcgugaagcucggcaagaucccgacgguggagaacuccaucuuccacauggccgccuggagcggguccgccugccacgacggcaaggaguggaccuacaucggcgucgacgggcccgacaacaacgcccugcugaagaucaaguacggcgaggcguacaccgacaccuaccacagcuacgccaacaacauccuccggacgcaggaguccgccugcaacugcaucgggggcaacugcuaccugaugaucaccgacggcagcgccagcgggguguccgagugccgcuuccugaagauccgggagggccgcaucaucaaggagaucuuccccaccgggcgggugaagcacaccgaggagugcacgugcggcuucgccagcaacaagaccaucgagugcgcgugccgcgacaacuccuacaccgccaagcggcccuucgucaagcucaacguggagaccgacacggccgagauccgccugaugugcaccgacaccuaccuggacaccccgcggcccgacgacgggagcaucacgggccccugcgaguccaacggcgacaaggggagcggcgggaucaagggcggguucgugcaccagcgcauggccuccaagaucggccggugguacagccgcaccauguccaagaccgagcggaugggcauggggcucuacgucaaguacgacggcgaccccugggccgacagcgacgcgcuggccuucuccggggugauggugagcaugaaggagccgggcugguacuccuucggguucgagaucaaggacaagaagugcgacguccccugcaucggcaucgagauggugcacgacggcgggaaggagaccuggcacagcgccgccacggccaucuacugccugaugggcuccgggcagcuccugugggacaccgugaccggcgucgacauggcgcuguga

SEQ ID NO: 92659 - RNA, 1401 nt, Artificial Sequence
  derived and/or modified CDS sequence (opt1) from neuraminidase__InfluenzaB__ABL76742
augcugcccagcaccauccagacccucacgcuguuccugaccuccggcggggugcuccugagccuguacgucuccgccagccucuccuaccugcuguacagcgacauccuccugaaguucuccccgaccgagaucaccgcccccacgaugccccuggacugcgcgaacgccagcaacgugcaggccgugaaccgcuccgccaccaagggcgucacccuccugcugcccgagccggaguggaccuacccccggcucagcugccccggguccacguuccagaaggcccugcugaucagcccccaccgcuucggcgagaccaaggggaacuccgcgccgcucaucauccgggagcccuucaucgccugcggccccaacgagugcaagcacuucgcccugacccacuacgccgcgcagcccggcggguacuacaacggcacccgcggggaccggaacaagcugcgccaccucaucagcgugaagcugggcaagaucccgacgguggagaacuccaucuuccacauggccgccuggagcggguccgccugccacgacggcaaggaguggaccuacaucggcgucgacgggcccgacaacaacgcccugcucaagaucaaguacggcgaggcguacaccgacaccuaccacagcuacgccaacaagauccugcggacgcaggaguccgccugcaacugcaucgggggcaacugcuaccugaugaucaccgacggcagcgccagcgggguguccgagugccgcuuccucaagauccgggagggccgcaucaucaaggagaucuuccccaccgggcgggugaagcacaccgaggagugcacgugcggcuucgccagcaacaagaccaucgagugcgcgugccgcgacaacuccuacaccgccaagcggcccuucgucaagcugaacguggagaccgacacggccgagauccgccugaugugcaccgacaccuaccucgacaccccgcggcccgacgacgggagcaucacgggccccugcgaguccaacggcgacaaggggagcggcgggaucaagggcggguucgugcaccagcgcauggccuccaagaucggccggugguacagccgcaccauguccaagaccgagcggaugggcauggggcuguacgucaaguacgacggcgaccccugggccgacagcgacgcgcuggccuucuccggggugauggugagcaugaaggagccgggcugguacuccuucggguucgagaucaaggacaagaagugcgacguccccugcaucggcaucgagauggugcacgacggcgggaaggagaccuggcacagcgccgccacggccaucuacugccucaugggcuccgggcagcugcugugggacaccgugaccggcgucgacauggcgcucuga

SEQ ID NO: 92660 - RNA, 1401 nt, Artificial Sequence
  derived and/or modified CDS sequence (opt1) from neuraminidase__InfluenzaB__ABL76753
augcugcccagcaccauccagacccucacgcuguuccugaccuccggcggggugcuccugagccuguacgucuccgccagccucuccuaccugcuguacagcgacauccuccugaaguucucccagaccgagaucaccgccccgaucaugccccuggacugcgcgaacgccagcaacgugcaggccgugaaccgcuccgccacgaagggcgucacccuccugcugcccgagcccgaguggaccuacccgcggcucagcugccccggguccaccuuccagaaggcccugcugaucagcccccaccgcuucggcgagacgaccgggaacuccgcgccccucaucauccgggagccguucaucgccugcggccccaaggagugcaagcacuucgcccugacccacuacgccgcgcagcccggcggguacuacaacggcacccgcgaggaccggaacaagcugcgccaccucaucagcgugaagcuggggaagauccccacgguggagaacuccaucuuccacauggccgccuggagcggcuccgccugccacgacgggcgggaguggaccuacaucggcgucgacggcccggacaacaacgcccugcucaagaucaaguacggggaggcguacaccgacaccuaccacagcuacgccaagaacauccugcgcacgcaggaguccgccugcaacugcaucggcggggacugcuaccugaugaucaccgacggccccgccagcggcaucagcgagugccgguuccucaagauccgcgaggggcggaucaucaaggagaucuuccccaccggccgcgugaagcacaccgaggagugcacgugcggguucgccuccaacaagaccaucgagugcgcgugccgggacaacagcuacaccgccaagcgccccuucgugaagcugaacgucgagaccgacacggccgagauccggcugaugugcaccgagaccuaccucgacaccccgcgccccaacgacggcuccaucacggggcccugcgagagcaacggcgacaagggcuccgggggcaucaagggcggguucgugcaccagcggauggccagcaagaucgggcgcugguacucccggaccaugagcaagaccaagcgcaugggcaugggccuguacgugaaguacgacggggaccccuggaccgacuccgaggcccuggcgcucagcggcgucaugguguccauggaggagccggggugguacagcuucggcuucgagaucaaggacaagaagugcgacgugcccugcaucgggaucgagaugguccacgacggcggcaagacgaccuggcacuccgccgccaccgccaucuacugccugauggggagcggccagcugcucugggacaccgugacggggguggacauggcccuguga

SEQ ID NO: 92661 - RNA, 1401 nt, Artificial Sequence; identical to SEQ ID NO: 92630
  derived and/or modified CDS sequence (opt1) from neuraminidase__InfluenzaB__ABL76764

SEQ ID NO: 92662 - RNA, 1401 nt, Artificial Sequence; identical to SEQ ID NO: 92630
  derived and/or modified CDS sequence (opt1) from neuraminidase__InfluenzaB__ABL76775

SEQ ID NO: 92663 - RNA, 1401 nt, Artificial Sequence
  derived and/or modified CDS sequence (opt1) from neuraminidase__InfluenzaB__ABL76797
augcugcccagcaccauccagacccucacgcuguuccugaccuccggcggggugcuccugagccuguacgucuccgccagccucuccuaccugcuguacagcgacauccuccugaaguucuccccgaccgagaucaccgcccccacgaugccccuggacugcgcgaacgccagcaacgugcaggccgugaaccgcuccgccaccaagggcgucacccuccugcugcccgagccggaguggaccuacccccggcucagcugccccggguccacguuccagaaggcccugcugaucagcccccaccgcuucggcgagaccaaggggaacuccgcgccgcucaucauccgggagcccuucaucgccugcggccccaaggagugcaagcacuucgcccugacccacuacgccgcgcagcccggcggguacuacaacggcacccgcgaggaccggaacaagcugcgccaccucaucagcgugaagcuggggaagaucccgacgguggagaacuccaucuuccacauggccgccuggagcggcuccgccugccacgacgggaaggaguggaccuacaucggcgucgacggccccgacagcaacgcccugcucaagaucaaguacggggaggcguacaccgacaccuaccacuccuacgccaacaacauccugcggacgcaggagagcgccugcaacugcaucggcgggaacugcuaccugaugaucaccgacggcagcgccuccggcaucagcgagugccgcuuccucaagauccgggaggggcgcaucaucaaggagaucuuccccaccggccggguggagcacaccgaggagugcacgugcggguucgccuccaacaagaccaucgagugcgcgugccgcgacaacagcuacaccgccaagcggcccuucgugaagcugaacgucgagaccgacacggccgagauccgccugaugugcaccgagaccuaccucgacaccccgcggcccgacgacggcuccaucacggggcccugcgagagcaacggcgacaagggcuccgggggcaucaagggcggguucgugcaccagcgcauggccagcaagaucgggcggugguacucccgcaccaugagcaagaccaagcggaugggcaugggccuguacgugaaguacgacggggaccccuggaccgacuccgacgcccuggcgcucagcggcgucaugguguccauggaggagccggggugguacagcuucggcuucgagaucaaggacaagaagugcgacgugcccugcaucgggaucgagaugguccacgacggcggcaaggagacguggcacuccgccgccaccgccaucuacugccugauggggagcggccagcugcucugggacaccgugaccggggugaacauggcccuguga

SEQ ID NO: 92664 - RNA, 1401 nt, Artificial Sequence
  derived and/or modified CDS sequence (opt1) from neuraminidase__InfluenzaB__ABL76819
augcugcccagcaccauccagacccucacgcuguuccugaccuccggcggggugcuccugagccuguacgucuccgccagccucuccuaccugcuguacagcgacauccuccugaaguucuccccgaccgagaucaccgcccccacgaugccccuggacugcgcgaacgccagcaacgugcaggccgugaaccgcuccgccaccaagggcgucacccuccugcugcccgagccggaguggaccuacccccggcucagcugccccggguccacguuccagaaggcccugcugaucagcccccaccgcuucggcgagaccaaggggaacuccgcgccgcucaucauccgggagcccuucaucgccugcggccccaaggagugcaagcacuucgcccugacccacuacgccgcgcagcccggcggguacuacaacggcacccgcgaggaccggaacaagcugcgccaccucaucagcgugaagcuggggaagaucccgacgguggagaacuccaucuuccacauggccgccuggagcggcuccgccugccacgacgggaaggaguggaccuacaucggcgucgacggccccgacagcaacgcccugcucaagaucaaguacggggaggcguacaccgacaccuaccacuccuacgccaacaacauccugcggacgcaggagagcgccugcaacugcaucggcgggaacugcuaccugaugaucaccgacggcagcgccuccggcaucagcgagugccgcuuccucaagauccgggaggggcgcaucaucaaggagaucuuccccaccggccgggugaagcacaccgaggagugcacgugcggguucgccuccaacaagaccaucgagugcgcgugccgcgacaacagcuacaccgccaagcggcccuucgugaagcugaacgucgagaccgacacggccgagauccgccugaugugcaccgagaccuaccucgacaccccgcggcccgacgacggcuccaucacggggcccugcgagagcaacggcgacaagggcuccgggggcaucaagggcggguucgugcaccagcgcauggccagcaagaucgggcggugguacucccgcaccaugagcaagaccaagcggaugggcaugggccuguacgugaaguacgacggggaccccuggaccgacuccgacgcccuggcgcucagcggcgucaugguguccauggaggagccggggugguacagcuucggcuucgagaucaaggacaagaagugcgacgugcccugcaucgggaucgagaugguccacgacggcggcaaggagacguggcacuccgccgccaccgccaucuacugccugauggggagcggccagcugcucugggacaccgugaccgggguggacauggcccuguga

SEQ ID NO: 92665 - RNA, 1401 nt, Artificial Sequence
  derived and/or modified CDS sequence (opt1) from neuraminidase__InfluenzaB__ABL76830
augcugcccagcaccauccagacccucacgcuguuccugaccuccggcggggugcuccugagccuguacgucuccgccagccucuccuaccugcuguacagcgacauccuccugaaguucuccccgaccaagaucaccgcccccacgaugccccuggacugcgcgaacgccagcaacgugcaggccgugaaccgcuccgccaccaagggcgucacccuccugcugcccgagccggaguggaccuacccccggcucagcugccccggguccacguuccagaaggcccugcugaucagcccccaccgcuucggcgagaccaaggggaacuccgcgccgcucaucauccgggagcccuucaucgccugcggccccaaggagugcaagcacuucgcccugacccacuacgccgcgcagcccggcggguacuacaacggcacccgcggggaccggaacaagcugcgccaccucaucagcgugaagcugggcaagaucccgacgguggagaacuccaucuuccacauggccgccuggagcggguccgccugccacgacggcaaggaguggaccuacaucggcgucgacgggcccgacaacaacgcccugcucaagaucaaguacggcgaggcguacaccgacaccuaccacagcuacgccaacaacauccugcggacgcaggaguccgccugcaacugcaucgggggcaacugcuaccugaugaucaccgacggcagcgccagcgggguguccgagugccgcuuccucaagauccgggagggccgcaucaucaaggagaucuuccccaccgggcgggugaagcacaccgaggagugcacgugcggcuucgccagcaacaagaccaucgagugcgcgugccgcgacaacuccuacaccgccaagcggcccuucgucaagcugaacguggagaccgacacggccgagauccgccugaugugcaccaagaccuaccucgacaccccgcggcccgacgacgggagcaucacgggccccugcgaguccaacggcgacaaggggagcggcgggaucaagggcggguucgugcaccagcgcauggccuccaagaucggccggugguacagccgcaccauguccaagaccaagcggaugggcauggggcuguacgucaaguacgacggcgaccccugggccgacagcgacgcgcuggcccucuccggggugauggugagcauggaggagccgggcugguacuccuucggguucgagaucaaggacaagaagugcgacguccccugcaucggcaucgagauggugcacgacggcgggaaggagaccuggcacagcgccgccacggccaucuacugccugaugggcuccgggcagcugcucugggacaccgugaccggcgucgacauggcgcuguga

SEQ ID NO: 92666 - RNA, 1401 nt, Artificial Sequence
  derived and/or modified CDS sequence (opt1) from neuraminidase__InfluenzaB__ABL76852
augcugcccagcaccauccagacccucacgcuguuccugaccuccggcggggugcuccugagccuguacgucuccgccagccucuccuaccugcuguacagcgacauccuccugaaguucuccccgaccgagaucaccgcccccacgaugccccuggacugcgcgaacgccagcaacgugcaggccgugaaccgcuccgccaccaagggcgucacccuccugcugcccgagccggaguggaccuacccccggcucagcugccccggguccacguuccagaaggcccugcugaucagcccccaccgcuucggcgagaccaaggggaacuccgcgccgcucaucauccgggagcccuucaucgccugcggccccaaggagugcaagcacuucgcccugacccacuacgccgcgcagcccggcggguacuacaacggcacccgcgaggaccggaacaagcugcgccaccucaucagcgugaagcuggggaagaucccgacgguggagaacuccaucuuccacauggccgccuggagcggcuccgccugccacgacgggaaggaguggaccuacaucggcgucgacggccccgacagcaacgcccugcucaagaucaaguacggggaggcguacaccgacaccuaccacuccuacgccaacaacauccugcggacgcaggagagcgccugcaacugcaucggcgggaacugcuaccugaugaucaccgacggcagcgccuccggcaucagcgagugccgcuuccucaagauccgggaggggcgcaucaucaaggagaucuuccccaccggccgggugaagcacaccgaggagugcacgugcggguucgccuccaacaagaccaucgagugcgcgugccgcgacaacagcuacaccgccaagcggcccuucgugaagcugaacgucgagaccgacacggccgagauccgccugaugugcaccgagaccuaccucgacaccccgcggcccgacgacggcuccaucacggggcccugcgagagcaacggcgacaagggcuccgggggcaucaagggcggguucgugcaccagcgcauggagagcaagaucgggcggugguacucccgcaccaugagcaagaccaagcggaugggcaugggccuguacgugaaguacgacggggaccccuggaccgacuccgacgcccuggcccucagcggcgucaugguguccaucgaggagccggggugguacagcuucggcuucgagaucaaggacaagaagugcgacgugcccugcaucgggaucgagaugguccacgacggcggcaaggagacguggcacuccgcggccaccgccaucuacugccugauggggagcggccagcugcucugggacaccgugaccgggguggacauggcccuguga

SEQ ID NO: 92667 - RNA, 1401 nt, Artificial Sequence
  derived and/or modified CDS sequence (opt1) from neuraminidase__InfluenzaB__ABL76863
augcugcccagcaccauccagacccucacgcuguuccugaccuccggcggggugcuccugagccuguacgucuccgccagccucuccuaccugcuguacagcgacauccuccugaaguucuccccgaccgagaucaccgcccccacgaugccccuggacugcgcgaacgccagcaacgugcaggccgugaaccgcuccgccaccaagggcgucacccuccugcugcccgagccggaguggaccuacccccggcucagcugccccggguccacguuccagaaggcccugcugaucagcccccaccgcuucggcgagaccaaggggaacuccgcgccgcucaucauccgggagcccuucaucgccugcggccccaaggagugcaagcacuucgcccugacccacuacgccgcgcagcccggcggguacuacaacggcacccgcgaggaccggaacaagcugcgccaccucaucagcgugaagcuggggaagaucccgacgguggagaacuccaucuuccacauggccgccuggagcggcuccgccugccacgacgggaaggaguggaccuacaucggcgucgacggccccgacagcaacgcccugcucaagaucaaguacggggaggcguacaccgacaccuaccacuccuacgccaacaacauccugcggacgcaggagagcgccugcaacugcaucggcgggaacugcuaccugaugaucaccgacggcagcgccuccggcaucagcgagugccgcuuccucaagauccgggaggggcgcaucaucaaggagaucuuccccaccggccgggugaagcacaccgaggagugcacgugcggguucgccuccaacaagaccaucgagugcgcgugccgcgacaacagcuacaccgccaagcggcccuucgugaagcugaacgucgagaccgacacggccgagauccgccugaugugcaccgagaccuaccucgacaccccgcggcccgacgacggcuccaucacggggcccugcgagagcaacggcgacaagggcuccgggggcaucaagggcggguucgugcaccagcgcauggccagcaagaucgggcggugguacucccgcaccaugagcaagaccaagcggaugggcaugggccuguacgugaaguacgacggggaccccuggaccgacuccgacgcccuggcgcucagcggcgucaugguguccauggaggagccggggugguacagcuucggcuucgagaucaaggacaagaagugcgacgugcccugcaucgggaucgagaugguccacgacggcggcaaggagacguggcacuccgccgccaccgccaucuacugccugauggggagcggccagcugcucugggacaccgugaccgggguggacauggccauguga

SEQ ID NO: 92668 - RNA, 1401 nt, Artificial Sequence
  derived and/or modified CDS sequence (opt1) from neuraminidase__InfluenzaB__ABL76874
augcugcccagcaccauccagacccucacgcuguuccugaccuccggcggggugcuccugagccuguacgucuccgccagccucuccuaccugcuguacagcgacauccuccugaaguucuccccgaccgagaucaccgcccccacgaugccccuggacugcgcgaacgccagcaacgugcaggccgugaacuccagcgccaccaagggcgucacccuccugcugcccgagccggaguggaccuacccccgccucuccugccccgggagcacguuccagaaggcccugcugaucagcccccaccgguucggcgagaccaaggggaacuccgcgccgcucaucauccgcgagcccuucaucgccugcggccccaaggagugcaagcacuucgcccugacccacuacgccgcgcagcccggcggguacuacaacggcacccgcggggaccggaacaagcugcggcaccucaucuccgugaagcugggcaagaucccgacgguggagaacagcaucuuccacauggccgccugguccgggagcgccugccacgacggcaaggaguggaccuacaucggcgucgacgggcccgacuccaacgcccugcucaagaucaaguacggcgaggcguacaccgacaccuaccacagcuacgccaacaacauccugcgcacgcaggagagcgccugcaacugcaucgggggcaacugcuaccugaugaucaccgacggcuccgccagcgggaucuccgagugccgguuccucaagauccgcgagggccggaucaucaaggagaucuuccccaccgggcgcgugaagcacaccgaggagugcacgugcggcuucgccagcaacaagaccaucgagugcgcgugccgggacaacuccuacaccgccaagcgccccuucgugaagcugaacgucgagaccgacacggccgagaucaagcugaugugcaccgagaccuaccucgacaccccgcggcccgacgacgggagcaucacgggccccugcgaguccaacggcgacaaggggagcggcgggaucaagggcggguucgugcaccagcgcauggccuccaagaucggccggugguacagccgcaccauguccaagaccaagcggaugggcauggggcuguacgugaaguacgacggcgaccccuggaccgacagcgacgcccuggcgcucuccggggucauggugagcauggaggagccgggcugguacuccuucggguucgagaucaaggacaagaagugcgacgugcccugcaucggcaucgagaugguccacgacggcgggaaggagacguggcacagcgccgccaccgccaucuacugccugaugggcuccgggcagcugcucugggacaccgugaccggcguggacauggcccuguga

SEQ ID NO: 92669 - RNA, 1401 nt, Artificial Sequence
  derived and/or modified CDS sequence (opt1) from neuraminidase__InfluenzaB__ABL76885
augcugcccagcaccauccagacccucacgcuguuccugaccuccggcggggugcuccugagccuguacgucuccgccagccucuccuaccugcuguacagcgacauccuccugaaguucucccagaccgagaucaccgccccgacgaugccccuggacuacgcgaacgccagcaacgugcaggccgugaaccgcuccgccaccaagggcgucacccuccugcugcccgagcccgaguggaccuacccgcggcucagcugccccggguccacguuccagaaggcccugcugaucagcccccaccgcuucggcgagaccaaggggaacuccgcgccccucaucauccgggagccguucaucgccugcggccccaaggagugcaagcacuucgcccugacccacuacgccgcgcagcccggcggguacuacaacggcacccgcgaggaccggaacaagcugcgccaccucaucagcgugaagcuggggaagauccccacgguggagaacuccaucuuccacauggccgccuggagcggcuccgccugccacgacgggcgggaguggaccuacaucggcgucgacggcccggacagcaacgcccugcucaagaucaaguacggggaggcguacaccgacaccuaccacuccuacgccaagaacauccugcgcacgcaggagagcgccugcaacugcaucggcggggacugcuaccugaugaucaccgacggcagcgccuccggcaucagcgagugccgguuccucaagauccgcgaggggcggaucaucaaggagaucuuccccaccggccgcgugaagcacaccgaggagugcacgugcggguucgccuccaacaagaccaucgagugcgcgugccgggacaacagcuacaccgccaagcgccccuucgugaagcugaacgucgagaccgacacggccgagauccggcugaugugcaccgagaccuaccucgacacgccccgcccggacgacggcuccaucaccgggcccugcgagagcaacggcgacaagggcuccgggggcaucaagggcggguucgugcaccagcggauggccagcaagaucgggcgcugguacucccggaccaugagcaagaccaagcgcaugggcaugggccuguacgugaaguacgacggggaccccuggaccgacuccgaggcccuggcgcucagcggcgucaugguguccauggaggagcccgggugguacagcuucggcuucgagaucaaggacaagaagugcgacgugccgugcaucgggaucgagaugguccacgacggcggcaagacgaccuggcacuccgccgccaccgccaucuacugccugauggggagcggccagcugcucugggacaccgugacggggguggacauggcccuguga

SEQ ID NO: 92670 - RNA, 1401 nt, Artificial Sequence
  derived and/or modified CDS sequence (opt1) from neuraminidase__InfluenzaB__ABL76896
augcugcccagcaccauccagacccucacgcuguuccugaccuccggcggggugcuccugagccuguacgucuccgccagccucuccuaccugcuguacagcgacauccuccugaaguucucccagaccgagaucaccgccccgacgaugccccuggacugcgcgaacgccagcaacgugcaggccgugaaccgcuccgccaccaagggcgucacccuccugcugcccgagcccgaguggauguacccgcggcucagcugccccggguccaccuuccagaaggcccugcugaucagcccccaccgcuucggcgagacgaaggggaacuccgcgccccucaucauccgggagccguucaucgccugcggccccaaggagugcaagcacuucgcccugacccacuacgccgcgcagcccggcggguacuacaacggcacccgcgaggaccggaacaagcugcgccaccucaucagcgugaagcuggggaagauccccaccguggagaacuccaucuuccacauggccgccuggagcggcuccgccugccacgacgggcgggaguggacguacaucggcgucgacggcccggacagcaacgcccugcucaagaucaaguacggggaggcguacaccgacaccuaccacuccuacgccaagaacauccugcgcacccaggagagcgccugcaacugcaucggcggggacugcuaccugaugaucacggacggcagcgccuccggcaucagcgagugccgguuccucaagauccgcgaggggcggaucaucaaggagaucuuccccaccggccgcgugaagcacaccgaggagugcacgugcggguucgccuccaacaagaccaucgagugcgcgugccgggacaacagcuacaccgccaagcgccccuucgugaagcugaacgucgagaccgacaccgccgagauccggcugaugugcacggagaccuaccucgacacgccccgcccggacgacggcuccaucaccgggcccugcgagagcaacggcgacaagggcuccgggggcaucaagggcggguucgugcaccagcggauggccagcaagaucgggcgcugguacucccggaccaugagcaagaccaagcgcaugggcaugggccuguacgugaaguacgacggggaccccuggaccgacuccgaggcccuggcgcucagcggcgucaugguguccauggaggagcccgggugguacagcuucggcuucgagaucaaggacaagaagugcgacgugccgugcaucgggaucgagaugguccacgacggcggcaagaccacguggcacuccgccgccaccgccaucuacugccugauggggagcggccagcugcucugggacgccgugaccgggguggacauggcgcuguga

SEQ ID NO: 92671 - RNA, 1401 nt, Artificial Sequence
  derived and/or modified CDS sequence (opt1) from neuraminidase__InfluenzaB__ABL76918
augcugcccagcaccauccagacccucacgcuguuccugaccuccggcggggugcuccugagccuguacgucuccgccagccucuccuaccugcuguacagcgacauccuccugaaguucuccccgaccgagaucaccgcccccacgaugccccuggacugcgcgaacgccagcaacgugcaggccgugaaccgcuccgccaccaagggcgucacccuccugcugcccgagccggaguggaccuacccccggcucagcugccccggguccacguuccagaaggcccugcugaucagcccccaccgcuucggcgagaccaaggggaacuccgcgccgcucaucauccgggagcccuucaucgccugcggccccaacgagugcaagcacuucgcccugacccacuacgccgcgcagcccggcggguacuacaacggcacccgcggggaccggaacaagcugcgccaccucaucagcgugaagcugggcaagaucccgacgguggagaacuccaucuuccacauggccgccuggagcggguccgccugccacgacggcaaggaguggaccuacaucggcgucgacgggcccgacaacaacgcccugcucaagaucaaguacggcgaggcguacaccgacaccuaccacagcuacgccaacaacauccugcggacgcaggaguccgccugcaacugcaucgggggcaacugcuaccugaugaucaccgacggcagcgccagcgggguguccgagugccgcuuccucaagauccgggagggccgcaucaucaaggagaucuuccccaccgggcgggugaagcacaccgaggagugcacgugcggcuucgccagcaacaagaccaucgagugcgcgugccgcgacaacuccuacaccgccaagcggcccuucgucaagcugaacguggagaccgacacggccgagauccgccugaugugcaccgagaccuaccucgacaccccgcggcccgacgacgggagcaucacgggccccugcgaguccaacggcgacaaggggagcggcgggaucaagggcggguucgugcaccagcgcauggccuccaagaucggccggugguacagccgcaccauguccaagaccgagcggaugggcauggggcuguacgucaaguacgacggcgaccccugggccgacagcgacgcgcuggcccucaucggggugaugguguccauggaggagccgggcugguacagcuucggguucgagaucaaggacaagaagugcgacguccccugcaucggcaucgagauggugcacgacggcgggaaggagaccuggcacuccgccgccacggccaucuacugccugaugggcagcgggcagcugcucugggacaccgugaccggcgucaacauggcgcuguga

SEQ ID NO: 92672 - RNA, 1401 nt, Artificial Sequence
  derived and/or modified CDS sequence (opt1) from neuraminidase__InfluenzaB__ABL76962
augcugcccagcaccauccagacccucacgcuguuccugaccuccggcggggugcuccugagccuguacgucuccgcccuccugagcuaccugcucuacuccgacauccugcugaaguucagcccgaccaagaucaucgcccccaccaugucccucgacugcgcgaacgccagcaacgugcaggccgugaaccacuccgccacggaggagaugaccuuccugcugcccgagcccgaguggaccuacccgcgccucagcugccagggcuccaccuuccagaaggcccugcugaucagcccccaccgguucggggaggcgaagggcaacuccgcgccccucaucauccgcgagcccuucaucgccugcgggccgaaggagugcaagcacuucgcccugacgcacuacgccgcccagcccggcggcuacuacaacgggacccgggaggaccgcaacaagcugcggcaccucaucagcgucaaccugggcaagauccccaccguggagaacuccaucuuccacauggccgccuggagcggguccgccugccacgacggccgcgaguggaccuacaucgggguggacggccccgacagcaacgcgcugaucaagaucaaguacggcgaggccuacacggacaccuaccacuccuacgccaacaacauccuccggacccaggagagcgccugcaacugcaucgggggcgacugcuaccugaugaucaccgacgggagcgccuccggcaucagcaagugccgcuuccugaagauccgggagggccgcaucaucaaggagaucuucccgacggggcgggucgagcacaccgaggagugcacgugcggcuucgcguccaacaagaccaucgagugcgccugccgcgacaacagcuacaccgccaagcggcccuucgugaagcucaacguggagaccgacaccgccgagauccgccugaugugcaccgagacguaccuggacacgccccggcccgacgacggguccaucaccggcccgugcgagagcaacggggacaagggcuccggcgggaucaagggcggguucguccaccagcgcauggccagcaagaucggccggugguacucccgcaccaugagcaagaccaagcggauggggauggagcucuacgugaaguacgacggcgaccccuggaccgacuccgacgcgcuggcccccagcggcgugauggucuccauggaggagcccgggugguacagcuucggcuucgagaucaaggacaagaagugcgacgugccgugcaucgggaucgagauggugcacgacggcgggaagaagaccuggcacuccgccgccaccgccaucuacugccugaugggcagcggccagcuccugugggacacggucaccgggguggacauggcgcuguga

SEQ ID NO: 92673 - RNA, 1401 nt, Artificial Sequence; identical to SEQ ID NO: 92603
  derived and/or modified CDS sequence (opt1) from neuraminidase__InfluenzaB__ABL76973

SEQ ID NO: 92674 - RNA, 1401 nt, Artificial Sequence
  derived and/or modified CDS sequence (opt1) from neuraminidase__InfluenzaB__ABL76984
augcugcccagcaccauccagacccucacgcuguuccugaccuccggcggggugcuccugagccuguacgucuccgccagccucuccuaccugcuguacagcgacauccuccugaaguucucccagaccgagaucaccgccccgacgaugccccuggacugcgcgaacgccagcaacgugcaggccgugaaccucuccgccaccaagggcgucacccugcugcuccccgagcccgaguggaccuacccgcgccugagcugccccggguccacguuccagaaggcccugcucaucagcccccaccgguucggcgagaccaaggggaacuccgcgccccugaucauccgcgagccguucaucgccugcggccccaaggagugcaagcacuucgcccugacccacuacgccgcgcagcccggcggguacuacaacggcacccgggaggaccgcaacaagcuccggcaccugaucagcgugaagcuggggaagauccccacgguggagaacuccaucuuccacauggccgccuggagcggcuccgccugccacgacgggcgcgaguggaccuacaucggcgucgacggcccggacagcaacgcccuccugaagaucaaguacggggaggcguacaccgacaccuaccacuccuacgccaacaacauccugcggacgcaggagagcgccugcaacugcaucggcgggaacugcuaccucaugaucaccgacggcagcgccuccggcaucagcgagugccgcuuccugaagauccgggaggggcgcaucaucaaggagaucuuccccaccggccggguggagcacaccgaggagugcacgugcggguucgccuccaacaagaccaucgagugcgcgugccgcgacaacagcuacaccgccaagcggcccuucgugaagcugaacgucgagaccgacacggccgagauccgccucaugugcaccgagaccuaccuggacacgccccggccggacgacggcuccaucaccgggcccugcgagagcaacggcgacaagggcuccgggggcaucaagggcggguucgugcaccagcgcauggccagcaagaucgggcggugguacucccgcaccaugagcaagaccaagcggaugggcaugggccuguacgugaaguacgacggggaccccuggaccgacuccgacgcccucgcgcugagcggcgucaugguguccauggaggagcccgggugguacagcuucggcuucgagaucaaggacaagaagugcgacgugccgugcaucgggaucgagaugguccacgacggcggcaagcgcacguggcacuccgccgccaccgccaucuacugccugauggggagcggccagcuccugugggacaccgugaccgggguggacauggcccuguga

SEQ ID NO: 92675 - RNA, 1401 nt, Artificial Sequence; identical to SEQ ID NO: 92630
  derived and/or modified CDS sequence (opt1) from neuraminidase__InfluenzaB__ABL77006

SEQ ID NO: 92676 - RNA, 1401 nt, Artificial Sequence; identical to SEQ ID NO: 92674
  derived and/or modified CDS sequence (opt1) from neuraminidase__InfluenzaB__ABL77017

SEQ ID NO: 92677 - RNA, 1401 nt, Artificial Sequence
  derived and/or modified CDS sequence (opt1) from neuraminidase__InfluenzaB__ABL77028
augcugcccagcaccauccagacccucacgcuguuccugaccuccggcggggugcuccugagccuguacgucuccgccagccucuccuaccugcuguacagcgacauccuccugaaguucuccccgaccgagaucaccgcccccacgaugccccuggacugcgcgaacgccagcaacgugcaggccgugaaccgcuccgccaccaagggcgucacccuccugcugcccgagccggaguggaccuacccccggcucagcugccccggguccacguuccagaaggcccugcugaucagcccccaccgcuucggcgagaccaaggggaacuccgcgccgcucaucauccgggagcccuucaucgccugcggccccaaggagugcaagcacuucgcccugacccacuacgccgcgcagcccggcggguacuacaacggcacccgcgaggaccggaacaagcugcgccaccucaucagcgugaagcuggggaagaucccgacgguggagaacuccaucuuccacauggccgccuggagcggcuccgccugccacgacgggaaggaguggaccuacaucggcgucgacggccccgacagcaacgcccugcucaagaucaaguacggggaggcguacaccgacaccuaccacuccuacgccaacaacauccugcggacgcaggagagcgccugcaacugcaucggcgggaacugcuaccugaugaucaccgacggcagcgccuccggcaucagcgagugccgcuuccucaagauccgggaggggcgcaucaucaaggagaucuuccccaccggccggguggagcacaccgaggagugcacgugcggguucgccuccaacaagaccaucgagugcgcgugccgcgacaacagcuacaccgccaagcggcccuucgugaagcugaacgucgagaccgacacggccgagauccgccugaugugcaccgagaccuaccucgacaccccgcggcccgacgacggcuccaucacggggcccugcgagagcaacggcgacaagggcuccgggggcaucaagggcggguucgugcaccagcgcauggccagcaagaucgggcggugguacucccgcaccaugagcaagaccaagcggaugggcaugggccuguacgugaaguacgacggggaccccuggaccgacuccgacgcccuggcgcucagcggcgucaugguguccauggaggagccggggugguacagcuucggcuucgagaucaaggacaagaagugcgacgugcccugcaucgggaucgagaugguccacgacggcggcaaggagacguggcacuccgccgccaccgccaucuacugccugauggggagcggccagcugcucugggacaccgugaccgggguggacauggcccuguga

SEQ ID NO: 92678 - RNA, 1401 nt, Artificial Sequence
  derived and/or modified CDS sequence (opt1) from neuraminidase__InfluenzaB__ABL77039
augcugcccagcaccauccagacccucacgcuguuccugaccuccggcggggugcuccugagccuguacgucuccgccagccucuccuaccugcuguacagcgacauccuccugaaguucuccccgaccgagaccacggcccccaccaugccccuggacugcgcgaacgccagcaacgugcaggccgugaacugcuccgccaccaagggcgucacccuccugcugcccgagccggaguggacguacccccgccucagcugccccggguccaccuuccagaaggcccugcugaucagcccccaccgguucggcgagaccaaggggaacuccgcgccgcucaucauccgcgagcccuucaucgccugcggccccaaggagugcaagcacuucgcccugacccacuacgccgcgcagcccggcggguacuacaacggcacgcgggaggaccgcaacaagcugcggcaccucaucagcgugaagcuggggaagaucccgaccguggagaacuccaucuuccacauggccgccuggagcggcuccgccugccacgacgggaaggaguggaccuacaucggcgucgacggccccgacagcaacgcccugcucaagaucaaguacggggaggcguacaccgacacguaccacuccuacgccaacaacauccugcgcacccaggagagcgccugcaacugcaucggcgggaacugcuaccugaugaucaccgacggcagcgccuccggcaucagcgagugccgguuccucaagauccgcgaggggcggaucaucaaggagaucuuccccaccggccgcguggagcacacggaggagugcacgugcggguucgccuccaacaagaccaucgagugcgcgugccgggacaacagcuacaccgccaagcgccccuucgugaagcugaacgucgagaccgacaccgccgagauccggcugaugugcaccgagaccuaccucgacacgccgcgccccgacgacggcuccaucaccgggcccugcgagagcaacggcgacaagggcuccgggggcaucaagggcggguucgugcaccagcggauggccagcaagaucgggcgcugguacucccggaccaugagcaagaccaagcgcaugggcaugggccuguacgugaaguacgacggggaccccuggacggacuccgacgcccuggcgcucagcggcgucaugguguccauggaggagccggggugguacagcuucggcuucgagaucaaggacaagaagugcgacgugcccugcaucgggaucgagaugguccacgacggcggcaaggagaccuggcacuccgccgccaccgccaucuacugccugauggggagcggccagcugcucugggacaccgugacggggguggacauggcccuguga

SEQ ID NO: 92679 - RNA, 1401 nt, Artificial Sequence
  derived and/or modified CDS sequence (opt1) from neuraminidase__InfluenzaB__ABL77050
augcugcccagcaccauccagacccucacgcuguuccugaccuccggcggggugcuccugagccuguacgucuccgccagccucuccuaccugcuguacagcgacauccuccugaaguucuccccgaccgagaucaccgcccccgcgaugccccuggacugcgccaacgccagcaacgugcaggccgugaaccgcuccgccacgaagggcgucacccuccugcugcccgagccggaguggaccuacccccggcucagcugccccggguccaccuuccagaaggcgcugcugaucagcccccaccgcuucggcgagacgaaggggaacuccgccccgcucaucauccgggagcccuucaucgccugcggccccaaggagugcaagcacuucgcccugacccacuacgcggcccagcccggcggguacuacaacggcacccgcgaggaccggaacaagcugcgccaccucaucagcgugaagcuggggaagaucccgaccguggagaacuccaucuuccacauggccgccuggagcggcuccgccugccacgacgggaaggaguggacguacaucggcgucgacggccccgacagcaacgcgcugcucaagaucaaguacggggaggccuacaccgacaccuaccacuccuacgccaacaacauccugcggacccaggagagcgccugcaacugcaucggcgggaacugcuaccugaugaucacggacggcagcgccuccggcaucagcgagugccgcuuccucaagauccgggaggggcgcaucaucaaggagaucuuccccaccggccgggugaagcacaccgaggagugcacgugcggguucgcguccaacaagaccaucgagugcgccugccgcgacaacagcuacaccgccaagcggcccuucgugaagcugaacgucgagaccgacaccgccgagauccgccugaugugcacggagaccuaccucgacaccccgcggcccgacgacggcuccaucaccgggcccugcgagagcaacggcgacaagggcuccgggggcaucaagggcggguucgugcaccagcgcauggccagcaagaucgggcggugguacucccgcacgaugagcaagaccaagcggaugggcaugggccuguacgugaaguacgacggggaccccuggaccgacuccgacgcgcuggcccucagcggcgucaugguguccauggaggagccggggugguacagcuucggcuucgagaucaaggacaagaagugcgacgugcccugcaucgggaucgagaugguccacgacggcggcaaggagaccuggcacuccgccgccacggccaucuacugccugauggggagcggccagcugcucugggacaccgugaccgggguggacauggcgcuguga

SEQ ID NO: 92680 - RNA, 1401 nt, Artificial Sequence
  derived and/or modified CDS sequence (opt1) from neuraminidase__InfluenzaB__ABL77072
augcugcccagcaccauccagacccucacgcuguuccugaccuccggcggggugcuccugagccuguacgucuccgcccuccugagcuaccugcucuacuccgacauccugcugaaguucagcccgaccaagaucaucgcccccaccacgucccucgacagcgcgaacgccuccaacuuccaggccgugaaccacagcgccaccaaggagaugaccuuccugcugcccgagcccgaguggaccuacccgcgccucuccugccagggcagcacguuccagaaggcccugcugaucagcccccaccgguucggggaggcgaagggcaacuccgcgccccucaucauccgcgagcccuucaucgccugcgggccgaaggagugcaagcacuucgcccugacccacuacgccgcccagcccggcggcuacuacaacgggacccgggaggaccgcaacaagcugcggcaccucaucuccgugaaccugggcaagauccccaccgucgagaacagcaucuuccacauggccgccugguccgggagcgccugccacgacggccgcgaguggacguacaucgggguggacggccccgacuccaacgcgcugaucaagaucaaguacggcgaggccuacaccgacaccuaccacagcuacgccaacaacauccuccggacccaggagagcgccugcaacugcaucgggggcgacugcuaccugaugaucacggacggguccgccagcggcaucuccaagugccgcuuccugaagauccgggagggccgcaucaucaaggagaucuucccgaccgggcggguggagcacaccgaggagugcacgugcggcuucgcgagcaacaagaccaucgagugcgccugccgcgacaacuccuacaccgccaagcggcccuucgucaagcucaacguggagaccgacaccgccgagauccgccugaugugcacggagaccuaccuggacacgccccggcccgacgacgggagcaucaccggcccgugcgaguccaacggggacaagggcagcggcgggaucaagggcggguucgugcaccagcgcauggccuccaagaucggccggugguacagccgcaccauguccaagaccaagcggauggggauggagcucuacgucaaguacgacggcgaccccuggaccgacagcgacgcgcuggcccccuccggcgugauggugagcaucaaggaguccgggugguacagcuucggcuucgagaucaaggacaagaagugcgacguccccugcaucgggaucgagauggugcacgacggcgggaagaccacguggcacuccgccgccaccgccaucuacugccugaugggcagcggccagcuccugugggacaccgugaccggggucgacauggcgcuguga

SEQ ID NO: 92681 - RNA, 1401 nt, Artificial Sequence; identical to SEQ ID NO: 92608
  derived and/or modified CDS sequence (opt1) from neuraminidase__InfluenzaB__ABL77083

SEQ ID NO: 92682 - RNA, 1401 nt, Artificial Sequence; identical to SEQ ID NO: 92608
  derived and/or modified CDS sequence (opt1) from neuraminidase__InfluenzaB__ABL77094

SEQ ID NO: 92683 - RNA, 1401 nt, Artificial Sequence
  derived and/or modified CDS sequence (opt1) from neuraminidase__InfluenzaB__ABL77105
augcugcccagcaccauccagacccucacgcuguuccugaccuccggcggggugcuccugagccuguacgucuccgccagccucuccuaccugcuguacagcgacauccuccugaaguucuccagcaccgagaucaccgccccgacgaugccccuggacugcgcgaacgccuccaacgugcaggccgugaaccgcagcgccaccgagggcgucacccuccugcugcccgagcccgaguggaccuacccgcggcucuccugccccgggagcacguuccagaaggcccugcugaucagcccccaccgcuucggcgagaccaaggggaacuccgcgccccucaucauccgggagccguucaucgccugcggccccaaggagugcaagcacuucgcccugacccacuacgccgcgcagcccggcggguacuacaacggcacccgcgaggaccggaacaagcugcgccaccucaucuccgugaagcuggggaagauccccacgguggagaacagcaucuuccacauggccgccugguccggcagcgccugccacgacgggaaggaguggaccuacaucggcgucgacggcccggacuccaacgcccugcucaagaucaaguacggggaggcguacaccgacaccuaccacagcuacgccaacaacauccugcggacgcaggagagcgccugcaacugcaucggcgggaacugcuaccugaugaucaccgacggcuccgccagcggcaucuccgagugccgcuuccucaagauccgggaggggcgcaucaucaaggagaucuuccccaccggccggguggagcacaccgaggagugcacgugcggguucgccagcaacaagaccaucgagugcgcgugccgcgacaacuccuacaccgccaagcggcccuucgugaagcugaacgucgagaccgacacggccgagauccgccugaugugcaccgagaccuaccucgacacgccccggccggacgacggcagcaucaccgggcccugcgaguccaacggcgacaagggcagcgggggcaucaagggcggguucgugcaccagcgcauggccuccaagaucgggcggugguacagccgcaccauguccaagaccaagcggaugggcaugggccuguacgugaaguacgacggggaccccuggaccgacagcgacgcccuggcgcucuccggcgucauggugagcauggaggagcccgggugguacuccuucggcuucgagaucaaggacaagaagugcgacgugccgugcaucgggaucgagaugguccacgacggcggcaaggagacguggcacagcgccgccaccgccaucuacugccugaugggguccggccagcugcucugggacaccgugaccgggguggacauggcccuguga

SEQ ID NO: 92684 - RNA, 1401 nt, Artificial Sequence; identical to SEQ ID NO: 92608
  derived and/or modified CDS sequence (opt1) from neuraminidase__InfluenzaB__ABL77127

SEQ ID NO: 92685 - RNA, 1401 nt, Artificial Sequence
  derived and/or modified CDS sequence (opt1) from neuraminidase__InfluenzaB__ABL77138
augcugcccagcaccauccagacccucacgcuguuccugaccuccggcggggugcuccugagccuguacgucuccgcccuccugagcuaccugcucuacuccgacauccugcugaaguucagcccgaccaagaucaucgcccccaccacgucccucgacagcgcgaacgccuccaacuuccaggccgugaaccacagcgccaccaaggagaugaccuuccugcugcccgagcccgaguggaccuacccgcgccucuccugccagggcagcacguuccagaaggcccugcugaucagcccccaccgguucggggaggcgaagggcaacuccgcgccccucaucauccgcgagcccuucaucgccugcgggccgaaggagugcaagcacuucgcccugacccacuacgccgcccagcccggcggcuacuacaacgggacccgggaggaccgcaacaagcugcggcaccucaucuccgugaaccugggcaagauccccaccgucgagaacagcaucuuccacauggccgccugguccgggagcgccugccacgacggccgcgaguggacguacaucgggguggacggccccgacuccaacgcgcugaucaagaucaaguacggcgaggccuacaccgacaccuaccacagcuacgccaacaacauccuccggacccaggagagcgccugcaacugcaucgggggcgacugcuaccugaugaucacggacggguccgccagcggcaucuccaagugccgcuuccugaagauccgggagggccgcaucaucaaggagaucuucccgaccgggcggguggagcacaccgaggagugcacgugcggcuucgcgagcaacaagaccaucgagugcgccugccgcgacaacuccuacaccgccaagcggcccuucgucaagcucaacguggagaccgacaccgccgagauccgccugaugugcacggagaccuaccuggacacgccccggcccgacgacgggagcaucaccggcccgugcgaguccaacggggacaagggcagcggcgggaucaagggcggguucgugcaccagcgcauggccuccaagaucggccggugguacagccgcaccauguccaagaccaagcggauggggauggagcucuacgucaaguacgacggcgaccccuggaccgacagcgacgcgcuggcccccuccggcgugauggugagcaucgaggagcccgggugguacuccuucggcuucgagaucaaggacaagaagugcgacgucccgugcaucgggaucgagauggugcacgacggcgggaagaccacgugguacagcgccgccaccgccaucuacugccugaugggcuccggccagcuccugugggacaccgugaccggggucgacauggcgcuguga

SEQ ID NO: 92686 - RNA, 1401 nt, Artificial Sequence; identical to SEQ ID NO: 92608
  derived and/or modified CDS sequence (opt1) from neuraminidase__InfluenzaB__ABL77149

SEQ ID NO: 92687 - RNA, 1401 nt, Artificial Sequence
  derived and/or modified CDS sequence (opt1) from neuraminidase__InfluenzaB__ABL77160
augcugcccagcaccauccagacccucacgcuguuccugaccuccggcggggugcuccugagccuguacgucuccgccagccucuccuaccugcuguacagcgacauccuccugaaguucucccagaccaagaucaccgccccgacgaugccccuggacugcgcgaacgccagcaacgugcaggccgugaaccgcuccgccaccaagggcgucacccuccugcugcccgagcccgaguggaccuacccgcggcucagcugccccggguccacguuccagaaggcccugcugaucagcccccaccgcuucggcgagaccaaggggaacuccgcgccccucaucauccgggagccguucaucgccugcggccccaaggagugcaagcacuucgcccugacccacuacgccgcgcagcccggcggguacuacaacggcacccgcgaggaccggaacaagcugcgccaccucaucagcgugaagcuggggaagauccccacgguggagaacuccaucuuccacauggccgccuggagcggcuccgccugccacgacgggcgggaguggaccuacaucggcgucgacggcccggacagcaacgcccugcucaagaucaaguacggggaggcguacaccgacaccuaccacuccuacgccaagaacauccugcgcacgcaggagagcgccugcaacugcaucggcggggacugcuaccugaugaucaccgacggcagcgccuccggcaucagcgagugccgguuccucaagauccgcgaggggcggaucaucaaggagaucuuccccaccggccgcgugaagcacaccgaggagugcacgugcggguucgccuccaacaagaccaucgagugcgcgugccgggacaacagcuacaccgccaagcgccccuucgugaagcugaacgucgagaccgacacggccgagauccggcugaugugcaccgagaccuaccucgacacgccccgcccgaacgacggcuccaucaccgggcccugcgagagcgacggcgaccggggcuccgggggcaucaagggcggguucgugcaccagcgcauggagagcaagaucgggcggugguacucccgcaccaugagcaagaccaagcggaugggcaugggccuguacgugaaguacgacggggaccccuggaccgacuccgaggcccuggcccucagcggcgucaugguguccauggaggagcccgggugguacagcuucggcuucgagaucaaggacaagaagugcgacgugccgugcaucgggaucgagaugguccacgacggcggcaagacgaccuggcacuccgcggccaccaccaucuacugccugauggggagcggccagcugcucugggacacggugaccgggguggacauggcccuguga

SEQ ID NO: 92688 - RNA, 1401 nt, Artificial Sequence; identical to SEQ ID NO: 92640
  derived and/or modified CDS sequence (opt1) from neuraminidase__InfluenzaB__ABL77171

SEQ ID NO: 92689 - RNA, 1401 nt, Artificial Sequence
  derived and/or modified CDS sequence (opt1) from neuraminidase__InfluenzaB__ABL77182
augcugcccagcaccauccagacccucacgcuguuccugaccuccggcggggugcuccugagccuguacgucuccgcccuccugagcuaccugcucuacuccgacauccugcugaaguucagcccgaccaagaucaucgcccccaccacgucccucgacagcgcgaacgccuccaacuuccaggccgugaaccacagcgccaccaaggagaugaccuuccugcugcccgagcccgaguggaccuacccgcgccucuccugccagggcagcacguuccagaaggcccugcugaucagcccccaccgguucggggaggcgaagggcaacuccgcgccccucaucauccgcgagcccuucaucgccugcgggccgaaggagugcaagcacuucgcccugacccacuacgccgcccagcccggcggcuacuacaacgggacccgggaggaccgcaacaagcugcggcaccucaucuccgugaaccugggcaagauccccaccgucgagaacagcaucuuccacauggccgccugguccgggagcgccugccacgacggccgcgaguggacguacaucgggguggacggccccgacuccaacgcgcugaucaagaucaaguacggcgaggccuacaccgacaccuaccacagcuacgccaacaacauccuccggacccaggagagcgccugcaacugcaucgggggcgacugcuaccugaugaucacggacggguccgccagcggcaucuccaagugccgcuuccugaagauccgggagggccgcaucgugaaggagaucuucccgaccgggcgggucgagcacaccgaggagugcacgugcggcuucgcgagcaacaagaccaucgagugcgccugccgcgacaacuccuacaccgccaagcggcccuucgugaagcucaacguggagaccgacaccgccgagauccgccugaugugcacggagaccuaccuggacacgccccggcccgacgacgggagcaucaccggcccgugcgaguccaacggggacaagggcagcggcgggaucaagggcggguucguccaccagcgcauggccuccaagaucggccggugguacagccgcaccauguccaagaccaagcggauggggauggagcucuacgugaaguacgacggcgaccccuggaccgacagcgacgcgcuggcccccuccggcgugauggucagcaucgaggagcccgggugguacuccuucggcuucgagaucaaggacaagaagugcgacgugccgugcaucgggaucgagauggugcacgacggcgggaagaccacguggcacagcgccgccaccgccaucuacugccugaugggcuccggccagcuccugugggacaccaucaccggggucgacauggcgcuguga

SEQ ID NO: 92690 - RNA, 1401 nt, Artificial Sequence; identical to SEQ ID NO: 92615
  derived and/or modified CDS sequence (opt1) from neuraminidase__InfluenzaB__ABL77193

SEQ ID NO: 92691 - RNA, 1401 nt, Artificial Sequence
  derived and/or modified CDS sequence (opt1) from neuraminidase__InfluenzaB__ABL77204
augcugcccagcaccauccagacccucacgcuguuccugaccuccggcggggugcuccugagccuguacgucuccgccagccucuccuaccugcuguacagcgacauccuccugaaguucuccccgaccgagaucaccgcccccacgaugccccuggacugcgcgaacgccagcaacgugcaggccgugaaccgcuccgccaccaagggcgucacccuccugauccccgagccggaguggaccuacccccggcugagcugccccggguccacguuccagaaggcccuccugaucagcccccaccgcuucggcgagaccaaggggaacuccgcgccgcugaucauccgggagcccuucaucgccugcggccccaaggagugcaagcacuucgcccucacccacuacgccgcgcagcccggcggguacuacaacggcacccgcggggaccggaacaagcugcgccaccugaucagcgugaagcucggcaagaucccgacgguggagaacuccaucuuccacauggccgccuggagcggguccgccugccacgacggcaaggaguggaccuacaucggcgucgacgggcccgacaacagcgcccugcugaagaucaaguacggcgaggcguacaccgacaccuaccacuccuacgccaacaacauccuccggacgcaggagagcgccugcaacugcaucgggggcaacugcuaccugaugaucaccgacggcagcgccuccggggugagcgagugccgcuuccugaagauccgggagggccgcaucaucaaggagaucuuccccaccgggcgggugaagcacaccgaggagugcacgugcggcuucgccuccaacaagaccaucgagugcgcgugccgcgacaacagcuacaccgccaagcggcccuucgucaagcucaacguggagaccgacacggccgagauccgccugaugugcaccgagaccuaccuggacaccccgcggcccgacgacggguccaucacgggccccugcgagagcaacggcgacaagggguccggcgggaucaagggcggguucgugcaccagcgcauggccagcaagaucggccggugguacucccgcaccaugagcaagaccaagcggaugggcauggggcucuacgucaaguacgacggcgaccccugggccgacuccgacgcgcuggcccugagcggggugaugguguccauggaggagccgggcugguacagcuucggguucgagaucaaggacaagaagugcgacguccccugcaucggcaucgagauggugcacgacggcgggaaggagaccuggcacuccgccgccacggccaucuacugccucaugggcagcgggcagcugcugugggacaccgugaccggcgucgacauggcgcucuga

SEQ ID NO: 92692 - RNA, 1401 nt, Artificial Sequence
  derived and/or modified CDS sequence (opt1) from neuraminidase__InfluenzaB__ABL77215
augcugcccagcaccauccagacccucacgcuguuccugaccuccggcggggugcuccugagccuguacgucuccgccagccucuccuaccugcuguacagcgacauccuccugaaguucccguccaccgagaucaccgcccccacgaugccccuggacugcgcgaacgccagcaacgugcaggccgugaaccgcuccgccaccaagggcgucacccuccugcugcccgagccggaguggaccuacccccggcucagcugccccggguccacguuccagaaggcccugcugaucagcccccaccgcuucggcgagaccaaggggaacuccgcgccgcucaucauccgggagcccuucaucgccugcggccccaaggagugcaagcacuucgcccugacccacuacgccgcgcagcccggcggguacuacaacggcacccgcggggaccggaacaagcugcgccaccucaucagcgugaagcugggcaagaucccgacgguggagaacuccaucuuccacauggccgccuggagcggguccgccugccacgacggcaaggaguggaccuacaucggcgucgacgggcccgacaacaacgcccugcucaagaucaaguacggcgaggcguacaccgacaccuaccacagcuacgccaacaacauccugcggacgcaggaguccgccugcaacugcaucgggggcaacugcuaccugaugaucaccgacggcagcgccagcgggguguccgagugccgcuuccucaagauccgggagggccgcaucaucaaggagaucuuccccaccgggcggaucaagcacaccgaggagugcacgugcggcuucgccagcaacaagaccaucgagugcgcgugccgcgacaacuccuacaccgccaagcggcccuucgugaagcugaacgucgagaccgacacggccgagauccgccugaugugcaccgagaccuaccucgacaccccgcggcccgacgacgggagcaucacgggccccugcgaguccaacggcgacaaggggagcggcgggaucaagggcggguucgugcaccagcgcauggccuccaagaucggccggugguacagccgcaccauguccaagaccaagcggaugggcauggggcuguacgugaaguacgacggcgaccccugggccgacagcgacgcgcuggccuucuccggggucauggugagcauggaggagccgggcugguacuccuucggguucgagaucaaggacaagaagugcgacgugcccugcaucggcaucgagaugguccacgacggcgggaaggagaccuggcacagcgccgccacggccaucuacugccucaugggcuccgggcagcugcugugggacaccgugaccggcgugaacauggcgcucuga

SEQ ID NO: 92693 - RNA, 1401 nt, Artificial Sequence; identical to SEQ ID NO: 92651
  derived and/or modified CDS sequence (opt1) from neuraminidase__InfluenzaB__ABL77226

SEQ ID NO: 92694 - RNA, 1401 nt, Artificial Sequence
  derived and/or modified CDS sequence (opt1) from neuraminidase__InfluenzaB__ABL77237
augcugcccagcaccauccagacccucacgcuguuccugaccuccggcggggugcuccugagccuguacgucuccgccagccucuccuaccugcuguacagcgacauccuccugaaguucuccccgaccgagaucaccgcccccacgaugccccuggacugcgcgaacgccagcaacgugcaggccgugaaccgcuccgccaccaagggcgucacccuccugcugcccgagccggaguggaccuacccccggcucagcugccccggguccacguuccagaaggcccugcugaucagcccccaccgcuucggcgagaccaaggggaacuccgcgccgcucaucauccgggagcccuucaucgccugcggccccaacgagugcaagcacuucgcccugacccacuacgccgcgcagcccggcggguacuacaacggcacccgcggggaccggaacaagcugcgccaccucaucagcgugaagcugggcaagaucccgacgguggagaacuccaucuuccacauggccgccuggagcggguccgccugccacgacggcaaggaguggaccuacaucggcgucgacgggcccgacaacaacgcccugcucaagaucaaguacggcgaggcguacaccgacaccuaccacagcuacgccaacaacauccugcggacgcaggaguccgccugcaacugcaucgggggcaacugcuaccugaugaucaccgacggcagcgccagcgggguguccgagugccgcuuccucaagauccgggagggccgcaucaucaaggagaucuuccccaccgggcgggugaagcacaccgaggagugcacgugcggcuucgccagcaacaagaccaucgagugcgcgugccgcgacaacuccuacaccgccaagcggcccuucgucaagcugaacguggagaccgacacggccgagauccgccugaugugcaccgacaccuaccucgacaccccgcggcccgacgacgggagcaucacgggccccugcgaguccaacggcgacaaggggagcggcgggaucaagggcggguucgugcaccagcgcauggccuccaagaucggccggugguacagccgcaccauguccaagaccgagcggaugggcauggggcuguacgucaaguacgacggcgaccccugggccgacagcgacgcgcuggccuucuccggggugauggugagcaugaaggagccgggcugguacuccuucggguucgagaucaaggacaagaagugcgacguccccugcaucggcaucgagauggugcacgacggcgggaaggagaccuggcacagcgccgccacggccaucuacugccucaugggcuccgggcagcugcugugggacaccgugaccggcgucgacauggcgcucuga

SEQ ID NO: 92695 - RNA, 1401 nt, Artificial Sequence
  derived and/or modified CDS sequence (opt1) from neuraminidase__InfluenzaB__ABL77248
augcugcccagcaccauccagacccucacgcuguuccugaccuccggcggggugcuccugagccuguacgucuccgcccuccugagcuaccugcucuacuccgacauccugcugaaguucagcccgaccaagaucaucgcccccaccaugucccucgacugcgcgaacgccagcaacgugcaggccgccaaccacuccgccacgaaggagaugaccuuccugcugcccgagcccgaguggaccuacccgcgccucagcugccagggcuccaccuuccagaaggcgcugcugaucagcccccaccgguucggggaggccaagggcaacuccgcgccccucaucauccgcgagcccuucaucgccugcgggccgaaggagugcaagcacuucgcccugacgcacuacgccgcccagcccggcggcuacuacaacgggacccgggaggaccgcaacaagcugcggcaccucaucagcgugaaccugggcaagauccccaccgucgagaacuccaucuuccacauggccgccuggagcggguccgcgugccacgacggccgcgaguggaccuacaucgggguggacggccccgacagcaacgcccugaucaagaucaaguacggcgaggccuacacggacaccuaccacuccuacgccaacaacauccuccggacccaggagagcgccugcaacugcaucgggggcgacugcuaccugaugaucaccgacgggagcgcguccggcaucagcaagugccgcuuccugaagauccgggagggccgcaucaucaaggagaucuucccgacggggcggguggagcacaccgaggagugcacgugcggcuucgccuccaacaagaccaucgagugcgccugccgcgacaacagcuacaccgccaagcggcccuucgucaagcucaacguggagaccgacaccgccgagauccgccugaugugcaccgagacguaccuggacacgccccggcccgacgacggguccaucaccggcccgugcgagagcaacggggagaagggccgcggcgggaucaagggcggguucgugcaccagcggauggcguccaagaucggccgcugguacagccggaccauguccaagaccgagcgcauggggauggagcucuacgucaaguacgacggcgaccccuggaccgacagcgacgcccuggcccccuccggcgugauggugagcaugaaggagcccgggugguacuccuucggcuucgagaucaaggacaagaagugcgacgucccgugcaucgggaucgagauggugcacgacggcgggaagaagaccuggcacagcgccgccaccgcgaucuacugccugaugggcuccggccagcuccugugggacacggugaccggggucgacauggcccuguga

SEQ ID NO: 92696 - RNA, 1401 nt, Artificial Sequence
  derived and/or modified CDS sequence (opt1) from neuraminidase__InfluenzaB__ABL77259
augcugcccagcaccauccagacccucacgcuguuccugaccuccggcggggugcuccugagccuguacgucuccgccagccucuccuaccugcuguacagcgacauccuccugaaguucuccccgaccgagaucaccgcccccaaggugccccuggacugcgcgaacgccagcaacgugcaggccgucaaccgcuccgccacgaagggcaugacccuccugcugagcgagcccgaguggaccuacccgcggcucuccugccaggggagcaccuuccagaaggcccugcugaucagcccccaccgcuucggcgagacgcgggggaacuccgcgccccucaucauccgcgagcccuucaucgccugcggcccgaaggagugcaagcacuucgcccugacccacuacgccgcgcagcccggcggguacuacaacggcacccgggaggaccgcaacaagcugcggcaccucaucuccgugaagcuggggaagauccccaccguggagaacagcaucuuccacauggccgccugguccggcagcgccugccacgacgggcgcgaguggacguacaucggcgucgacggccccgacuccaacgcccugaucaagaucaaguacggggaggcguacaccgacaccuaccacagcuacgccaacaacauccuccggacccaggagagcgccugcaacugcaucggcggggacugcuaccugaugaucacggacggcuccgccagcggcaucuccaagugccgcuuccugaagauccgggaggggcgcaucaucaaggagaucuucccgaccggccggguggagcacaccgaggagugcacgugcggguucgccagcaacaagaccaucgagugcgcgugccgcgacaacuccuacaccgccaagcggcccuucgugaagcucaacgucgagaccgacaccgccgagauccgccugaugugcacggagaccuaccuggacacgccccggcccgacgacggcagcaucaccgggccgugcgaguccaacggcgacaagggccgcgggggcaucaagggcggguucgugcaccagcggauggccagcaagaucgggcgcugguacucccggaccaugagcaagaccgagcgcaugggcauggagcucuacgugaaguacgacggcgaccccuggaccgacuccgacgcccuggcgcccagcggggucaugguguccaugaaggagcccggcugguacagcuucggguucgagaucaaggacaagaagugcgacgugccgugcaucggcaucgagaugguccacgacgggggcaagaagaccuggcacuccgccgccacggccaucuacugccugaugggcagcgggcagcuccugugggacaccgugaccggcguggacauggcccuguga

SEQ ID NO: 92697 - RNA, 1401 nt, Artificial Sequence
  derived and/or modified CDS sequence (opt1) from neuraminidase__InfluenzaB__ABL77270
augcugcccagcaccauccagacccucacgcuguuccugaccuccggcggggugcuccugagccuguacgucuccgccagccucuccuaccugcuguacagcgacauccuccugaaguucuccccgaccgagaucaccgcccccacgaugccccuggacugcgcgaacgccagcaacgugcaggccgugaaccgcuccgccaccaagggcaugacccuccugcugcccgagccggaguggaccuacccccggcucagcugccccggguccacguuccagaaggcccugcugaucagcccccaccgcuucggcgagacccgggggaacuccgcgccgcucaucauccgcgagcccuucaucgccugcggccccaaggagugcaagcacuucgcccugacccacuacgccgcgcagcccggcggguacuacaacggcacccgggaggaccgcaacaagcugcggcaccucaucagcgucaagcuggggaagaucccgacgguggagaacuccaucuuccacauggccgccuggagcggcuccgccugccacgacgggcgcgaguggaccuacaucggcguggacggccccgacagcaacgcccugaucaagaucaaguacggggaggcguacaccgacaccuaccacuccuacgccaacaacauccuccggacgcaggagagcgccugcaacugcaucggcggggacugcuaccugaugaucaccgacggcagcgccuccggcaucagcaagugccgcuuccugaagauccgggaggggcgcaucaucaaggagaucuuccccaccggccgggucgagcacaccgaggagugcacgugcggguucgccuccaacaagaccaucgagugcgcgugccgcgacaacagcuacaccgccaagcggcccuucgugaagcucaacguggagaccgacacggccgagauccgccugaugugcaccgagaccuaccuggacaccccgcggcccgacgacggcuccaucacggggcccugcgagagcaacggcgacaagggccgcgggggcaucaagggcggguucguccaccagcggauggccuccaagaucgggcgcugguacagccggaccauguccaagaccgagcgcaugggcauggagcucuacgugaaguacgacggcgaccccuggaccgacagcgaggcccuggcgccguccggggugauggucagcauggaggagcccggcugguacuccuucggguucgagaucaaggacaagaagugcgacgugcccugcaucggcaucgagauggugcacgacgggggcaagaagacguggcacagcgccgccaccgccaucuacugccugaugggcuccgggcagcuccugugggacaccgucaccggcguggacauggcccuguga

SEQ ID NO: 92698 - RNA, 1401 nt, Artificial Sequence
  derived and/or modified CDS sequence (opt1) from neuraminidase__InfluenzaB__ABL77281
augcugcccagcaccauccagacccucacgcuguuccugaccuccggcggggugcuccugagccuguacgucuccgugagccucuccuaccugcuguacagcgacauccuccugcgcuucuccccgaccgagaucaccgcccccacgaugccccuggacugcgccaacgcgagcaacgugcaggccgucaaccgguccgccaccaagggcaugacccuccgccugcccgagccggaguggaccuacccccggcugagcugccccggguccacguuccagaaggcccuccugaucagcccccaccgcuucggcgagacccgggggaacuccgccccgcugaucauccgcgagcccuucaucgcgugcggccccaaggagugcaagcacuucgcccucacccacuacgccgcccagcccggcggguacuacaacggcacccgggaggaccgcaacaagcugcggcaccugaucagcgugaagcucgggaagaucccgacgguggagaacuccaucuuccacauggcggccuggagcggcuccgccugccacgacgggcgcgaguggaccuacaucggcgucgacggccccgacagcaacgcccugaucaagaucaaguacggggaggccuacaccgacaccuaccacuccuacgcgaacaacauccugcggacgcaggagagcgccugcaacugcaucggcggggacugcuaccucaugaucaccgacggcagcgccuccgagaucagcaagugccgcuuccugaagauccgggagggccgcaucaucaaggagaucuuccccaccgggcggguggagcacaccgaggagugcacgugcggcuucgccuccaacaagaccaucgagugcgccugccgcgacaacagcuacaccgcgaagcggcccuucgugaagcugaacgucgagaccgacacggccgagauccgccucaugugcaccgagaccuaccuggacaccccgcggcccgacgacggguccaucacgggccccugcgagagcaacggggacaagggccgcggcgggaucaagggcggguucgugcaccagcggauggccuccaagaucggccgcugguacagccgcaccauguccaagaccgagcggauggggauggagcuguacgugaaguacgacggcgaccccuggaccgacagcgaggcccucgccccguccggcgucauggugagcauggaggagcccgggugguacuccuucggcuucgagaucaaggacaagaagugcgacgugcccugcaucgggaucgagaugguccacgacggcgggaagaagacguggcacagcgcggccaccgccaucuacugccugaugggcuccggccagcugcucugggacaccgugaccgggguggacauggcccuguga

SEQ ID NO: 92699 - RNA, 1401 nt, Artificial Sequence
  derived and/or modified CDS sequence (opt1) from neuraminidase__InfluenzaB__ABL77292
augcugcccagcaccauccagacccucacgcuguuccugaccuccggcggggugcuccugagccuguacgucuccgccagccucuccuaccugcuguacagcggcgugcuccugaaguucuccccgaccgagaucaccgcccccacgaugccccuggacugcgcgaacgccagcaacgugcaggccgucaaccgcuccgccaccaagggggugacccuccugcugcccgagccggaguggaccuacccccggcucagcugccccggcuccacguuccagaaggcccugcugaucagcccccaccgcuucggggagacccggggcaacuccgcgccgcucaucauccgcgagcccuucaucgccugcggccccaaggagugcaagcacuucgcccugacccacuacgccgcgcagcccgggggcuacuacaacgggacccgggaggaccgcaacaagaugcggcaccugaucagcgugaagcucggcaagaucccgacggucgagaacuccaucuuccacauggccgccuggagcggguccgccugccacgacggccgcgaguggaccuacaucggcguggacgggcccgacagcaacgcccugaucaagaucaaguacggcgaggcguacaccgacaccuaccacuccuacgccaacaacauccugcggacgcaggagagcgccugcaacugcaucgggggcgacugcuaccucaugaucaccgacggcagcgccuccgggaucagcaagugccgcuuccugaagauccgggagggccgcaucaucaaggagaucuuccccaccgggcggguggagcacaccgaggagugcacgugcggcuucgccuccaacaagaccaucgagugcgcgugccgcgacaacagcuacaccgccaagcggcccuucgucaagcugaacguggagaccgacacggccgagauccgccucaugugcaccgagaccuaccuggacaccccgcggcccgacgacggguccaucacgggccccugcgagagcaacggcgacaaggggcugggcgggaucaagggcggguucgugcaccagcgcauggccuccaagaucggccggugguacagccgcaccauguccaagaccgagcggaugggcauggagcucuacgucaaguacgacggggaccccuggaccgacagcgacgcccuggcgcuguccggcgugauggugagcauggaggagccggggugguacuccuucggcuucgagaucaaggacaagaagugcgacguccccugcaucgggaucgagauggugcacgacggcggcaagaagacguggcacagcgccgccaccgccaucuacugccucaugggguccggccagcugcugugggacaccgugaccggggucgacauggcccucuga

SEQ ID NO: 92700 - RNA, 1398 nt, Artificial Sequence
  derived and/or modified CDS sequence (opt1) from neuraminidase__InfluenzaB__ABL77303
augcugcccagcaccauccagacccucacgcuguuccugaccuccggcggggugcuccugagccuguacgucuccgcccuccugagcuaccugcucuacuccgacauccugcugaaguucagcccgaagaucaucgcccccaccaucucccucgacugcgcgaacgccagcaacgugcaggccgugaaccacuccgccaccaaggagaugacguuccugcugcccgagcccgaguggaccuacccgcgccucagcugccagggcuccaucuuccagaaggcccugcugaucagcccccaccgguucggggaggcgaagggcaacuccgcgccccucaucauccgcgagcccuucaucgccugcgggccgaaggagugcaagcacuucgcccugacccacuacgccgcccagcccggcggcuacuacaacgggacccgggaggaccgcaacaagcugcggcaccucaucagcgucaaccugggcaagauccccacgguggagaacuccaucuuccacauggccgccuggagcggguccgccugccacgacggccgcgaguggaccuacaucgggguggacggccccgacagcaacgcgcugaucaagaucaaguacggcgaggccuacaccgacaccuaccacuccuacgccaacaacauccuccggacgcaggagagcgccugcaacugcaucgggggcgacugcuaccugaugaucaccgacgggagcgccuccggcaucagcaagugccgcuuccugaagauccgggagggccgcaucaucaaggagaucuucccgaccgggcgggucgagcacaccgaggagugcacgugcggcuucgcguccaacaagaccaucgagugcgccugccgcgacaacagcuacaccgccaagcggcccuucgugaagcucaacguggagaccgacacggccgagauccgccugaugugcaccgagaccuaccuggacacgccccggcccgacgacggguccaucaccggcccgugcgagagcaacggggacaagggccgcggcggggucaagggcggguucgugcaccagcggaucgccuccaagaucggccgcugguacagccggaccauguccaagaccgagcgcauggggauggagcucuacgugaaguacgacggcgaccccuggaccgacagcgacgcgcuggcccccuccggcgucauggugagcauggaggagcccgggugguacuccuucggcuucgagaucaaggacaagaagugcgacgugccgugcaucgggaucgagaugguccacgacggcgggaagaagacguggcacagcgccgccaccgccaucuacugccugaugggcuccggccagcuccugugggacaccgugaccgggguggacauggcgcuguga

SEQ ID NO: 92701 - RNA, 1398 nt, Artificial Sequence
  derived and/or modified CDS sequence (opt1) from neuraminidase__InfluenzaB__ABL77314
augcugcccagcaccauccagacccucacgcuguuccugaccuccggcggggugcuccugagccuguacgucuccgcccuccugagcuaccugcucuacuccgacgugcugcugaaguucagcccgaagaucaucgcccccaccaugucccucgacugcgcgaacgccagcaacgugcaggccgucaaccacuccgccaccgaggagaugacguuccugcugcccgagcccgaguggaccuacccgcgccucagcugccagggcuccaccuuccagaaggcccugcugaucagcccccaccgguucggggaggcgaagggcaacuccgcgccccucaucauccgcgagcccuucaucgccugcgggccgaaggagugcaagcacuucgcccugacccacuacgccgcccagcccggcggcuacuacaacgggacgcgggaggaccgcaacaagcugcggcaccucaucagcgugaaccugggcaagauccccaccguggagaacuccaucuuccacauggccgccuggagcggguccgccugccacgacggccgcgaguggaccuacaucggggucgacggccccgacagcaacgcgcugaucaagaucaaguacggcgaggccuacaccgacacguaccacuccuacgccaacaacauccuccggacccaggagagcgccugcaacugcaucgggggcgacugcuaccugaugaucaccgacgggagcgccuccggcaucagcaagugccgcuuccugaagauccgggagggccgcaucaucaaggagaucuucccgaccgggcggguggagcacacggaggagugcacgugcggcuucgcguccaacaagaccaucgagugcgccugccgcgacaacagcuacaccgccaagcggcccuucgugaagcucaacgucgagaccgacaccgccgagauccgccugaugugcaccgagaccuaccuggacacgccccggcccgacgacggguccaucaccggcccgugcgagagcaacggggacaagggccacggcgggaucaagggcggguucgugcaccagcgcauggccuccaagaucggccggugguacagccgcaccauguccaagaccaagcggauggggauggagcucuacgugaaguacgacggcgaccccuggacggacagcgacgcgcuggcccccuccggcgucauggugagcauggaggagcccgggugguacuccuucggcuucgagauccgcgacaagaagugcgacgugccgugcaucgggaucgagaugguccacgacggcgggaagaagaccuggcacagcgccgccaccgccaucuacugccugaugggcuccggccagcuccugugggacaccgugacggggguggacauggcgcuguga

SEQ ID NO: 92702 - RNA, 1401 nt, Artificial Sequence
  derived and/or modified CDS sequence (opt1) from neuraminidase__InfluenzaB__ABL77325
augcugcccagcaccauccagacccucacgcuguuccugaccuccggcggggugcuccugagccuguacgucuccgcccuccugagcuacucccuguacagcgacauccuccugaaguucuccccgaccaagaccaucgcccccacgaugagccuggacugcgcgaacgccuccaacgugcaggccgugaaccacagcgccaccaagggcaugacccuccugcugcccgagcccgaguggaccuacccgcgccucuccugccaggggagcacguuccagaaggcccugcugaucagcccccaccgguucggcgagaccaaggggaacuccgcgccccucaucauccgcgagcccuucaucgccugcggcccgaaggagugcaagcacuucgcccugacccacuacgccgcgcagcccggcggguacuacaacggcacccgggaggaccgcaacaagcugcggcaccucaucuccgucagccuggggaagauccccacgguggagaacuccaucuuccacauggccgccuggagcggcuccgccugccacgacgggcgcgaguggaccuacaucggcguggacggccccgacagcaacgcccugaucaagaucaaguacggggaggcguacaccgacaccuaccacagcuacgccaacaacauccuccggacgcaggaguccgccugcaacugcaucggcggggacugcuaccugaugaucaccgacggcagcgccuccggcaucagcaagugccgcuuccugaagauccgggaggggcgcaucaucaaggagaucuucccgaccggccgggucgaccacaccgaggagugcacgugcggguucgccuccaacaagaccaucgagugcgcgugccgcgacaacagcuacaccgccaagcggcccuucgugaagcucaacguggagaccgacacggccgagauccgccugaugugcaccgagaccuaccuggacacgccccggcccgacgacggcuccaucaccgggccgugcgagagcaacggcgacaagggccgcgggggcaucaagggcggguucguccaccagcggauggccuccaagaucgggcgcugguacagccggaccauguccaagaccgagcgccucggcauggagcuguacgugaaguacgacggcgaccccuggaccgacagcgacgcccuggcgcccuccggggugauggucagcgccgaggagcccggcugguacuccuucggguucgagaucaaggacaagaagugcgacgugccgugcaucggcaucgagauggugcacgacgggggcaagaagacguggcacagcgccgccaccgccaucuacugccucaugggcuccgggcagcugcugugggacaccgucaccggcguggacauggcgcucuga

SEQ ID NO: 92703 - RNA, 1401 nt, Artificial Sequence
  derived and/or modified CDS sequence (opt1) from neuraminidase__InfluenzaB__ABL77336
augcugcccagcaccauccagacccucacgcuguuccugaccuccggcggggugcuccugagccuguacgucuccgccagccucuccuaccugcuguacagcgacauccuccugaaguucuccccgaccgagaucaccgccccgcccaugccccuggacugcgcgaacgccagcaacgugcaggccgugaaccgcuccgccacgaagggcgucacccuccugcugcccgagcccgaguggaccuacccccggcucagcugccccggguccaccuuccagaaggcccugcugaucagcccgcaccgcuucggcgagacgcgggggaacuccgcgccccucaucauccgcgagcccuucaucgccugcggccccaaggagugcaagcacuucgccaucacccacuacgccgcgcagccgggcggguacuacaacggcacccgggaggaccgcaacaagcugcggcaccugaucagcgugaagcucgggaagauccccaccguggagaacuccaucuuccacauggccgccuggagcggcuccgccugccacgacgggcgcgaguggacguacaucggcgucgacggccccgacagcaacgcccugcugaagaucaaguacggggaggcguacaccgacaccuaccacuccuacgccaacaacauccuccggacccaggagagcgccugcaacugcaucggcggggacugcuaccugaugaucacggacggcagcgccuccggcaucagcaagugccgcuuccugaagauccgggaggggcgcaucaucaaggagaucuuccccaccggccggguggagcacaccgaggagugcacgugcggguucgccuccaacaagaccaucgagugcgcgugccgcgacaacagcuacaccgccaagcggccguucgugaagcucaacgucgagaccgacaccgccgagauccgccugaugugcacggagaccuaccuggacacgccccggcccgacgacggcuccaucaccgggcccugcgagagcaacggcgacaagggccgcgggggcaucaagggcggguucgugcaccagcggauggccuccaagaucgggcgcugguacagccggaccauguccaagaccgaccgcaugggcauggagcucuacgugaaguacgacggcgacccguggaccgacagcgacgcccuggcgcuguccggggucauggugagcauggaggagcccggcugguacuccuucggguucgagaucaaggacaagaagugcgacgugcccugcaucggcaucgagaugguccacgacgggggcaagaagaccuggcacagcgccgccacgaccaucuacugccucaugggcuccgggcagcugcugugggacaccgugaccggcguggacauggcccucuga

SEQ ID NO: 92704 - RNA, 1401 nt, Artificial Sequence
  derived and/or modified CDS sequence (opt1) from neuraminidase__InfluenzaB__ABL77347
augcugcccagcaccauccagacccucacgcuguuccugaccuccggcggggugcuccugagccuguacgucuccgccagccucuccuaccugcuguacagcgacauccuccugaaguucuccccgaccaagaucaccgcccccacgaugccccuggacugcgcgaacgccagcaacgugcaggccgugaaccacuccgccaccaagggcgucacccuccugcugcccgagccggaguggaccuacccccgccucagcugccccggguccacguuccagaaggcccugcugaucagcccccaccgguucggcgagacccgcgggaacuccgcgccgcucaucauccgggagcccuucaucgccugcggccccaaggagugcaagcacuucgcccugacccacuacgccgcgcagcccggcggguacuacaacggcacccgcgaggaccggaacaagcugcgccaccucaucagcgugaagcuggggaagaucccgacgguggagaacuccaucuuccacauggccgccuggagcggcuccgccugccacgacgggcgggaguggaccuacaucggcgucgacggccccgacagcaacgcccugcucaagaucaaguacggggaggcguacaccgacaccuaccacuccuacgccaacaacauccugcgcacgcaggagagcgccugcaacugcaucggcggggacugcuaccugaugaucaccgacggcagcgccuccggcaucagcgagugccgguuccucaagauccgcgaggggcggaucaucaaggagaucuuccccaccggccgcguggagcacaccgaggagugcacgugcggguucgccuccaacaagaccaucgagugcgcgugccgggacaacagcuacaccgccaagcgccccuucgugaagcugaacgucgagaccgacacggccgagauccggcugaugugcaccgagaccuaccucgacaccccgcgccccgacgacggcuccaucacggggcccugcgagagcaacggcgacaagggcuccgggggcaucaagggcggguucgugcaccagcggauggccagcaagaucgggcgcugguacucccggaccaugagcaagaccaagcgcaugggcaugggccuguacgugaaguacgacggggaccccuggaccgacuccgacgcccuggcgcucagcggcgucaugguguccauggaggagccggggugguacagcuucggcuucgagaucaaggacaagaagugcgacgugcccugcaucgggaucgagaugguccacgacggcggcaagaagacguggcacuccgccgccaccgccaucuacugccugauggggagcggccagcugcucugggacaccgugaccgggguggacauggcccuguga

SEQ ID NO: 92705 - RNA, 1398 nt, Artificial Sequence
  derived and/or modified CDS sequence (opt1) from neuraminidase__InfluenzaB__ABL77380
augcugcccagcaccauccagacccucacgcuguuccugaccuccggcggggugcuccugagccuguacgucuccgcccuccugagcuaccugcucuacuccgacauccugcugaaguucagcccgaagaucaucgcccccaccaccucccucgacugcgcgaacgccagcaacgugcaggccgugaaccacuccgccacgaaggagaugaaguuccugccgcccgagcccgaguggaccuacccccgccugagcugccagggcuccaccuuccagaaggcccuccugaucagcccccaccgguucggggaggcgaagggcaacuccgcgccccugaucauccgcgagccguucaucgccugcgggcccaaggagugcaagcacuucgcccucacccacuacgccgcccagcccggcggcuacuacaacgggacgcgggaggaccgcaacaagcugcggcaccugaucagcgucaaccucggcaagauccccaccguggagaacuccaucuuccacauggccgccuggagcggguccgccugccacgacggccgcgaguggaccuacaucgggguggacggcccggacagcaacgcgcugaucaagaucaaguacggcgaggccuacaccgacacguaccacuccuacgccaacaacauccugcggacccaggagagcgccugcaacugcaucgggggcgacugcuaccucaugaucaccgacgggagcgccuccggcaucagcaagugccgcuuccugaagauccgggagggccgcaucaucaaggagaucuuccccaccgggcgggucgagcacacggaggagugcacgugcggcuucgcguccaacaagaccaucgagugcgccugccgcgacaacagcuacaccgccaagcggcccuucgugaagcugaacguggagaccgacaccgccgagauccgccucaugugcaccgagaccuaccuggacacgccccggccggacgacggguccaucaccggccccugcgagagcaacggggacaagggcuccggcggggucaagggcggguucgugcaccagcgcauggccagcaagaucggccggugguacucccgcaccaugagcaagaccaagcggauggggauggagcuguacgugaaguacgacggcgaccccuggacggacuccgacgcgcucgcccccagcggcgucaugguguccauggaggagccggggugguacagcuucggcuucgagaucaaggacaagaagugcgacgugcccugcaucgggaucgagaugguccacgacggcgggaagcgcaccuggcacuccgccgccaccgccaucuacugccugaugggcagcggccagcugcucugggacaccgugacgggggugaacauggcgcuguga

SEQ ID NO: 92706 - RNA, 1401 nt, Artificial Sequence
  derived and/or modified CDS sequence (opt1) from neuraminidase__InfluenzaB__ABL77391
augcugcccagcaccauccagacccucacgcuguuccugaccuccggcggggugcuccugagccuguacgucuccgccagccucuccuaccugcuguacagcgacauccuccugaaguucuccccgaccgagaucaccgcccccacgaugccccuggacugcgcgaacgccagcaacgugcaggccgugaaccgcuccgccaccaagggcgucacccuccugcugcccgagccggaguggaccuacccccggcucagcugccccggguccacguuccagaaggcccugcugaucagcccccaccgcuucggcgagaccaaggggaacuccgcgccgcucaucauccgggagcccuucaucgccugcggccccaaggagugcaagcacuucgcccugacccacuacgccgcgcagcccggcggguacuacaacggcacccgcggggaccggaacaagcugcgccaccucaucagcgugaagcugggcaagaucccgacgguggagaacuccaucuuccacauggccgccuggagcggguccgccugccacgacggcaaggaguggaccuacaucggcgucgacgggcccgacaacaacgcccugcucaagaucaaguacggcgaggcguacaccgacaccuaccacagcuacgccaacaacauccugcggacgcaggaguccgccugcaacugcaucgggggcaacugcuaccugaugaucaccgacggcagcgccagcgggguguccgagugccgcuuccucaagauccgggagggccgcaucaucaaggagaucuuccccaccgggcgggugaagcacaccgaggagugcacgugcggcuucgccagcaacaagaccaucgagugcgcgugccgcgacaacuccuacaccgccaagcggcccuucgucaagcugaacguggagaccgacacggccgagauccgccugaugugcaccgagaccuaccucgacaccccgcggcccgacgacgggagcaucacgggccccugcgaguccaacggcgacaaggggagcggcgggaucaagggcggguucgugcaccagcgcauggccuccaagaucggccggugguacagccgcaccauguccaagaccaagcggaugggcauggggcuguacgucaaguacgacggcgaccccugggccgacagcgacgcgcuggcccucuccggggugauggugagcauggaggagccgggcugguacuccuucggguucgagaucaaggacaagaagugcgacguccccugcaucggcaucgagauggugcacgacggcgggaaggagaccuggcacagcgccgccacggccaucuacugccugaugggcuccgggcagcugcucugggacaccgugaccggcgucgacauggcgcuguga

SEQ ID NO: 92707 - RNA, 1401 nt, Artificial Sequence
  derived and/or modified CDS sequence (opt1) from neuraminidase__InfluenzaB__ABL84344
augcugcccagcaccauccagacccucacgcuguuccugaccuccggcggggugcuccugagccuguacgucuccgccagccucuccuaccugcuguacagcgacauccuccugaaguucuccagcaccgagaucaccgccccgacgaugccccugaacugcgcgaacgccuccaacgugcaggccgugaaccacagcgccaccaagggcgucacccucccccugcccgagccggaguggaccuacccccgccuguccugccccgggagcacguuccagaaggcccuccugaucagcccccaccgguucggcgagaccaaggggaacuccgcgccgcugaucauccgcgagcccuucaucgccugcggccccaaggagugcaagcacuucgcccucacccacuacgccgcgcagcccggcggguacuacaacggcacccgggaggaccgcaacaagcugcggcaccugaucuccgugaagcucgggaagaucccgacgguggagaacagcaucuuccacauggccgccugguccggcagcgccugccacgacgggcgcgaguggaccuacaucggcgucgacggccccgacuccaacgcccugcugaagaucaaguacggggaggcguacaccgacaccuaccacagcuacgccaacaacauccuccggacgcaggagagcgccugcaacugcaucggcggggacugcuaccugaugaucaccgacggcuccgccagcggcguguccgagugccgcuuccugaagauccgggaggggcgcaucaucaaggagaucuuccccaccggccggguggagcacaccgaggagugcacgugcggguucgccagcaacaagaccaucgagugcgcgugccgcgacaacuccuacaccgccaagcggcccuucgucaagcucaacguggagaccgacacggccgagauccgccugaugugcaccgagaccuaccuggacaccccgcggcccgacgacggcagcaucacggggcccugcgaguccaacggcgacaagggcagcgggggcaucaagggcggguucgugcaccagcgcauggccuccaagaucgggcggugguacagccgcaccauguccaagaccaagcggaugggcaugggccucuacgucaaguacgacggggaccccuggaucgacagcgacgcccugacccuguccggcgugauggugagcauggaggagccggggugguacuccuucggcuucgagaucaaggacaagaagugcgacguccccugcaucgggaucgagauggugcacgacggcggcaaggagacguggcacagcgcggccaccgccaucuacugccucaugggguccggccagcugcugugggacaccgugaccggggucgacauggcccucuga

SEQ ID NO: 92708 - RNA, 1401 nt, Artificial Sequence
  derived and/or modified CDS sequence (opt1) from neuraminidase__InfluenzaB__ABN50397
augcugcccagcaccauccagacccucacgcuguuccugaccuccggcggggugcuccugagccuguacgucuccgccagccucuccuaccugcuguacagcgacauccuccugaaguucuccccgaccgagaucaccgcccccacgaugccccugaacugcgcgaacgccagcaacgugcaggccgugaaccgcuccgccaccaagggcgucacccuccugcugcccgagccggaguggaccuacccccggcucagcugccccggguccacguuccagaaggcccugcugaucagcccccaccgcuucggcgagaccaaggggaacuccgcgccgcucaucauccgggagcccuucaucgccugcggccccaaggagugcaagcacuucgcccugacccacuacgccgcgcagcccggcggguacuacaacggcacccgcgaggaccggaacaagcugcgccaccucaucagcgugaagcuggggaagaucccgacgguggagaacuccaucuuccacauggccgccuggagcggcuccgccugccacgacgggcgggaguggaccuacaucggcgucgacggccccgacagcaacgcccugcucaagaucaaguacggggaggcguacaccgacaccuaccacuccuacgccaacaacauccugcgcacgcaggagagcgccugcaacugcaucggcggggacugcuaccugaugaucaccgacggcagcgccuccggcaucagcgagugccgguuccucaagauccgcgaggggcggaucaucaaggagaucuuccccaccggccgcguggagcacaccgaggagugcacgugcggguucgccuccaacaagaccaucgagugcgcgugccgggacaacagcuacaccgccaagcgccccuucgugaagcugaacgucgagaccgacacggccgagauccggcugaugugcaccgagaccuaccucgacaccccgcgccccgacgacggcuccaucacggggcccugcgagagcaacggcgacaagggcuccgggggcaucaagggcggguucgugcaccagcggauggccagcaagaucgggcgcugguacucccggaccaugagcaagaccaagcgcaugggcaugggccuguacgugaaguacgacggggaccccuggaucgacuccgacgcccugacccucagcggcgucaugguguccauggaggagccggggugguacagcuucggcuucgagaucaaggacaagaagugcgacgugcccugcaucgggaucgagaugguccacgacggcggcaagaagacguggcacuccgcggccaccgccaucuacugccugauggggagcggccagcugcucugggacaccgugaccgggguggacauggaccuguga

SEQ ID NO: 92709 - RNA, 1401 nt, Artificial Sequence
  derived and/or modified CDS sequence (opt1) from neuraminidase__InfluenzaB__ABN50408
augcugcccagcaccauccagacccucacgcuguuccugaccuccggcggggugcuccugagccuguacgucuccgccagccucuccuaccugcuguacagcgacauccuccugaaguucuccccgaccgagaucaccgcccccacgaugccccugaacugcgcgaacgccagcaacgugcaggccgugaaccgcuccgccaccaagggcgucacccucccccugccggagcccgaguggaccuacccccggcugagcugccccggguccacguuccagaaggcccuccugaucagcccgcaccgcuucggcgagaccaaggggaacuccgcgccccugaucauccgggagcccuucaucgccugcggccccaaggagugcaagcacuucgcccucacccacuacgccgcgcagccgggcggguacuacaacggcacccgcgaggaccggaacaagcugcgccaccugaucagcgugaagcucgggaagauccccacgguggagaacuccaucuuccacauggccgccuggagcggcuccgccugccacgacgggcgggaguggaccuacaucggcgucgacggccccgacagcaacgcccugcugaagaucaaguacggggaggcguacaccgacaccuaccacuccuacgccaacaacauccuccgcacgcaggagagcgccugcaacugcaucggcggggacugcuaccugaugaucaccgacggcagcgccuccggcaucagcgagugccgguuccugaagauccgcgaggggcggaucaucaaggagaucuuccccaccggccgcguggagcacaccgaggagugcacgugcggguucgccuccaacaagaccaucgagugcgcgugccgggacaacagcuacaccgccaagcgcccguucgugaagcucaacgucgagaccgacacggccgagauccggcugaugugcaccgagaccuaccuggacacgccccgccccgacgacggcuccaucaccgggcccugcgagagcaacggcgacaagggcuccgggggcaucaagggcggguucgugcaccagcggauggccagcaagaucgggcgcugguacucccggaccaugagcaagaccaagcgcaugggcaugggccucuacgugaaguacgacggggacccguggaucgacuccgacgcccugacccugagcggcgucaugguguccauggaggagcccgggugguacagcuucggcuucgagaucaaggacaagaagugcgacgugcccugcaucgggaucgagaugguccacgacggcggcaagaagacguggcacuccgcggccaccgccaucuacugccucauggggagcggccagcugcugugggacaccgugaccgggguggacauggcccucuga

SEQ ID NO: 92710 - RNA, 1401 nt, Artificial Sequence
  derived and/or modified CDS sequence (opt1) from neuraminidase__InfluenzaB__ABN50419
augcugcccagcaccauccagacccucacgcuguuccugaccuccggcggggugcuccugagccuguacgucuccgccagccucuccuaccugcuguacagcgacauccuccugaaguucuccccgaccgagaucaccgcccccacgaugccccuggacugcgcgaacgccagcaacgugcaggccgugaaccgcuccgccaccaagggcgucacccuccugcugcccgagccggaguggaccuacccccggcucagcugccccggguccacguuccagaaggcccugcugaucagcccccaccgcuucggcgagaccaaggggaacuccgcgccgcucaucauccgggagcccuucaucgccugcggccccaaggagugcaagcacuucgcccugacccacuacgccgcgcagcccggcggguacuacaacggcacccgcggggaccggaacaagcugcgccaccucaucagcgugaagcugggcaagaucccgacgguggagaacuccaucuuccacauggccgccuggagcggguccgccugccacgacggcaaggaguggaccuacaucggcgucgacgggcccgacagcaacgcccugcucaagaucaaguacggcgaggcguacaccgacaccuaccacuccuacgccaacaacauccugcggacgcaggagagcgccugcaacugcaucgggggcaacugcuaccugaugaucaccgacggcagcgccuccgggaucagcgagugccgcuuccucaagauccgggagggccgcaucaucaaggagaucuuccccaccgggcgggugaagcacaccgaggagugcacgugcggcuucgccuccaacaagaccaucgagugcgcgugccgcgacaacagcuacaccgccaagcggcccuucgugaagcugaacgucgagaccgacacggccgagauccgccugaugugcaccgagaccuaccucgacaccccgcggcccgacgacggguccaucacgggccugugcgagagcaacggcgacaagggguccggcgggaucaagggcggguucgugcaccagcgcauggccagcaagaucggccggugguacucccgcaccaugagcaagaccaagcggaugggcauggggcuguacgugaaguacgacggcgaccccuggaccgacuccgacgcccucgcgcugagcggggucaugguguccauggaggagcccggcugguacagcuucggguucgagaucaaggacaagaagugcgacgugccgugcaucggcaucgagaugguccacgacggcgggaaggagacguggcacuccgccgccaccgccaucuacugccugaugggcagcgggcagcuccugugggacaccgugaccggcguggacauggcccuguga

SEQ ID NO: 92711 - RNA, 1401 nt, Artificial Sequence
  derived and/or modified CDS sequence (opt1) from neuraminidase__InfluenzaB__ABN50430
augcugcccagcaccauccagacccucacgcuguuccugaccuccggcggggugcuccugagccuguacgucuccgccagccucuccuaccugcuguacagcgacauccuccugaaguucuccccgaccgagaucaccgcccccacgaugccccuggacugcgcgaacgccagcaacgugcaggccgugaaccgcuccgccaccaagggcgucacccuccugcugcccgagccggaguggaccuacccccggcucagcugccccggguccacguuccagaaggcccugcugaucagcccccaccgcuucggcgagaccaaggggaacuccgcgccgcucaucauccgggagcccuucaucgccugcggccccaaggagugcaagcacuucgcccugacccacuacgccgcgcagcccggcggguacuacaacggcacccgcggggaccggaacaagcugcgccaccucaucagcgugaagcugggcaagaucccgacgguggagaacuccaucuuccacauggccgccuggagcggguccgccugccacgacggcaaggaguggaccuacaucggcgucgacgggcccgacagcaacgcccugcucaagaucaaguacggcgaggcguacaccgacaccuaccacuccuacgccaacaacauccugcggacgcaggagagcgccugcaacugcaucgggggcaacugcuaccugaugaucaccgacggcagcgccuccgggaucagcgagugccgcuuccucaagauccgggagggccgcaucaucaaggagaucuuccccaccgggcgggugaagcacaccgaggagugcacgugcggcuucgccuccaacaagaccaucgagugcgcgugccgcgacaacagcuacaccgccaagcggcccuucgugaagcugaacgucgagaccgacacggccgagauccgccugaugugcaccgagaccuaccucgacaccccgcggcccgacgacggguccaucacgggccccugcgagagcaacggcgacaagggguccggcgggaucaagggcggguucgugcaccagcgcauggccagcaagaucggccggugguacucccgcaccaugagcaagaccaagcggaugggcauggggcuguacgugaaguacgacggcgaccccuggaccgacuccgacgcccuggcgcucagcggggucaugguguccauggaggagccgggcugguacagcuucggguucgagaucaaggacaagaagugcgacgugcccugcaucggcaucgagaugguccacgacggcgggaaggagacguggcacuccgccgccaccgccaucuacugccugaugggcagcgggcagcugcucugggacaccgugaccggcguggacauggcccuguga

SEQ ID NO: 92712 - RNA, 1401 nt, Artificial Sequence; identical to SEQ ID NO: 92694
  derived and/or modified CDS sequence (opt1) from neuraminidase__InfluenzaB__ABN50463

SEQ ID NO: 92713 - RNA, 1401 nt, Artificial Sequence; identical to SEQ ID NO: 92608
  derived and/or modified CDS sequence (opt1) from neuraminidase__InfluenzaB__ABN50474

SEQ ID NO: 92714 - RNA, 1401 nt, Artificial Sequence
  derived and/or modified CDS sequence (opt1) from neuraminidase__InfluenzaB__ABN50485
augcugcccagcaccauccagacccucacgcuguuccugaccuccggcggggugcuccugagccuguacgucuccgccagccucuccuaccugcuguacagcgacauccuccugaaguucuccccgaccgagaucaccgcccccacgaugccccuggacugcgcgaacgccagcaacgugcaggccgugaaccgcuccgccaccaagggcgucacccuccugcugcccgagccggaguggaccuacccccggcucagcugccccggguccacguuccagaaggcccugcugaucagcccccaccgcuucggcgagaccaaggggaacuccgcgccgcucaucauccgggagcccuucaucgccugcggccccaaggagugcaagcacuucgcccugacccacuacgccgcgcagcccggcggguacuacaacggcacccgcggggaccggaacaagcugcgccaccucaucagcgugaagcugggcaagaucccgacgguggagaacuccaucuuccacauggccgccuggagcggguccgccugccacgacggcaaggaguggaccuacaucggcgucgacgggcccgacagcaacgcccugcucaagaucaaguacggcgaggcguacaccgacaccuaccacuccuacgccaacaacauccugcggacgcaggagagcgccugcaacugcaucgggggcaacugcuaccugaugaucaccgacggcagcgccuccgggaucagcgagugccgcuuccucaagauccgggagggccgcaucaucaaggagaucuuccccaccgggcgggugaagcacaccgaggagugcacgugcggcuucgccuccaacaagaccaucgagugcgcgugccgcgacaacagcuacaccgccaagcggcccuucgugaagcugaacgucgagaccgacacggccgagauccgccugaugugcaccgagaccuaccucgacaccccgcggcccgacgacggguccaucacgggccccugcgaguucaacggcgacaaggggagcggcgggaucaagggcggguucgugcaccagcgcauggccuccaagaucggccggugguacagccgcaccauguccaagaccaagcggaugggcauggggcuguacgugaaguacgacggcgaccccuggaccgacagcgacgcccuggcgcucuccggggucauggugagcauggaggagccgggcugguacuccuucggguucgagaucaaggacaagaagugcgacgugcccugcaucggcaucgagaugguccacgacggcgggaaggagacguggcacagcgccgccaccgccaucuacugccugaugggcuccgggcagcugcucugggacaccgugaccggcguggacauggcccuguga

SEQ ID NO: 92715 - RNA, 1401 nt, Artificial Sequence
  derived and/or modified CDS sequence (opt1) from neuraminidase__InfluenzaB__ABN50496
augcugcccagcaccauccagacccucacgcuguuccugaccuccggcggggugcuccugagccuguacgucuccgccagccucuccuaccugcuguacagcgacauccuccugaaguucccguccaccgagaucaccgcccccacgaugccccuggacugcgcgaacgccagcaacgugcaggccgugaaccgcuccgccaccaagcgggucacccuccugcugcccgagccggaguggaccuacccccgccucagcugccccggcuccacguuccagaaggcccugcugaucagcccccaccgguucggggagaccaagggcaacuccgcgccgcucaucauccgcgagcccuucaucgccugcgggcccaaggagugcaagcacuucgcccugacccacuacgccgcgcagcccggcggcuacuacaacgggacccggggcgaccgcaacaagcugcggcaccucaucagcgugaagcuggggaagaucccgacgguggagaacuccaucuuccacauggccgccuggagcggcuccgccugccacgacgggaaggaguggaccuacaucggcgucgacggccccgacaacaacgcccugcucaagaucaaguacggggaggcguacaccgacaccuaccacagcuacgccaacaacauccugcgcacgcaggaguccgccugcaacugcaucggcgggaacugcuaccugaugaucaccgacggcagcgccagcggcguguccgagugccgguuccucaagauccgcgaggggcggaucaucaaggagaucuuccccaccggccgcaucaagcacaccgaggagugcacgugcggguucgccagcaacaagaccaucgagugcgcgugccgggacaacuccuacaccgccaagcgccccuucgugaagcugaacgucgagaccgacacggccgagauccggcugaugugcaccgagaccuaccucgacaccccgcgccccgacgacggcagcaucacggggcccugcgaguccaacggcgacaagggcagcgggggcaucaagggcggguucgugcaccagcggauggccuccaagaucgggcgcugguacagccggaccauguccaagaccaagcgcaugggcaugggccuguacgugaaguacgacggggaccccugggccgacagcgacgcgcuggccuucuccggcgucauggugagcauggaggagccggggugguacuccuucggcuucgagaucaaggacaagaagugcgacgugcccugcaucgggaucgagaugguccacgacggcggcaaggagaccuggcacagcgccgccacggccaucuacugccucaugggguccggccagcugcugugggacaccgugaccggggugaacauggcgcucuga

SEQ ID NO: 92716 - RNA, 1401 nt, Artificial Sequence
  derived and/or modified CDS sequence (opt1) from neuraminidase__InfluenzaB__ABN50507
augcugcccagcaccauccagacccucacgcuguuccugaccuccggcggggugcuccugagccuguacgucuccgccagccucuccuaccugcuguacagcgacauccuccugaaguucuccccgaccgagaucaccgcccccacgaugccccugaacugcgcgaacgccagcaacgugcaggccgugaaccgcuccgccaccaagggcgucacccucccccugccggagcccgaguggaccuacccccggcugagcugccccggguccacguuccagaaggcccuccugaucagcccgcaccgcuucggcgagaccaaggggaacuccgcgccccugaucauccgggagcccuucaucgccugcggccccaaggagugccgccacuucgcccucacccacuacgccgcgcagccgggcggguacuacaacggcacccgggaggaccgcaacaagcugcggcaccugaucagcgugaagcucgggaagauccccacgguggagaacuccaucuuccacauggccgccuggagcggcuccgccugccacgacgggcgcgaguggaccuacaucggcgucgacggccccgacagcaacgcccugcugaagaucaaguacggggaggcguacaccgacaccuaccacuccuacgccaacaacauccuccggacgcaggagagcgccugcaacugcaucggcggggacugcuaccugaugaucaccgacggcagcgccuccggcaucagcgagugccgcuuccugaagauccgggaggggcgcaucaucaaggagaucuuccccaccggccggguggagcacaccgaggagugcacgugcggguucgccuccaacaagaccaucgagugcgcgugccgcgacaacagcuacaccgccaagcggccguucgugaagcucaacgucgagaccgacacggccgagauccgccugaugugcaccgagaccuaccuggacacgccccggcccgacgacggcuccaucaccgggcccugcgagagcaacggcgacaagggcuccgggggcaucaagggcggguucgugcaccagcgcauggccagcaagaucgggcggugguacucccgcaccaugagcaagaccaagcggaugggcaugggccucuacgugaaguacgacggggacccguggaucgacuccgacgcccugacccugagcggcgucaugguguccauggaggagcccgggugguacagcuucggcuucgagaucaaggacaagaagugcgacgugcccugcaucgggaucgagaugguccacgacggcggcaagaagacguggcacuccgcggccaccgccaucuacugccucauggggagcggccagcugcugugggacaccgugaccgggguggacauggcccucuga

SEQ ID NO: 92717 - RNA, 1401 nt, Artificial Sequence; identical to SEQ ID NO: 92615
  derived and/or modified CDS sequence (opt1) from neuraminidase__InfluenzaB__ABN50518

SEQ ID NO: 92718 - RNA, 1401 nt, Artificial Sequence; identical to SEQ ID NO: 92615
  derived and/or modified CDS sequence (opt1) from neuraminidase__InfluenzaB__ABN50529

SEQ ID NO: 92719 - RNA, 1401 nt, Artificial Sequence; identical to SEQ ID NO: 92608
  derived and/or modified CDS sequence (opt1) from neuraminidase__InfluenzaB__ABN50540

SEQ ID NO: 92720 - RNA, 1401 nt, Artificial Sequence; identical to SEQ ID NO: 92640
  derived and/or modified CDS sequence (opt1) from neuraminidase__InfluenzaB__ABN50551

SEQ ID NO: 92721 - RNA, 1401 nt, Artificial Sequence
  derived and/or modified CDS sequence (opt1) from neuraminidase__InfluenzaB__ABN50562
augcugcccagcaccauccagacccucacgcuguuccugaccuccggcggggcccuccugagccuguacguguccgcccuccugagcuaccugcucuacuccgacauccugcugaaguucagcccgaccaaggucaucgcgcccaccaugucccucgacuacacgaacgccagcaacgugcaggccgugaaccacuccgccaccgaggagaugaccuuccugcugcccgagcccgaguggaccuacccgcgccucagcugccagggcuccacguuccagaaggcccugcugaucagcccccaccgguucggggaggcgaagggcaacuccgcgccccucaucauccgcgagcccuucaucgccugcgggccgaaggagugcaagcacuucgcccugacccacuacgccgcccagcccggcggcuacuacaacgggacccgggaggaccgcaacaagcugcggcaccucaucagcgucaaccugggcaagauccccaccguggagaacuccaucuuccacauggccgccuggagcggguccgccugccacgacggccgcgaguggacguacaucgggguggacggccccgacagcaacgcgcugaucaagaucaaguacggcgaggccuacaccgacaccuaccacuccuacgccaacaacauccuccggacccaggagagcgccugcaacugcaucgggggcgacugcuaccugaugaucacggacgggagcgccuccggcaucagccgcugccgguuccugaagauccgcgagggccggaucaucaaggagaucuucccgaccgggcgcgucgagcacaccgaggagugcacgugcggcuucgcguccaacaagaccaucgagugcgccugccgggacaacagcuacaccgccaagcgccccuucgugaagcucaacguggagaccgacaccgccgagauccggcugaugugcacggagaccuaccuggacacgccccgccccgacgacggguccaucaccggcccgugcgagagcaacggggacaagggcaacggcgggaucaagggcggguucguccaccagcggauggccucccgcaucggccggugguacagccgcaccauguccaagaccaagcggauggggauggagcucuacgugaaguacgacggcgaccccuggaccgacagcgacgcgcuggcccccuccggcgugauggucagcauggaggagcccgggugguacuccuucggcuucgagaucaaggacaagaagugcgacgugccgugcaucgggaucgagauggugcacgacggcgggaagaagaccuggcacagcgccgccacggccaucuacugccugaugggcuccggccagcuccugugggacaccgucaccgggguggacauggcgcuguga

SEQ ID NO: 92722 - RNA, 1401 nt, Artificial Sequence; identical to SEQ ID NO: 92711
  derived and/or modified CDS sequence (opt1) from neuraminidase__InfluenzaB__ABN50573

SEQ ID NO: 92723 - RNA, 1401 nt, Artificial Sequence
  derived and/or modified CDS sequence (opt1) from neuraminidase__InfluenzaB__ABN50584
augcugcccagcaccauccagacccucacgcuguuccugaccuccggcggggugcuccugagccuguacgucuccgccagccucuccuaccugcuguacagcgacauccuccugaaguucuccccgaccgagaucaccgccagcacgaugccccuggacugcgcgaacgccuccaacgugcaggccgugaaccgcagcgccaccaagggcgucacccuccugcugcccgagcccgaguggaccuacccgcggcucuccugccccgggagcacguuccagaaggcccugcugaucagcccccaccgcuucggcgagaccaaggggaacuccgcgccccucaucauccgggagccguucaucgccugcggccccaacgagugcaagcacuucgcccugacccacuacgccgcgcagcccggcggguacuacaacggcacccgcggggaccggaacaagcugcgccaccucaucuccgugaagcugggcaagauccccacgguggagaacagcaucuuccacauggccgccugguccgggagcgccugccacgacggcaaggaguggaccuacaucggcgucgacgggccggacaacaacgcccugcucaagaucaaguacggcgaggcguacaccgacaccuaccacuccuacgccaacaacauccugcggacgcaggagagcgccugcaacugcaucgggggcaacugcuaccugaugaucaccgacggcagcgccuccggggugagcgagugccgcuuccucaagauccgggagggccgcaucaucaaggagaucuuccccaccgggcgggugaagcacaccgaggagugcacgugcggcuucgccuccaacaagaccaucgagugcgcgugccgcgacaacagcuacaccgccaagcggcccuucgucaagcugaacguggaguccgacaccgccgagauccgccugaugugcacggagaccuaccucgacacgccccggccggacgacgggagcaucaccggccccugcgaguccaacggcgacaaggggagcggcgggaucaagggcggguucgugcaccagcgcauggccuccaagaucggccggugguacagccgcaccauguccaagaccgagcggaugggcauggggcuguacgucaaguacgacggcgaccccugggccgacagcgacgcgcuggcccucuccggggugauggugagcauggaggagcccggcugguacuccuucggguucgagaucaaggacaagaagugcgacgucccgugcaucggcaucgagauggugcacgacggcgggaaggagaccuggcacagcgccgccaccgccaucuacugccugaugggcuccgggcagcugcucugggacacggugaccggcgucgacauggcgcuguga

SEQ ID NO: 92724 - RNA, 1401 nt, Artificial Sequence; identical to SEQ ID NO: 92608
  derived and/or modified CDS sequence (opt1) from neuraminidase__InfluenzaB__ABN50595

SEQ ID NO: 92725 - RNA, 1398 nt, Artificial Sequence
  derived and/or modified CDS sequence (opt1) from neuraminidase__InfluenzaB__ABN50606
augcugcccagcaccauccagacccucacgcuguuccugaccuccggcggggugcuccugagccuguacgucuccgccagccucuccuaccugcuguacagcgacauccuccugcgcuucuccagcaagaucaccgccccgaccaugacgcuggacugcgcgaacgccuccaacgugcaggccgugaaccggagcgccaccaaggagaugaccuuccuccugcccgagcccgaguggaccuacccccgccuguccugccagggcagcacguuccagaaggcccuccugaucuccccgcaccgguucggggaggcgcgcggcaacagcgcgccccugaucauccgggagcccuucaucgccugcgggcccaaggagugcaagcacuucgcccucacccacuacgccgcccagccgggcggcuacuacaacgggacccgcgaggaccggaacaagcugcgccaccugaucuccgucaagcucggcaagauccccaccguggagaacagcaucuuccacauggccgccugguccgggagcgccugccacgacggccgggaguggacguacaucgggguggacggccccgacuccaacgcgcugaucaagaucaaguacggcgaggccuacaccgacaccuaccacagcuacgccaacaacauccugcgcacccaggagagcgccugcaacugcaucgggggcgacugcuaccucaugaucacggacggguccgccagcggcaucuccgagugccgguuccugaagauccgcgagggccggaucaucaaggagaucuuccccaccgggcgcgucgagcacaccgaggagugcacgugcggcuucgcgagcaacaagaccaucgagugcgccugccgggacaacuccuacaccgccaagcgcccguucgugaagcugaacguggagaccgacaccgccgagauccggcucaugugcacggagaccuaccuggacacgccccgccccgacgacgggagcaucaccggccccugcgaguccgacggggacaagggccggggcgggaucaagggcggguucguccaccagcgcauggccagcaagaucggccggugguacucccgcaccaugagcaagaccgagcgcauggggauggagcuguacgugaaguacgacggcgacccguggaccgacuccgacgcgcucgcccccagcggcgugauggucuccaugaaggagcccgggugguacagcuucggcuucgagaucaaggacaagaagugcgacgugcccugcaucgggaucgagauggugcacgacggcgggaagaagaccuggcacuccgccgccacggccaucuacugccugaugggcagcggccagcugcucugggacaccgucaccgggguggacauggcgcuguga

SEQ ID NO: 92726 - RNA, 1398 nt, Artificial Sequence
  derived and/or modified CDS sequence (opt1) from neuraminidase__InfluenzaB__ABN50628
augcugcccagcaccauccagacccucacgcuguuccugaccuccggcggggugcuccugagccuguacgucuccgcccuccugagcuaccugcucuacuccgacauccugcugaaguucagcccgaagaucaucgcccccaccaugucccucgacugcgcgaacgccagcaacgugcaggccgugaaccacuccgccaccaaggagaugacguuccugcugcccgagcccgaguggaccuacccgcgccucagcugccagggcuccaccuuccagaaggcccugcugaucagcccccaccgguucggggaggcgaagggcaacuccgcgccccucaucauccgcgagcccuucaucgccugcgggccgaaggagugcaagcacuucgcccugacccacuacgccgcccagcccggcggcuacuacaacgggacgcgggaggaccgcaacaagcugcggcaccucaucagcgucaaccugggcaagauccccaccguggagaacuccaucuuccacauggccgccuggagcggguccgccugccacgacggccgcgaguggaccuacaucgggguggacggccccgacagcaacgcgcugaucaagaucaaguacggcgaggccuacaccgacacguaccacuccuacgccaacaacauccuccggacccaggagagcgccugcaacugcaucgggggcgacugcuaccugaugaucaccgacgggagcgccuccggcaucagcaagugccgcuuccugaagauccgggagggccgcaucaucaaggagaucuucccgaccgggcgggucgagcacacggaggagugcacgugcggcuucgcguccaacaagaccaucgagugcgccugccgcgacaacagcuacaccgccaagcggcccuucgugaagcucaacguggagaccgacaccgccgagauccgccugaugugcaccgagaccuaccuggacacgccccggcccgacgacggguccaucaccggcccgugcgagagcaacggggacaagggccgcggcggggucaagggcggguucgugcaccagcggauggccuccaagaucggccgcugguacagccggaccauguccaagaccgagcgcauggggauggagcucuacgugaaguacgacggcgaccccuggacggacagcgacgcgcuggcccccuccggcgucauggugagcauggaggagcccgggugguacuccuucggcuucgagaucaaggacaagaagugcgacgugccgugcaucgggaucgagaugguccacgacggcgggaagaagaccuggcacagcgccgccaccgccaucuacugccugaugggcuccggccagcuccugugggacaccgugacggggguggacauggcgcuguga

SEQ ID NO: 92727 - RNA, 1398 nt, Artificial Sequence
  derived and/or modified CDS sequence (opt1) from neuraminidase__InfluenzaB__ABN50639
augcugcccagcaccauccagacccucacgcuguuccugaccuccggcggggugcuccugagccuguacgucuccgcccuccugagcuaccugcucuacuccgacauccugcugaaguucagcccgaagaucaucgcccccaccaugucccucgacugcgcgaacgccagcaacgugcaggccgugaaccacuccgccaccaaggagaugacguuccugcugcccgagcccgaguggaccuacccgcgccucagcugccagggcuccaccuuccagaaggcccugcugaucagcccccaccgguucggggaggcgaagggcaacuccgcgccccucaucauccgcgagcccuucaucgccugcgggccgaaggagugcaagcacuucgcccugacccacuacgccgcccagcccggcggcuacuacaacgggacgcgggaggaccgcaacaagcugcggcaccucaucagcgucaagcugggcaagauccccaccguggagaacuccaucuuccacauggccgccuggagcggguccgccugccacgacggccgcgaguggaccuacaucgggguggacggccccgacagcaacgcgcuggucaagaucaaguacggcgaggccuacaccgacacguaccacuccuacgccaacaacauccuccggacccaggagagcgccugcaacugcaucgggggcgacugcuaccugaugaucaccgacgggagcgccuccggcaucagcaagugccgcuuccugaagauccgggagggccgcaucaucaaggagaucuucccgaccgggcggguggagcacacggaggagugcacgugcggcuucgcguccaacaagaccaucgagugcgccugccgcgacaacagcuacaccgccaagcggcccuucgugaagcucaacgucgagaccgacaccgccgagauccgccugaugugcaccgagaccuaccuggacacgccccggcccgacgacggguccaucaccggcccgugcgagagcaacggggacaagggccgcggcggggugaagggcggguucgugcaccagcggauggccuccaagaucggccgcugguacagccggaccauguccaagaccgagcgcauggggauggagcucuacgucaaguacgacggcgaccccuggacggacagcgacgcgcuggcccccuccggcgugauggugagcauggaggagcccgggugguacuccuucggcuucgagaucaaggacaagaagugcgacgucccgugcaucgggaucgagauggugcacgacggcgggaagaagaccuggcacagcgccgccaccgccaucuacugccugaugggcuccggccagcuccugugggacaccgugacgggggucgacauggcgcuguga

SEQ ID NO: 92728 - RNA, 1398 nt, Artificial Sequence
  derived and/or modified CDS sequence (opt1) from neuraminidase__InfluenzaB__ABN50650
augcugcccagcaccauccagacccucacgcuguuccugaccuccggcggggugcuccugagccuguacgucuccgcccuccugagcuaccugcucuacuccgacgugcugcugaaguucagcccgaagaucaucgcccccaccaugucccucgacugcgcgaacgccagcaacgugcaggccgucaaccacuccgccaccgaggagaugacguuccugcugcccgagcccgaguggaccuacccgcgccucagcugccagggcuccaccuuccagaaggcccugcugaucagcccccaccgguucggggaggcgaagggcaacuccgcgccccucaucauccgcgagcccuucaucgccugcgggccgaaggagugcaagcacuucgcccugacccacuacgccgcccagcccggcggcuacuacaacgggacgcgggaggaccgcaacaagcugcggcaccucaucagcgugaaccugggcaagauccccaccguggagaacuccaucuuccacauggccgccuggagcggguccgccugccacgacggccgcgaguggaccuacaucggggucgacggccccgacagcaacgcgcugaucaagaucaaguacggcgaggccuacaccgacacguaccacuccuacgccaacaacauccuccggacccaggagagcgccugcaacugcaucgggggcgacugcuaccugaugaucaccgacgggagcgccuccggcaucagcaagugccgcuuccugaagauccgggagggccgcaucaucaaggagaucuucccgaccgggcggguggagcacacggaggagugcacgugcggcuucgcguccaacaagaccaucgagugcgccugccgcgacaacagcuacaccgccaagcggcccuucgugaagcucaacgucgagaccgacaccgccgagauccgccugaugugcaccgagaccuaccuggacacgccccggcccgacgacggguccaucaccggcccgugcgagagcaacggggacaagggccacggcgggaucaagggcggguucgugcaccagcgcauggccuccaagaucggccggugguacagccgcaccauguccaagaccaagcggauggggauggagcucuacgugaaguacgacggcgaccccuggacggacagcgacgcgcuggcccccuccggcgucauggugagcauggaggagcccgggugguacuccuucggcuucgagaucaaggacaagaagugcgacgugccgugcaucgggaucgagaugguccacgacggcgggaagaagaccuggcacagcgccgccaccgccaucuacugccugaugggcuccggccagcuccugugggacaccgugacggggguggacauggcgcuguga

SEQ ID NO: 92729 - RNA, 1398 nt, Artificial Sequence
  derived and/or modified CDS sequence (opt1) from neuraminidase__InfluenzaB__ABN50661
augcugcccagcaccauccagacccucacgcuguuccugaccuccggcggggugcuccugagccuguacgucuccgcccuccugagcuaccugcucuacuccgacgugcugcugaaguucagcccgaagaugaucgcccccaccaugucccucgacugcgcgaacgccagcaacgugcaggccgucaaccacuccgccaccgaggagaugacguuccugcugcccgagcccgaguggaccuacccgcgccucagcugccagggcuccaccuuccagaaggcccugcugaucagcccccaccgguucggggaggcgaagggcaacuccgcgccccucaucauccgcgagcccuucaucgccugcgggccgaaggagugcaagcacuucgcccugacccacuacgccgcccagcccggcggcuacuacaacgggacgcgggaggaccgcaacaagcugcggcaccucaucagcgugaaccugggcaagauccccaccguggagaacuccaucuuccacauggccgccuggagcggguccgccugccacgacggccgcgaguggaccuacaucggggucgacggccccgacagcaacgcgcugaucaagaucaaguacggcgaggccuacaccgacacguaccacuccuacgccaacaacauccuccggacccaggagagcgccugcaacugcaucgggggcgacugcuaccugaugaucaccgacgggagcgccuccggcaucagcaagugccgcuuccugaagauccgggagggccgcaucaucaaggagaucuucccgaccgggcggguggagcacacggaggagugcacgugcggcuucgcguccaacaagaccaucgagugcgccugccgcgacaacagcuacaccgccaagcggcccuucgugaagcucaacgucgagaccgacaccgccgagauccgccugaugugcaccgagaccuaccuggacacgccccggcccgacgacggguccaucaccggcccgugcgagagcaacggggacaagggccacggcgggaucaagggcggguucgugcaccagcgcauggccuccaagaucggccggugguacagccgcaccauguccaagaccaagcggauggggauggagcucuacgugaaguacgacggcgaccccuggacggacagcgacgcgcuggcccccuccggcgucauggugagcauggaggagcccgggugguacuccuucggcuucgagaucaaggacaagaagugcgacgugccgugcaucgggaucgagaugguccacgacggcgggaagaagaccuggcacagcgccgccaccgccaucuacugccugaugggcuccggccagcuccugugggacaccgugacggggguggacauggcgcuguga

SEQ ID NO: 92730 - RNA, 1401 nt, Artificial Sequence
  derived and/or modified CDS sequence (opt1) from neuraminidase__InfluenzaB__ABN50683
augcugcccagcaccauccagacccucacgcuguuccugaccuccggcggggugcuccugagccuguacgucuccgccagccucuccuaccugcuguacagcgacauccuccugaaguucuccccgaccgagaucaccgcccccacgaugccccuggacugcgcgaacgccagcaacgugcaggccgugaaccgcuccgccaccaagggcgucacccuccugcugcccgagccggaguggaccuacccccggcucagcugccccggguccacguuccagaaggcccugcugaucagcccccaccgcuucggcgagacccgggggaacuccgcgccgcucaucauccgcgagcccuucaucgccugcggccccaaggagugcaagcacuucgcccugacccacuacgccgcgcagcccggcggguacuacaacggcacccgggaggaccgcaacaagcugcggcaccucaucagcgugaagcuggggaagaucccgacgguggagaacuccaucuuccacauggccgccuggagcggcuccgccugccacgacgggcgcgaguggaccuacaucggcgucgacggccccgacagcaacgcccugcucaagaucaaguacggggaggcguacaccgacaccuaccacuccuacgccaacaacauccugcggacgcaggagagcgccugcaacugcaucggcggggacugcuaccugaugaucaccgacggcagcgccuccggcaucagcaagugccgcuuccucaagauccgggaggggcgcaucaucaaggagaucuuccccaccggccggguggagcacaccgaggagugcacgugcggguucgccuccaacaagaccaucgagugcgcgugccgcgacaacagcuacaccgccaagcggcccuucgugaagcugaacgucgagaccgacacggccgagauccgccugaugugcaccgagaccuaccucgacaccccgcggcccgacgacggcuccaucacggggcccugcgagagcaacggcgacaagggccucgggggcaucaagggcggguucgugcaccagcgcauggccuccaagaucgggcggugguacagccgcaccauguccaagaccaagcggaugggcauggagcuguacgugaaguacgacggcgaccccuggaccgacagcgacgcccuggcgcuguccggggucauggugccgauggaggagcccggcugguacagcuucggguucgagaucaaggacaagaagugcgacgugcccugcaucggcaucgagaugguccacgacgggggcaagaagacguggcacuccgccgccaccgccaucuacugccugaugggcagcgggcagcuccugugggacaccgugaccggcguggacauggcccuguga

SEQ ID NO: 92731 - RNA, 1401 nt, Artificial Sequence
  derived and/or modified CDS sequence (opt1) from neuraminidase__InfluenzaB__ABN50694
augcugcccagcaccauccagacccucacgcuguuccugaccuccggcggggugcuccugagccuguacgucuccgccagccucuccuaccugcuguacagcgacauccuccugaaguucuccccgaccgagaucaccgcccccacgaugccccuggacugcgcgaacgccagcaacgugcaggccgugaaccgcuccgccaccaagggcgucacccuccugcugcccgagccggaguggaccuacccccggcucagcugccccggguccacguuccagaaggcccugcugaucagcccccaccgcuucggcgagacccgggggaacuccgcgccgcucaucauccgcgagcccuucaucgccugcggccccaaggagugcaagcacuucgcccugacccacuacgccgcgcagcccggcggguacuacaacggcacccgggaggaccgcaacaagcugcggcaccucaucagcgugaagcuggggaagaucccgacgguggagaacuccaucuuccacauggccgccuggagcggcuccgccugccacgacgggcgcgaguggaccuacaucggcgucgacggccccgacagcaacgcccugcucaagaucaaguacggggaggcguacaccgacaccuaccacuccuacgccaacaacauccugcggacgcaggagagcgccugcaacugcaucggcggggacugcuaccugaugaucaccgacggcagcgccuccggcaucagcaagugccgcuuccucaagauccgggaggggcgcaucaucaaggagaucuuccccaccggccggguggagcacaccgaggagugcacgugcggguucgccuccaacaagaccaucgagugcgcgugccgcgacaacagcuacaccgccaagcggcccuucgugaagcugaacgucgagaccgacacggccgagauccgccugaugugcaccgagaccuaccucgacaccccgcggcccgacgacggcuccaucacggggcccugcgagagcaacggcgacaagggcuccgggggcaucaagggcggguucgugcaccagcgcauggccagcaagaucgggcggugguacucccgcaccaugagcaagaccaagcggaugggcaugggccuguacgugaaguacgacggggaccccuggaccgacuccgacgcccuggcgcucagcggcgucaugguguccauggaggagccggggugguacagcuucggcuucgagaucaaggacaagaagugcgacgugcccugcaucgggaucgagaugguccacgacggcggcaagaagacguggcacuccgccgccaccgccaucuacugccugauggggagcggccagcugcucugggacaccgugaccgggguggacauggcccuguga

SEQ ID NO: 92732 - RNA, 1398 nt, Artificial Sequence
  derived and/or modified CDS sequence (opt1) from neuraminidase__InfluenzaB__ABN50705
augcugcccagcaccauccagacccucacgcuguuccugacccucggcggggugcugcugucccucuacgucagcgcccugcuguccuaccuccuguacagcgacgugcugcucaaguucuccccgaagaugaucgcccccaccaugagccuggacugcgcgaacgccuccaacgugcaggccgucaaccacagcgccaccgaggagaugacguuccugcuccccgagcccgaguggaccuacccgcgccuguccugccagggcagcaccuuccagaaggcccugcucaucagcccccaccgguucggggaggcgaagggcaacuccgcgccccugaucauccgcgagcccuucaucgccugcgggccgaaggagugcaagcacuucgcccugacccacuacgccgcccagcccggcggcuacuacaacgggacgcgggaggaccgcaacaagcuccggcaccugaucuccgugaaccugggcaagauccccaccguggagaacagcaucuuccacauggccgccugguccgggagcgccugccacgacggccgcgaguggaccuacaucggggucgacggccccgacuccaacgcgcucaucaagaucaaguacggcgaggccuacaccgacacguaccacagcuacgccaacaacauccugcggacccaggaguccgccugcaacugcaucgggggcgacugcuaccugaugaucaccgacgggagcgccagcggcaucuccaagugccgcuuccucaagauccgggagggccgcaucaucaaggagaucuucccgaccgggcggguggagcacacggaggagugcacgugcggcuucgcgagcaacaagaccaucgagugcgccugccgcgacaacuccuacaccgccaagcggcccuucgugaagcugaacgucgagaccgacaccgccgagauccgccugaugugcaccgagaccuaccucgacacgccccggcccgacgacgggagcaucaccggcccgugcgaguccaacggggacaagggccacggcgggaucaagggcggguucgugcaccagcgcauggccagcaagaucggccggugguacucccgcaccaugagcaagaccaagcggauggggauggagcuguacgugaaguacgacggcgaccccuggacggacuccgacgcgcuggcccccagcggcgucaugguguccauggaggagcccgggugguacagcuucggcuucgagaucaaggacaagaagugcgacgugccgugcaucgggaucgagaugguccacgacggcgggaagaagaccuggcacuccgccgccaccgccaucuacugccucaugggcagcggccagcugcugugggacaccgugacggggguggacauggcgcucuga

SEQ ID NO: 92733 - RNA, 1401 nt, Artificial Sequence
  derived and/or modified CDS sequence (opt1) from neuraminidase__InfluenzaB__ABN50716
augcugcccagcaccauccagacccucacgcuguuccugaccuccggcggggugcuccugagccuguacgucuccgccagccucuccuaccugcuguacagcggcauccuccugaaguucuccccgaccgagaucaccgcccccacgaugccccuggacugcgcgaacgccagcaacgugcaggccgugaaccgcuccgccaccaagggggucacccuccugcugcccgagccggaguggaccuacccccggcucagcugccccggcuccacguuccagaaggcccugcugaucagcccccaccgcuucggggagacccggggcaacuccgcgccgcucaucauccgcgagcccuucaucgccugcggccccaaggagugcaagcacuucgcccugacccacuacgccgcgcagcccgggggcuacuacaacgggacccgggaggaccgcaacaagcugcggcaccucaucagcgugaagcugggcaagaucccgacgguggagaacuccaucuuccacauggccgccuggagcggguccgccugccacgacggccgcgaguggaccuacaucggcgucgacgggcccgacagcaacgcccugcucaagaucaaguacggcgaggcguacaccgacaccuaccacuccuacgccaacaacauccugcggacgcaggagagcgccugcaacugcaucgggggcgacugcuaccugaugaucaccgacggcagcgccuccgggaucagcaagugccgcuuccucaagauccgggagggccgcaucaucaaggagaucuuccccaccgggcggguggagcacaccgaggagugcacgugcggcuucgccuccaacaagaccaucgagugcgcgugccgcgacaacagcuacaccgccaagcggcccuucgugaagcugaacgucgagaccgacacggccgagauccgccugaugugcaccgagaccuaccucgacaccccgcggcccgacgacggguccaucacgggccccugcgagagcaacggcgacaagggguccggcgggaucaagggcggguucgugcaccagcgcauggccagcaagaucggccggugguacucccgcaccaugagcaagaccaagcggaugggcauggggcuguacgugaaguacgacggcgaccccuggaccgacuccgacgcccuggcgcucagcggggucaugguguccauggaggagccgggcugguacagcuucggguucgagaucaaggacaagaagugcgacgugcccugcaucggcaucgagaugguccacgacggcgggaagaagacguggcacuccgccgccaccgccaucuacugccugaugggcagcgggcagcugcucugggacaccgugaccggcguggacauggcccuguga

SEQ ID NO: 92734 - RNA, 1401 nt, Artificial Sequence
  derived and/or modified CDS sequence (opt1) from neuraminidase__InfluenzaB__ABN50727
augcugcccagcaccauccagacccucacgcuguuccugaccuccggcggggugcuccugagccuguacgucuccgccagccucuccuaccugcuguacagcgacauccuccugaaguucuccccgaccgagaucaccgcccccacgaugccccuggacugcgcgaacgccagcaacgugcaggccgugaaccgcuccgccaccaagggcgucacccuccugcugcccgagccggaguggaccuacccccggcucagcugccccggguccacguuccagaaggcccugcugaucagcccccaccgcuucggcgagaccaaggggaacuccgcgccgcucaucauccgggagcccuucaucgccugcggccccaaggagugcaagcacuucgcccugacccacuacgccgcgcagcccggcggguacuacaacggcacccgcgaggaccggaacaagcugcgccaccucaucagcgugaagcuggggaagaucccgacgguggagaacuccaucuuccacauggccgccuggagcggcuccgccugccacgacgggcgggaguggaccuacaucggcgucgacggccccgacagcaacgcccugcucaagaucaaguacggggaggcguacaccgacaccuaccacuccuacgccaacaacauccugcgcacgcaggagagcgccugcaacugcaucggcggggacugcuaccugaugaucaccgacggcagcgccuccggcaucagcgagugccgguuccucaagauccgcgaggggcggaucaucaaggagaucuuccccaccggccgcguggagcacaccgaggagugcacgugcggguucgccuccaacaagaccaucgagugcgcgugccgggacaacagcuacaccgccaagcgccccuucgugaagcugaacgucgagaccgacacggccgagauccggcugaugugcaccgagaccuaccucgacaccccgcgccccgacgacggcuccaucacggggcccugcgagagcaacggcgacaagggcuccgggggcaucaagggcggguucgugcaccagcggauggccagcaagaucgggcgcugguacucccggaccaugagcaagaccaagcgcaugggcaugggccuguacgugaaguacgacggggaccccuggaccgacuccgacgcccuggcgcucagcggcgucaugguguccauggaggagccggggugguacagcuucggcuucgagaucaaggacaagaagugcgacgugcccugcaucgggaucgagaugguccacgacggcggcaagaagacguggcacuccgccgccaccgccaucuacugccugauggggagcggccagcugcucugggacaccgugaccgggguggacauggcccuguga

SEQ ID NO: 92735 - RNA, 1401 nt, Artificial Sequence; identical to SEQ ID NO: 92677
  derived and/or modified CDS sequence (opt1) from neuraminidase__InfluenzaB__ABN50738

SEQ ID NO: 92736 - RNA, 1401 nt, Artificial Sequence
  derived and/or modified CDS sequence (opt1) from neuraminidase__InfluenzaB__ABN50749
augcugcccagcaccauccagacccucacgcuguuccugaccuccggcggggugcuccugagccuguacgucuccgccagccucuccuaccugcuguacagcgacauccuccugaaguucuccccgaccgagaucaccgcccccacgaugccccuggacugcgcgaacgccagcaacgugcaggccgugaaccgcuccgccaccaagggcgucacccuccugcugcccgagccggaguggaccuacccccggcucagcugccccggguccacguuccagaaggcccugcugaucagcccccaccgcuucggcgagaccaaggggaacuccgcgccgcucaucauccgggagcccuucaucgccugcggccccaaggagugcaagcacuucgcccugacccacuacgccgcgcagcccggcggguacuacaacggcacccgcggggaccggaacaagcugcgccaccucaucagcgugaagcugggcaagaucccgacgguggagaacuccaucuuccacauggccgccuggagcggguccgccugccacgacggcaaggaguggaccuacaucggcgucgacgggcccgacagcaacgcccugcucaagaucaaguacggcgaggcguacaccgacaccuaccacuccuacgccaacaacauccugcggacgcaggagagcgccugcaacugcaucgggggcaacugcuaccugaugaucaccgacggcagcgccuccgggaucagcgagugccgcuuccucaagauccgggagggccgcaucaucaaggagaucuuccccaccgggcgggugaagcacaccgaggagugcacgugcggcuucgccuccaacaagaccaucgagugcgcgugccgcgacaacagcuacaccgccaagcggcccuucgugaagcugaacgucgagaccgacacggccgagauccgccugaugugcaccgagaccuaccucgacaccccgcggcccgacgacggguccaucacgggccccugcgagagcaacggcgacaagggguccggcgggaucaagggcggguucgugcaccagcgcauggccagcaagaucggccggugguacucccgcaccaugagcaagaccaagcggaugggcauggggcuguacgugaaguacgacggcgaccccugggccgacuccgacgcgcuggcccucagcggggucaugguguccauggaggagccgggcugguacagcuucggguucgagaucaaggacaagaagugcgacgugcccugcaucggcaucgagaugguccacgacggcgggaaggagaccuggcacuccgccgccacggccaucuacugccugaugggcagcgggcagcugcucugggacaccgugaccggcguggacauggcgcuguga

SEQ ID NO: 92737 - RNA, 1398 nt, Artificial Sequence
  derived and/or modified CDS sequence (opt1) from neuraminidase__InfluenzaB__ABN51188
augcugcccagcaccauccagacccucacgcuguuccugaccuccggcggggugcuccugagccuguacgucuccgcccuccugagcuaccugcucuacuccgacauccugcugaaguucagcccgaagaucaucgcccccaccaugcuccuggacugcgcgaacgccuccaacgugcaggccgugaaccacagcgccaccaaggagaugacguuccugcuccccgagcccgaguggaccuacccgcgccuguccugccagggcagcaccuuccagaaggcccugcucaucagcccccaccgguucggggaggcgaagggcaacuccgcgccccugaucauccgcgagcccuucaucgccugcgggccgaaggagugcaagcacuucgcccugacccacuacgccgcccagcccggcggcuacuacaacgggacgcgggaggaccgcaacaagcuccggcaccugaucuccgucaaccugggcaagauccccaccguggagaacagcaucuuccacauggccgccugguccgggagcgccugccacgacggccgcgaguggaccuacaucgggguggacggccccgacuccaacgcgcucaucaagaucaaguacggcgaggccuacaccgacacguaccacagcuacgccaacaacauccugcggacccaggaguccgccugcaacugcaucgggggcgacugcuaccugaugaucaccgacgggagcgccagcggcaucuccaagugccgcuuccucaagauccgggagggccgcaucaucaaggagaucuucccgaccgggcgggucgagcacacggaggagugcacgugcggcuucgcgagcaacaagaccaucgagugcgccugccgcgacaacuccuacaccgccaagcggcccuucgugaagcugaacguggagaccgacaccgccgagauccgccugaugugcaccgagaccuaccucgacacgccccggcccgacgacgggagcaucaccggcccgugcgaguccaacggggacaagggccgcggcggggucaagggcggguucgugcaccagcggauggccagcaagaucggccgcugguacucccggaccaugagcaagaccgagcgcauggggauggagcuguacgugaaguacgacggcgaccccuggacggacuccgacgcgcuggcccccagcggcgucaugguguccauggaggagcccgggugguacagcuucggcuucgagaucaaggacaagaagugcgacgugccgugcaucgggaucgagaugguccacgacggcgggaagaagaccuggcacuccgccgccaccgccaucuacugccucaugggcagcggccagcugcugugggacaccgugacggggguggacauggcgcucuga

SEQ ID NO: 92738 - RNA, 1398 nt, Artificial Sequence; identical to SEQ ID NO: 92726
  derived and/or modified CDS sequence (opt1) from neuraminidase__InfluenzaB__ABN51199

SEQ ID NO: 92739 - RNA, 1401 nt, Artificial Sequence
  derived and/or modified CDS sequence (opt1) from neuraminidase__InfluenzaB__ABN58665
augcugcccagcaccauccagacccucacgcuguuccugaccuccggcggggugcuccugagccuguacgucuccgcccuccugagcuaccugcucuacuccgacauccugcugaaguucagcccgaccaagaucaucgcccccaccaugucccucgacugcgcgaacgccagcaacgugcaggccgugaaccacuccgccacggaggagaugaccuuccugcugcccgagcccgaguggaccuacccgcgccucagcugccagggcuccaccuuccagaaggcccugcugaucagcccccaccgguucggggaggcgaagggcaacuccgcgccccucaucauccgcgagcccuucaucgccugcgggccgaaggagugcaagcacuucgcccugacgcacuacgccgcccagcccggcggcuacuacaacgggacccgggaggaccgcaacaagcugcggcaccucaucagcgucaaccugggcaagauccccaccguggagaacuccaucuuccacauggccgccuggagcggguccgccugccacgacggccgcgaguggaccuacaucgggguggacggccccgacagcaacgcgcugaucaagaucaaguacggcgaggccuacacggacaccuaccacuccuacgccaacaacauccuccggacccaggagagcgccugcaacugcaucgggggcgacugcuaccugaugaucaccgacgggagcgccuccggcaucagcaagugccgcuuccugaagauccgggagggccgcaucaucaaggagaucuucccgacggggcgggucgagcacaccgaggagugcacgugcggcuucgcguccaacaagaccaucgagugcgccugccgcgacaacagcuacaccgccaagcggcccuucgugaagcucaacguggagaccgacaccgccgagauccgccugaugugcaccgagacguaccuggacacgccccggcccgacgacggguccaucaccggcccgugcgagagcaacgggggcaagggcuccgggggcaucaagggcggguucguccaccagcgcauggccagcaagaucgggcggugguacucccgcaccaugagcaagaccaagcggaugggcauggagcucuacgugaaguacgacggcgaccccuggaccgacuccgacgcgcuggcccccagcggggugauggucuccauggaggagcccggcugguacagcuucggguucgagaucaaggacaagaagugcgacgugccgugcaucggcaucgagauggugcacgacgggggcaagaagaccuggcacuccgccgccaccgccaucuacugccugaugggcagcgggcagcuccugugggacacggucaccggcguggacauggcgcuguga

SEQ ID NO: 92740 - RNA, 1401 nt, Artificial Sequence; identical to SEQ ID NO: 92627
  derived and/or modified CDS sequence (opt1) from neuraminidase__InfluenzaB__ABN59449

SEQ ID NO: 92741 - RNA, 1398 nt, Artificial Sequence; identical to SEQ ID NO: 92705
  derived and/or modified CDS sequence (opt1) from neuraminidase__InfluenzaB__ABR15999

SEQ ID NO: 92742 - RNA, 1401 nt, Artificial Sequence; identical to SEQ ID NO: 92734
  derived and/or modified CDS sequence (opt1) from neuraminidase__InfluenzaB__ABR16010

SEQ ID NO: 92743 - RNA, 1401 nt, Artificial Sequence
  derived and/or modified CDS sequence (opt1) from neuraminidase__InfluenzaB__ABR16021
augcugcccagcaccauccagacccucacgcuguuccugaccuccggcggggugcuccugagccuguacgucuccgccagccucuccuaccugcuguacagcgacauccuccugaaguucuccccgaccgagaucaccgcccccacgaugccccuggacugcgcgaacgccagcaacgugcaggccgugaaccgcuccgccaccaagggcgucacccuccugcugcccgagccggaguggaccuacccccggcucagcugccccggguccacguuccagaaggcccugcugaucagcccccaccgcuucggcgagaccaaggggaacuccgcgccgcucaucauccgggagcccuucaucgccugcggccccaacgagugcaagcacuucgcccugacccacuacgccgcgcagcccggcggguacuacaacggcacccgcggggaccggaacaagcugcgccaccucaucagcgugaagcugggcaagaucccgacgguggagaacuccaucuuccacauggccgccuggagcggguccgccugccacgacggcaaggaguggaccuacaucggcgucgacgggcccgacaacaacgcccugcucaagaucaaguacggcgaggcguacaccgacaccuaccacagcuacgccaacaagauccugcggacgcaggaguccgccugcaacugcaucgggggcaacugcuaccugaugaucaccgacggcagcgccagcgggguguccgagugccgcuuccucaagauccggaagggccgcaucaucaaggagaucuuccccaccgggcgggugaagcacaccgaggagugcacgugcggcuucgccagcaacaagaccaucgagugcgcgugccgcgacaacuccuacaccgccaagcggcccuucgucaagcugaacguggagaccgacacggccgagauccgccugaugugcaccgacaccuaccucgacaccccgcggcccgacgacgggagcaucacgggccccugcgaguccaacggcgacaaggggagcggcgggaucaagggcggguucgugcaccagcgcauggccuccaagaucggccggugguacagccgcaccauguccaagaccgagcggaugggcauggggcuguacgucaaguacgacggcgaccccugggccgacagcgacgcgcuggccuucuccggggugauggugagcaugaaggagccgggcugguacuccuucggguucgagaucaaggacaagaagugcgacguccccugcaucggcaucgagauggugcacgacggcgggaaggagaccuggcacagcgccgccacggccaucuacugccucaugggcuccgggcagcugcugugggacaccgugaccggcgucgacauggcgcucuga

SEQ ID NO: 92744 - RNA, 1401 nt, Artificial Sequence; identical to SEQ ID NO: 92659
  derived and/or modified CDS sequence (opt1) from neuraminidase__InfluenzaB__ACA64903

SEQ ID NO: 92745 - RNA, 1401 nt, Artificial Sequence
  derived and/or modified CDS sequence (opt1) from neuraminidase__InfluenzaB__ACA64914
augcugcccagcaccauccagacccucacgcuguuccugaccuccggcggggugcuccugagccuguacgucuccgccagccucuccuaccugcuguacagcgacauccuccugaaguucucccagaccgagaucaccgccccgaucaugccccuggacugcgcgaacgccagcaacgugcaggccgugaaccgcuccgccgccaagggcgucacgcuccugcugcccgagcccgaguggaccuacccgcggcucagcugccccggguccaccuuccagaaggcgcugcugaucagcccccaccgcuucggcgagaccaaggggaacuccgcgccccucaucauccgggagccguucaucgccugcggccccacggagugcaagcacuucgcccugacccacuacgccgcccagcccggcggguacuacaacggcacccgcgaggaccggaacaagcugcgccaccucaucagcgugaagcuggggaagauccccaccguggagaacuccaucuuccacauggccgccuggagcggcuccgccugccacgacgggaaggaguggacguacgucggcguggacggcccggacagcaacgcgcugcucaagaucaaguacggggaggccuacaccgacaccuaccacuccuacgccaagaacauccugcggacccaggagagcgccugcaacugcaucggcggggacugcuaccugaugaucacggacggccccgccagcggcaucuccgagugccgcuuccucaagauccgggaggggcgcaucaucaaggagaucuuccccaccggccgggugaagcacaccgaggagugcacgugcggguucgcgagcaacaagaccaucgagugcgccugccgcgacaacuccuacaccgccaagcggcccuucgucaagcugaacguggagaccgacaccgccgagauccgccugaugugcacggagaccuaccucgacaccccgcggcccaacgacggcagcaucaccgggcccugcgaguccgacggcgacaagggcagcgggggcaucaagggcggguucgugcaccagcgcauggccuccaagaucgggcggugguacagccgcacgauguccaagaccaagcggaugggcaugggccuguacgucaaguacgacggggaccccuggaccgacagcgaggcgcuggcccucuccggcgugauggugagcauggacgagccggggugguacuccuucggcuucgagaucaaggacaagaagugcgacguccccugcaucgggaucgagauggugcacgacggcggcaagaccacguggcacagcgccgccaccgccaucuacugccugaugggguccggccagcugcucugggacaccgugaccggggucgacauggcgcuguga

SEQ ID NO: 92746 - RNA, 1401 nt, Artificial Sequence; identical to SEQ ID NO: 92659
  derived and/or modified CDS sequence (opt1) from neuraminidase__InfluenzaB__ACA64936

SEQ ID NO: 92747 - RNA, 1401 nt, Artificial Sequence
  derived and/or modified CDS sequence (opt1) from neuraminidase__InfluenzaB__ACA64969
augcugcccagcaccauccagacccucacgcuguuccugaccuccggcggggugcuccugagccuguacgucuccgccagccucuccuaccugcuguacagcgacauccuccugaaguucuccccgaccgagaucaccgcccccacgaugccccuggacugcgcgaacgccagcaacgugcaggccgugaaccgcuccgccgccaagggcgucacccuccugcugcccgagccggaguggaccuacccccggcucagcugccccggguccaccuuccagaaggcgcugcugaucagcccccaccgcuucggcgagacgaaggggaacuccgccccgcucaucauccgggagcccuucaucgccugcggccccaacgagugcaagcacuucgcccugacccacuacgcggcccagcccggcggguacuacaacggcacccgcggggaccggaacaagcugcgccaccucaucagcgugaagcugggcaagaucccgaccguggagaacuccaucuuccacauggccgccuggagcggguccgccugccacgacggcaaggaguggacguacaucggcgucgacgggcccgacaacaacgcgcugcucaagaucaaguacggcgaggccuacaccgacaccuaccacagcuacgccaacaagauccugcggacccaggaguccgccugcaacugcaucgggggcaacugcuaccugaugaucacggacggcagcgccagcgggguguccgagugccgcuuccucaagauccgggagggccgcaucaucaaggagaucuuccccaccgggcgggugaagcacaccgaggagugcacgugcggcuucgcgagcaacaagaccaucgagugcgccugccgcgacaacuccuacaccgccaagcggcccuucgucaagcugaacguggagaccgacaccgccgagauccgccugaugugcacggacaccuaccucgacaccccgcggcccgacgacgggagcaucaccggccccugcgaguccaacggcgacaaggggagcggcgggaucaagggcggguucgugcaccagcgcauggccuccaagaucggccggugguacagccgcacgauguccaagaccgagcggaugggcauggggcuguacgucaaguacgacggcgaccccugggcggacagcgacgcccuggccuucuccggggugauggugagcaugaaggagccgggcugguacuccuucggguucgagaucaaggacaagaagugcgacguccccugcaucggcaucgagauggugcacgacggcgggaaggagaccuggcacagcgccgccaccgcgaucuacugccucaugggcuccgggcagcugcugugggacacggugaccggcgucgacauggcccucuga

SEQ ID NO: 92748 - RNA, 1401 nt, Artificial Sequence
  derived and/or modified CDS sequence (opt1) from neuraminidase__InfluenzaB__ACA64980
augcugcccagcaccauccagacccucacgcuguuccugaccuccggcggggugcuccugagccuguacgucuccgccagccucuccuaccugcuguacagcgacauccuccugaaguucuccccgaccgagaucaccgcccccacgaugagccuggacugcgcgaacgccuccaacgugcaggccgugaaccgcagcgccaccaagggcgucacccuccugcugcccgagcccgaguggaccuacccgcggcucuccugccccgggagcacguuccagaaggcccugcugaucagcccccaccgcuucggcgagaccaaggggaacuccgcgccccucaucauccgggagccguucaucgccugcggccccaacgagugcaagcacuucgcccugacccacuacgccgcgcagcccggcggguacuacaacggcacccgcggggaccggaacaagcugcgccaccucaucuccgugaagcugggcaagauccccacgguggagaacagcaucuuccacauggccgccugguccgggagcgccugccacgacggcaaggaguggaccuacaucggcgucgacgggccggacaacaacgcccugcucaagaucaaguacggcgaggcguacaccgacaccuaccacuccuacgccagcaagauccugcggacgcaggagagcgccugcaacugcaucgggggcaacugcuaccugaugaucaccgacggcuccgccagcgggguguccgagugccgcuuccucaagauccgggagggccgcaucaucaaggagaucuuccccaccgggcgggugaagcacaccgaggagugcacgugcggcuucgccagcaacaagaccaucgagugcgcgugccgcgacaacuccuacaccgccaagcggcccuucgucaagcugaacguggagaccgacacggccgagauccgccugaugugcaccgacaccuaccucgacacgccccggccggacgacgggagcaucaccggccccugcgaguccaacggcgacaaggggagcggcgggaucaagggcggguucgugcaccagcgcauggccuccaagaucggccggugguacagccgcaccauguccaagaccgagcggaugggcauggggcuguacgucaaguacgacggcgaccccugggccgacagcgacgcgcuggccuucuccggggugauggugagcaugaaggagcccggcugguacuccuucggguucgagaucaaggacaagaagugcgacgucccgugcaucggcaucgagauggugcacgacggcgggaaggagaccuggcacagcgccgccacggccaucuacugccucaugggcuccgggcagcugcugugggacaccgugaccggcgucgacauggcgcucuga

SEQ ID NO: 92749 - RNA, 1401 nt, Artificial Sequence
  derived and/or modified CDS sequence (opt1) from neuraminidase__InfluenzaB__ACA64991
augcugcccagcaccauccagacccucacgcuguuccugaccuccggcggggugcuccugagccuguacgucuccgccagccucuccuaccugcuguacagcgacauccuccugaaguucuccccgaccgagaucaccgcccccacgaugccccuggacugcgcgaacgccagcaacgugcacgccgugaaccgcuccgccaccaagggcgucacccuccugcugcccgagccggaguggaccuacccccggcucagcugccccggguccacguuccagaaggcccugcugaucagcccccaccgcuucggcgagaccaaggggaacuccgcgccgcucaucauccgggagcccuucaucgccugcggccccaacgagugcaagcacuucgcccugacccacuacgccgcgcagcccggcggguacuacaacggcacccgcggggaccggaacaagcugcgccaccucaucagcgugaagcugggcaagaucccgacgguggagaacuccaucuuccacauggccgccuggagcggguccgccugccacgacggcaaggaguggaccuacaucggcgucgacgggcccgacaacaacgcccugcucaagaucaaguacggcgaggcguacaccgacaccuaccacagcuacgccaacaacauccugcggacgcaggaguccgccugcaacugcaucgggggcaacugcuaccugaugaucaccgacggcagcgccagcgggguguccgagugccgcuuccucaagauccgggagggccgcaucaucaaggagaucuuccccaccgggcgggugaagcacaccgaggagugcacgugcggcuucgccagcaacaagaccaucgagugcgcgugccgcgacaacuccuacaccgccaagcggcccuucgucaagcugaacguggagaccgacacggccgagauccgccugaugugcaccgacaccuaccucgacaccccgcggcccgacgacgggagcaucacgggccccugcgaguccaacggcgacaaggggagcggcgggaucaagggcggguucgugcaccagcgcauggccuccaagaucggccggugguacagccgcaccauguccaagaccgagcggaugggcauggggcuguacgucaaguacgacggcgaccccugggccgacagcgacgcgcuggccuucgggggcgugaugguguccaugaaggagccggggugguacagcuucggcuucgagaucaaggacaagaagugcgacguccccugcaucggcaucgagauggugcacgacgggggcaaggagaccuggcacuccgccgccacggccaucuacugccucauggggagcggccagcugcugugggacaccgugaccggcgucgacauggcgcucuga

SEQ ID NO: 92750 - RNA, 1401 nt, Artificial Sequence; identical to SEQ ID NO: 92659
  derived and/or modified CDS sequence (opt1) from neuraminidase__InfluenzaB__ACA65013

SEQ ID NO: 92751 - RNA, 1401 nt, Artificial Sequence; identical to SEQ ID NO: 92659
  derived and/or modified CDS sequence (opt1) from neuraminidase__InfluenzaB__ACA65024

SEQ ID NO: 92752 - RNA, 1401 nt, Artificial Sequence
  derived and/or modified CDS sequence (opt1) from neuraminidase__InfluenzaB__ACA65035
augcugcccagcaccauccagacccucacgcuguuccugaccuccggcggggugcuccugagccuguacgucuccgccagccucuccuaccugcuguacagcgacauccuccugaaguucuccccgaccgagaucaccgcccccacgaugccccuggacugcgcgaacgccagcaacgugcaggccgugaaccgcuccgccaccaagggcgucacccuccugcugcccgagccggaguggaccuacccccggcucagcugccccggguccacguuccagaaggcccugcugaucagcccccaccgcuucggcgagaccaaggggaacuccgcgccgcucaucauccgggagcccuucaucgccugcggccccaacgagugcaagcacuucgcccugacccacuacgccgcgcagcccggcggguacuacaacggcacccgcggggaccggaacaagcugcgccaccucaucagcgugaagcugggcaagaucccgacgguggagaacuccaucuuccacauggccgccuggagcggguccgccugccacgacggcaaggaguggaccuacaucggcgucgacgggcccgacaacaacgcccugcucaagaucaaguacggcgaggcguacaccgacaccuaccacagcuacgccuccaagauccugcggacgcaggagagcgccugcaacugcaucgggggcaacugcuaccugaugaucaccgacggcagcgccuccggggugagcgagugccgcuuccucaagauccgggagggccgcaucaucaaggagaucuuccccaccgggcgggugaagcacaccgaggagugcacgugcggcuucgccuccaacaagaccaucgagugcgcgugccgcgacaacagcuacaccgccaagcggcccuucgucaagcugaacguggagaccgacacggccgagauccgccugaugugcaccgacaccuaccucgacaccccgcggcccgacgacggguccaucacgggccccugcgagagcaacggcgacaagggguccggcgggaucaagggcggguucgugcaccagcgcauggccagcaagaucggccggugguacucccgcaccaugagcaagaccgagcggaugggcauggggcuguacgucaaguacgacggcgaccccugggccgacuccgacgcgcuggccuucagcggggugaugguguccaugaaggagccgggcugguacagcuucggguucgagaucaaggacaagaagugcgacguccccugcaucggcaucgagauggugcacgacggcgggaaggagaccuggcacuccgccgccacggccaucuacugccucaugggcagcgggcagcugcugugggacaccgugaccggcgucgacauggcgcucuga

SEQ ID NO: 92753 - RNA, 1401 nt, Artificial Sequence; identical to SEQ ID NO: 92659
  derived and/or modified CDS sequence (opt1) from neuraminidase__InfluenzaB__ACA65046

SEQ ID NO: 92754 - RNA, 1401 nt, Artificial Sequence
  derived and/or modified CDS sequence (opt1) from neuraminidase__InfluenzaB__ACA65057
augcugcccagcaccauccagacccucacgcuguuccugaccuccggcggggugcuccugagccuguacgucuccgccagccucuccuaccugcuguacagcgacauccuccugaaguucuccccgaccgagaucaccgcccccacgaugccccuggacugcgcgaacgccagcaacgugcaggccgugaaccgcuccgccaccaagggcgucacccuccugcugcccgagccggaguggaccuacccccggcucagcugccccggguccacguuccagaaggcccugcugaucagcccccaccgcuucggcgagaccaaggggaacuccgcgccgcucaucauccgggagcccuucaucgccugcggccccaacgagugcaagcacuucgcccugacccacuacgccgcgcagcccggcggguacuacaacggcacccgcggggaccggaacaagcugcgccaccucaucagcgugaagcugggcaagaucccgacgguggagaacuccaucuuccacauggccgccuggagcggguccgccugccacgacggcaaggaguggaccuacaucggcgucgacgggcccgacaacaacgcccugcucaagaucaaguacggcgaggcguacaccgacaccuaccacagcuacgccaacaagauccugcggacgcaggaguccgccugcaacugcaucgggggcaacugcuaccugaugaucaccgacggcagcgccagcgggguguccgagugccgcuuccucaagauccgggagggccgcaucaucaaggagaucuuccccaccgggcgggugaagcacaccgaggagugcacgugcggcuucgccagcaacaagaccaucgagugcgcgugccgcgacaacuccuacaccgccaagcggcccuucgucaagcugaacguggaggccgacaccgccgagauccgccugaugugcacggacaccuaccucgacaccccgcggcccgacgacgggagcaucaccggccccugcgaguucaacggcgacaagggguccggcgggaucaagggcggguucgugcaccagcgcauggccagcaagaucggccggugguacucccgcacgaugagcaagaccgagcggaugggcauggggcuguacgucaaguacgacggcgaccccugggcggacuccgacgcccuggccuucagcggggugaugguguccaugaaggagccgggcugguacagcuucggguucgagaucaaggacaagaagugcgacguccccugcaucggcaucgagauggugcacgacggcgggaaggagaccuggcacuccgccgccaccgcgaucuacugccucaugggcagcgggcagcugcugugggacacggugaccggcgucgacauggcccucuga

SEQ ID NO: 92755 - RNA, 1401 nt, Artificial Sequence; identical to SEQ ID NO: 92659
  derived and/or modified CDS sequence (opt1) from neuraminidase__InfluenzaB__ACA65068

SEQ ID NO: 92756 - RNA, 1401 nt, Artificial Sequence; identical to SEQ ID NO: 92659
  derived and/or modified CDS sequence (opt1) from neuraminidase__InfluenzaB__ACA65079

SEQ ID NO: 92757 - RNA, 1401 nt, Artificial Sequence; identical to SEQ ID NO: 92659
  derived and/or modified CDS sequence (opt1) from neuraminidase__InfluenzaB__ACA65090

SEQ ID NO: 92758 - RNA, 1401 nt, Artificial Sequence; identical to SEQ ID NO: 92659
  derived and/or modified CDS sequence (opt1) from neuraminidase__InfluenzaB__ACA65101

SEQ ID NO: 92759 - RNA, 1401 nt, Artificial Sequence
  derived and/or modified CDS sequence (opt1) from neuraminidase__InfluenzaB__ACA96567
augcugcccagcaccauccagacccucacgcuguuccugaccuccggcggggugcuccugagccuguacgucuccgccagccucuccuaccugcuguacagcgacauccuccugaaguucuccccgaccgagaucaccgcccccacgaugccccuggacugcgcgaacgccagcaacgugcacgccgugaaccgcuccgccaccaagggcgucacccuccugcugcccgagccggagugggccuacccccggcucagcugccccggguccaccuuccagaaggcgcugcugaucagcccccaccgcuucggcgagacgaaggggaacuccgccccgcucaucauccgggagcccuucaucgccugcggccccaacgagugcaagcacuucgcccugacccacuacgcggcccagcccggcggguacuacaacggcacccgcggggaccggaacaagcugcgccaccucaucagcgugaagcugggcaagaucccgaccguggagaacuccaucuuccacauggccgccuggagcggguccgccugccacgacggcaaggaguggacguacaucggcgucgacgggcccgacaacaacgcgcugcucaagaucaaguacggcgaggccuacaccgacaccuaccacagcuacgccaacaacauccugcggacccaggaguccgccugcaacugcaucgggggcaacugcuaccugaugaucacggacggcagcgccagcgggguguccgagugccgcuuccucaagauccgggagggccgcaucaucaaggagaucuuccccaccgggcgggugaagcacaccgaggagugcacgugcggcuucgcgagcaacaagaccaucgagugcgccugccgcgacaacuccuacaccgccaagcggcccuucgucaagcugaacguggagaccgacaccgccgagauccgccugaugugcacggacaccuaccucgacaccccgcggcccgacgacgggagcaucaccggccccugcgaguccaacggcgacaaggggagcggcgggaucaagggcggguucgugcaccagcgcauggccuccaagaucggccggugguacagccgcacgauguccaagaccgagcggaugggcauggggcuguacgucaaguacgacggcgaccccugggcggacagcgacgcccuggccuucuccgggaucauggugagcaugaaggagccgggcugguacuccuucggguucgagaucaaggacaagaagugcgacgugcccugcaucggcaucgagaugguccacgacggcgggaaggagaccuggcacagcgccgccaccgcgaucuacugccucaugggcuccgggcagcugcugugggacacggugaccggcguggacauggcccucuga

SEQ ID NO: 92760 - RNA, 1401 nt, Artificial Sequence; identical to SEQ ID NO: 92659
  derived and/or modified CDS sequence (opt1) from neuraminidase__InfluenzaB__ACA96578

SEQ ID NO: 92761 - RNA, 1401 nt, Artificial Sequence; identical to SEQ ID NO: 92747
  derived and/or modified CDS sequence (opt1) from neuraminidase__InfluenzaB__ACA96589

SEQ ID NO: 92762 - RNA, 1401 nt, Artificial Sequence; identical to SEQ ID NO: 92659
  derived and/or modified CDS sequence (opt1) from neuraminidase__InfluenzaB__ACA96600

SEQ ID NO: 92763 - RNA, 1401 nt, Artificial Sequence
  derived and/or modified CDS sequence (opt1) from neuraminidase__InfluenzaB__ACA96611
augcugcccagcaccauccagacccucacgcuguuccugaccuccggcggggugcuccugagccuguacgucuccgccagccucuccuaccugcuguacagcgacauccuccugaaguucuccccgaccgagaucaccgcccccacgaugccccuggacuacgcgaacgccagcaacgugcacgccgugaaccacuccgccaccaagggcgucacccuccugcugcccgagccggaguggaccuacccccgccucagcugccccggguccacguuccagaaggcccugcugaucagcccccaccgguucggcgagaccaaggggaacuccgcgccgcucaucauccgcgagcccuucaucgccugcggccccaacgagugcaagcacuucgcccugacccacuacgccgcgcagcccggcggguacuacaacggcacccgcggggaccggaacaagcugcggcaccucaucagcgugaagcugggcaagaucccgacgguggagaacuccaucuuccacauggccgccuggagcggguccgccugccacgacggcaaggaguggaccuacaucggcgucgacgggcccgacaacaacgcccugcucaagaucaaguacggcgaggcguacaccgacaccuaccacagcuacgccaacaacauccugcgcacgcaggaguccgccugcaacugcaucgggggcaacugcuaccugaugaucaccgacggcagcgccagcgggguguccgagugccgguuccucaagauccgcgagggccggaucaucaaggagaucuuccccaccgggcgcgugaagcacaccgaggagugcacgugcggcuucgccagcaacaagaccaucgagugcgcgugccgggacaacuccuacaccgccaagcgccccuucgucaagcugaacguggagaccgacacggccgagauccggcugaugugcaccgacaccuaccucgacaccccgcgccccgacgacgggagcaucacgggccccugcgaguccaacggcgacaaggggagcggcgggaucaagggcggguucgugcaccagcggauggccuccaagaucggccgcugguacagccggaccauguccaagaccgagcgcaugggcauggggcuguacgucaaguacgacggcgaccccugggccgacagcgacgcgcuggccuucuccggggugauggugagcaugaaggagccgggcugguacuccuucggguucgagaucaaggacaagaagugcgacguccccugcaucggcaucgagauggugcacgacggcgggaaggagaccuggcacagcgccgccacggccaucuacugccucaugggcuccgggcggcugcugugggacaccgugaccggcgucgacauggcgcucuga

SEQ ID NO: 92764 - RNA, 1401 nt, Artificial Sequence
  derived and/or modified CDS sequence (opt1) from neuraminidase__InfluenzaB__ACA96622
augcugcccagcaccauccagacccucacgcuguuccugaccuccggcggggugcuccugagccuguacgucuccgccagccucuccuaccugcuguacagcgacauccuccugaaguucuccccgaccgagaucaccgcccccacgaugccccuggacugcgcgaacgccagcaacgugcacgccgugaaccgcuccgccaccaagggcgucacccuccugcugcccgagccggaguggaccuacccccggcucagcugccccggguccacguuccagaaggcccugcugaucagcccccaccgcuucggcgagaccaaggggaacuccgcgccgcucaucauccgggagcccuucaucgccugcggccccaacgagugcaagcacuucgcccugacccacuacgccgcgcagcccggcggguacuacaacggcacccgcggggaccggaacaagcugcgccaccucaucagcgugaagcugggcaagaucccgacgguggagaacuccaucuuccacauggccgccuggagcggguccgccugccacgacggcaaggaguggaccuacaucggcgucgacgggcccgacaacaacgcccugcucaagaucaaguacggcgaggcguacaccgacaccuaccacagcuacgccaacaacauccugcggacgcaggaguccgccugcaacugcaucgggggcaacugcuaccugaugaucaccgacggcagcgccagcgggguguccgagugccgcuuccucaagauccgggagggccgcaucaucaaggagaucuuccccaccgggcgggugaagcacaccgaggagugcacgugcggcuucgccagcaacaagaccaucgagugcgcgugccgcgacaacuccuacaccgccaagcggcccuucgucaagcugaacguggagaccgacacggccgagauccgccugaugugcaccgacaccuaccucgacaccccgcggcccgacgacgggagcaucaucggccccugcgaguccaacggcgacaaggggagcggcgggaucaagggcggguucgugcaccagcgcauggccuccaagaucggccggugguacagccgcacgauguccaagaccgagcggaugggcauggggcuguacgucaaguacgacggcgaccccugggccgacagcgacgcgcuggccuucuccggggugauggugagcaugaaggagccgggcugguacuccuucggguucgagaucaaggacaagaagugcgacguccccugcaucggcaucgagauggugcacgacggcgggaaggagaccuggcacagcgccgccaccgccaucuacugccucaugggcuccgggcagcugcugugggacacggugaccggcgucgacauggcgcucuga

SEQ ID NO: 92765 - RNA, 1401 nt, Artificial Sequence; identical to SEQ ID NO: 92747
  derived and/or modified CDS sequence (opt1) from neuraminidase__InfluenzaB__ACA96633

SEQ ID NO: 92766 - RNA, 1401 nt, Artificial Sequence
  derived and/or modified CDS sequence (opt1) from neuraminidase__InfluenzaB__ACA96644
augcugcccagcaccauccagacccucacgcuguuccugaccuccggcggggugcuccugagccuguacgucuccgccagccucuccuaccugcuguacagcgacauccuccugaaguucuccccgaccgagaucaccgcccccacgaugccccuggacugcgcgaacgccagcaacgugcaggccgugaaccgcuccgccaccaagggcgucacccuccugcugcccgagccggaguggaccuacccccggcucagcugccccggguccacguuccagaaggcccugcugaucagcccccaccgcuucggcgagaccaaggggaacuccgcgccgcucaucauccgggagcccuucaucgccugcggccccaacgagugcaagcacuucgcccugacccacuacgccgcgcagcccggcggguacuacaacggcacccgcggggaccggaacaagcugcgccaccucaucagcaucaagcugggcaagaucccgacgguggagaacuccaucuuccacauggccgccuggagcggguccgccugccacgacggcaaggaguggaccuacaucggcguggacgggcccgacaacaacgcccugcucaagaucaaguacggcgaggcguacaccgacaccuaccacagcuacgccaacaagauccugcggacgcaggaguccgccugcaacugcaucgggggcaacugcuaccugaugaucaccgacggcagcgccagcggggucuccgagugccgcuuccucaagauccgggagggccgcaucaucaaggagaucuuccccaccgggcgggugaagcacaccgaggagugcacgugcggcuucgccagcaacaagaccaucgagugcgcgugccgcgacaacuccuacaccgccaagcggcccuucgugaagcugaacgucgagaccgacacggccgagauccgccugaugugcaccgacaccuaccucgacaccccgcggcccgacgacgggagcaucacgggccccugcgaguccaacggcgacaaggggagcggcgggaucaagggcggguucgugcaccagcgcauggccuccaagaucggccggugguacagccgcaccauguccaagaccgagcggaugggcauggggcuguacgugaaguacgacggcgaccccugggccgacagcgacgcgcuggccuucuccggggucaugaucagcaugaaggagccgggcugguacuccuucggguucgagaucaaggacaagaagugcgacgugcccugcaucggcaucgagauggugcacgacggcgggaaggagaccuggcacagcgccgccacggccaucuacugccucaugggcuccgggcagcugcugugggacaccgucaccggcguggacauggcgcucuga

SEQ ID NO: 92767 - RNA, 1401 nt, Artificial Sequence
  derived and/or modified CDS sequence (opt1) from neuraminidase__InfluenzaB__ACA96655
augcugcccagcaccauccagacccucacgcuguuccugaccuccggcggggugcuccugagccuguacgucuccgccagccucuccuaccugcuguacagcgacauccuccugaaguucucccagaccgagaucaccgccccgaucaugccccuggacugcgcgaacgccagcaacgugcaggccgugaaccgcuccgccacgaagggcgucacccuccugcugcccgagcccgaguggaccuacccgcggcucagcugccccggguccaccuuccagaaggcccugcugaucagcccccaccgcuucggcgagacgaaggggaacuccgcgccccucaucauccgggagccguucaucgccugcggccccaaggagugcaagcacuucgcccugacccacuacgccgcgcagcccggcggguacuacaacggcacccgcgaggaccggaacaagcugcgccaccucaucagcgugaagcuggggaagauccccaccguggagaacuccaucuuccacauggccgccuggagcggcuccgccugccacgacgggcgggaguggacguacaucggcgucgacggcccggacagcaacgcccugcucaagaucaaguacggggaggcguacaccgacaccuaccacuccuacgccaagaacauccugcgcacccaggagagcgccugcaacugcaucggcggggacugcuaccugaugaucacggacggccccgccagcggcaucuccgagugccgguuccucaagauccgcgaggggcggaucaucaaggagaucuuccccaccggccgcgugaagcacaccgaggagugcacgugcggguucgccagcaacaagaccaucgagugcgcgugccgggacaacuccuacaccgccaagcgccccuucgugaagcugaacgucgagaccgacaccgccgagauccggcugaugugcacggagaccuaccucgacaccccgcgccccaacgacggcagcaucaccgggcccugcgaguccaacggcgacaagggcagcgggggcaucaagggcggguucgugcaccagcggauggccuccaagaucgggcgcugguacagccggacgauguccaagaccaagcgcaugggcaugggccuguacgugaaguacgacggggaccccuggaccgacagcgaggcccuggcgcucuccggcgucauggugagcauggaggagccggggugguacuccuucggcuucgagaucaaggacaagaagugcgacgugcccugcaucgggaucgagaugguccacgacggcggcaagaccacguggcacagcgccgccaccgccaucuacugccugaugggguccggccagcugcucugggacaccgugaccgggguggacauggcccuguga

SEQ ID NO: 92768 - RNA, 1401 nt, Artificial Sequence
  derived and/or modified CDS sequence (opt1) from neuraminidase__InfluenzaB__ACA96666
augcugcccagcaccauccagacccucacgcuguuccugaccuccggcggggugcuccugagccuguacgucuccgccagccucuccuaccugcuguacagcgacauccuccugaaguucuccccgaccgagaucaccgcccccacgaugccccuggacugcgcgaacgccagcaacgugcaggccgugaaccgcuccgccaccaagggcgucacccuccugcugcccgagccggaguggaccuacccccggcucagcugccccggguccacguuccagaaggcccugcugaucagcccccaccgcuucggcgagaccaaggggaacuccgcgccgcucaucauccgggagcccuucaucgccugcggccccaacgagugcaagcacuucgcccugacccacuacgccgcgcagcccggcggguacuacaacggcacccgcgaggaccggaacaagcugcgccaccucaucagcgugaagcuggggaagaucccgacgguggagaacuccaucuuccacauggccgccuggagcggcuccgccugccacgacgggaaggaguggaccuacaucggcgucgacggccccgacaacaacgcccugcucaagaucaaguacggggaggcguacaccgacaccuaccacagcuacgccaacaagauccugcggacgcaggaguccgccugcaacugcaucggcgggaacugcuaccugaugaucaccgacggcagcgccagcggcguguccgagugccgcuuccucaagauccgggaggggcgcaucaucaaggagaucuuccccaccggccgggugaagcacaccgaggagugcacgugcggguucgccagcaacaagaccaucgagugcgcgugccgcgacaacuccuacaccgccaagcggcccuucgucaagcugaacguggagaccgacacggccgagauccgccugaugugcaccgacaccuaccucgacaccccgcggcccgacgacggcagcaucacggggcccugcgaguccaacggcgaccgcggcagcgggggcaucaagggcggguucgugcaccagcggauggccuccaagaucgggcgcugguacagccggaccauguccaagaccgagcgcaugggcaugggccuguacgucaaguacgacggggaccccugggccgacagcgacgcgcuggccuucuccggcgugauggugagcaugaaggagccggggugguacuccuucggcuucgagaucaaggacaagaagugcgacguccccugcaucgggaucgagauggugcacgacgacggcaaggagaccuggcacagcgccgccacggccaucuacugccucaugggcuccgggcagcugcugugggacaccgugaccggcgucgacauggcgcucuga

SEQ ID NO: 92769 - RNA, 1401 nt, Artificial Sequence
  derived and/or modified CDS sequence (opt1) from neuraminidase__InfluenzaB__ACD56581
augcugcccagcaccauccagacccucacgcuguuccugaccuccggcggggugcuccugagccuguacgucuccgccagccucuccuaccugcuguacagcgacauccuccugaaguucuccaccaccgagaucacggccccgaccaugccccuggacugcgcgaacgccagcaacgugcaggccgugaaccgcuccgccaccaagggcgucacccuccugcugcccgagcccgaguggacguacccgcggcucagcugccccggguccaccuuccagaaggcccugcugaucagcccccaccgcuucggcgagaccaaggggaacuccgcgccccucaucauccgggagccguucaucgccugcggccccaaggagugcaagcacuucgcccugacccacuacgccgcgcagcccggcggguacuacaacggcacgcgcgaggaccggaacaagcugcgccaccucaucagcgugaagcuggggaagauccccaccguggagaacuccaucuuccacauggccgccuggagcggcuccgccugccacgacgggaaggaguggaccuacaucggcgucgacggcccggacagcaacgcccugcucaagaucaaguacggggaggcguacaccgacacguaccacuccuacgccaacaacauccugcggacccaggagagcgccugcaacugcaucggcgggaacugcuaccugaugaucaccgacggcagcgccuccggcaucagcgagugccgcuuccucaagauccgggaggggcgcaucaucaaggagaucuuccccaccggccgggugaagcacacggaggagugcacgugcggguucgccuccaacaagaccaucgagugcgcgugccgcgacaacagcuacaccgccaagcggcccuucgugaagcugaacgucgagaccgacaccgccgagauccgccugaugugcaccgagaccuaccucgacacgccccggccggacgacggcuccaucaccgggcccugcgagagcaacggcaacaagggcuccgggggcaucaagggcggguucgugcaccagcgcauggccagcaagaucgggcggugguacucccgcaccaugagcaagaccaagcggaugggcaugggccuguacgugaaguacgacggggaccccuggacggacuccgacgcccuggcgcucagcggcgucaugguguccauggaggagcccgggugguacagcuucggcuucgagaucaaggacaagaagugcgacgugccgugcaucgggaucgagaugguccacgacggcggcaaggagaccuggcacuccgccgccaccgccaucuacugccugauggggagcggccagcugcucugggacaccgugacggggguggacauggcccuguga

SEQ ID NO: 92770 - RNA, 1401 nt, Artificial Sequence
  derived and/or modified CDS sequence (opt1) from neuraminidase__InfluenzaB__ACF33793
augcugcccagcaccauccagacccucacgcuguuccugaccuccggcggggugcuccugagccuguacgucuccgccagccucuccuaccugcuguacagcgacauccuccugaaguucuccccgaccgagaucaccgcccccacgaugccccuggacugcgcgaacgccagcaacgugcaggccgugaaccgcuccgccaccaagggcgucacccuccugcugcccgagccggaguggaccuacccccggcucagcugccccggguccacguuccagaaggcccugcugaucagcccccaccgcuucggcgagaccaaggggaacuccgcgccgcucaucauccgggagcccuucaucgccugcggccccaacgagugcaagcacuucgcccugacccacuacgccgcgcagcccggcggguacuacaacggcacccgcggggaccggaacaagcugcgccaccucaucagcgugaagcugggcaagaucccgacgguggagaacuccaucuuccacauggccgccuggagcggguccgccugccacgacggcaaggaguggaccuacaucggcgucgacgggcccgacaacaacgcccugcucaagaucaaguacggcgaggcguacaccgacaccuaccacagcuacgccaacaacauccugcggacgcaggaguccgccugcaacugcaucgggggcaacugcuaccugaugaucaccgacggcagcgccagcgggguguccgagugccgcuuccucaagauccgggagggccgcaucaucaaggagaucuuccccaccgggcgggugaagcacaccgaggagugcacgugcggcuucgccagcaacaagaccaucgagugcgcgugccgcgacaacuccuacaccgccaagcggcccuucgucaagcugaacguggagaccgacacggccgagauccgccugaugugcaccgacaccuaccucgacaucccgcggcccgacgacgggagcaucaccggccccugcgaguccaacggcgacaaggggagcggcgggaucaagggcggguucgugcaccagcgcauggccuccaagaucggccggugguacagccgcacgauguccaagaccgagcggaugggcauggggcuguacgucaaguacgacggcgaccccugggccgacagcgacgcgcuggccuucuccggggugauggugagcaugaaggagccgggcugguacuccuucggguucgagaucaaggacaagaagugcgacguccccugcaucggcaucgagauggugcacgacggcgggaaggagaccuggcacagcgccgccaccgccaucuacugccucaugggcuccgggcagcugcugugggacacggugaccggcgucgacauggcgcucuga

SEQ ID NO: 92771 - RNA, 1401 nt, Artificial Sequence
  derived and/or modified CDS sequence (opt1) from neuraminidase__InfluenzaB__ACF33795
augcugcccagcaccauccagacccucacgcuguuccugaccuccggcggggugcuccugagccuguacgucuccgccagccucuccuaccugcuguacagcgacauccuccugaaguucccguccaccgagaucaccgcccccacgaugccccuggacugcgcgaacgccagcaacgugcaggccgugaaccgcuccgccaccaagggcgucacccuccugcugcccgagccggaguggaccuacccccggcucagcugccccggguccacguuccagaaggcccugcugaucagcccccaccgcuucggcgagaccaaggggaacuccgcgccgcucaucauccgggagcccuucaucgccugcggccccaaggagugcaagcacuucgcccugacccacuacgccgcgcagcccggcggguacuacaacggcacccgcggggaccggaacaagcugcgccaccucaucagcgugaagcugggcaagaucccgacgguggagaacuccaucuuccacauggccgccuggagcggguccgccugccacgacggcaaggaguggaccuacaucggcgucgacgggcccgacaacaacgcccugcucaagaucaaguacggcgaggcguacaccgacaccuaccacagcuacgccaacaacauccugcggacgcaggaguccgccugcaacugcaucgggggcaacugcuaccugaugaucaccgacggcagcgccagcgggguguccgagugccgcuuccucaagauccgggagggccgcaucaucaaggagaucuuccccaccgggcggaucaagcacaccgaggagugcacgugcggcuucgccagcaacaagaccaucgagugcgcgugccgcgacaacuccuacaccgccaagcggcccuucgugaagcugaacgucgagaccgacacggccgagauccgccugaugugcaccgagaccuaccucgacaccccgcggcccgacgacgggagcaucacgggccccugcgaguccaacggcgacaaggggagcggcgggaucaagggcggguucgugcaccagcgcauggccuccaagaucggccggugguacagccgcaccauguccaagaccgagaagaugggcauggggcuguacgugaaguacgacggcgagcccugggccgacagcgacgcgcugaccuucuccggggucauggugagcauggaggagccgggcugguacuccuucggguucgagaucaaggacaagaagugcgacgugcccugcaucggcaucgagaugguccacgacggcgggaaggagacguggcacagcgccgccaccgccaucuacugccucaugggcuccgggcagcugcugugggacaccgugaccggcgugaacauggcccucuga

SEQ ID NO: 92772 - RNA, 1401 nt, Artificial Sequence
  derived and/or modified CDS sequence (opt1) from neuraminidase__InfluenzaB__ACF33797
augcugcccagcaccauccagacccucacgcuguuccugaccuccggcggggugcuccugagccuguacgucuccgccagccucuccuaccugcuguacagcgacauccuccugaaguucuccccgaccgagaucaccgcccccacgaugccccuggacugcgcgaacgccagcaacgugcaggccgugaaccgcuccgccaccaagggcgucacccuccugcugcccgagccggaguggaccuacccccggcucagcugccccggguccacguuccagaaggcccugcugaucagcccccaccgcuucggcgagaccaaggggaacuccgcgccgcucaucauccgggagcccuucaucgccugcggccccaacgagugcaagcacuucgcccugacccacuacgccgcgcagcccggcggguacuacaacggcacccgcggggaccggaacaagcugcgccaccucaucagcgugaagcugggcaagaucccgacgguggagaacuccaucuuccacauggccgccuggagcggguccgccugccacgacggcaaggaguggaccuacaucggcgucgacgggcccgacaacaacgcccugcucaagaucaaguacggcgaggcguacaccgacaccuaccacagcuacgccaacaacacgcugcggacccaggaguccgccugcaacugcaucgggggcaacugcuaccugaugaucaccgacggcagcgccagcgggguguccgagugccgcuuccucaagauccgggagggccgcaucaucaaggagaucuuccccaccgggcgggugaagcacacggaggagugcacgugcggcuucgccagcaacaagaccaucgagugcgcgugccgcgacaacuccuacaccgccaagcggcccuucgucaagcugaacguggagaccgacaccgccgagauccgccugaugugcaccgagaccuaccucgacacgccgcggcccgacgacgggagcaucaccggccccugcgaguccaacggcgacaaggggagcggcgggaucaagggcggguucgugcaccagcgcauggccuccaagaucggccggugguacagccgcaccauguccaagaccgagcggaugggcauggggcuguacgucaaguacgacggcgaccccugggccgacagcgacgcgcuggcccucaucggggugaugguguccauggaggagccgggcugguacagcuucggguucgagaucaaggacaagaagugcgacguccccugcaucggcaucgagauggugcacgacggcgggaaggagacguggcacuccgccgccaccgccaucuacugccugaugggcagcgggcagcugcucugggacaccgugaccggcgucaacauggcgcuguga

SEQ ID NO: 92773 - RNA, 1401 nt, Artificial Sequence; identical to SEQ ID NO: 92752
  derived and/or modified CDS sequence (opt1) from neuraminidase__InfluenzaB__ACF41662

SEQ ID NO: 92774 - RNA, 1401 nt, Artificial Sequence
  derived and/or modified CDS sequence (opt1) from neuraminidase__InfluenzaB__ACF54140
augcugcccagcaccauccagacccucacgcuguuccugaccuccggcggggugcuccugagccuguacgucuccgccagccucuccuaccugcuguacagcgacauccuccugaaguucuccccgaccgagaucaccgcccccacgaugccccuggacugcgcgaacgccagcaacgugcaggccgugaaccgcuccgccaccaagggcgucacccuccugcugcccgagccggaguggaccuacccccggcucagcugccccggguccacguuccagaaggcccugcugaucagcccccaccgcuucggcgagaccaaggggaacuccgcgccgcucaucauccgggagcccuucaucgccugcggccccaacgagugcaagcacuucgcccugacccacuacgccgcgcagcccggcggguacuacaacggcaccaagggggaccgcaacaagcugcggcaccucaucagcgugaagcugggcaagaucccgacgguggagaacuccaucuuccacauggccgccuggagcggguccgccugccacgacggcaaggaguggaccuacaucggcgucgacgggcccgacaacaacgcccugcucaagaucaaguacggcgaggcguacaccgacaccuaccacagcuacgccaacaagauccugcgcacgcaggaguccgccugcaacugcaucgggggcaacugcuaccugaugaucaccgacggcagcgccagcgggguguccgagugccgguuccucaagauccgcgagggccggaucaucaaggagaucuuccccaccgggcgcgugaagcacaccgaggagugcacgugcggcuucgccagcaacaagaccaucgagugcgcgugccgggacaacuccuacaccgccaagcgccccuucgucaagcugaacguggagaccgacacggccgagauccggcugaugugcaccgacaccuaccucgacaccccgcgccccgacgacgggagcaucacgggccccugcgaguccaacggcgaccgggggagcggcgggaucaagggcggguucgugcaccagcgcauggccuccaagaucggccggugguacagccgcaccauguccaagaccgagcggaugggcauggggcuguacgucaaguacgacggcgaccccugggccgacagcgacgcgcuggccuucuccggggugauggugagcaugaaggagccgggcugguacuccuucggguucgagaucaaggacaagaagugcgacguccccugcaucggcaucgagauggugcacgacggcgggaaggagaccuggcacagcgccgccacggccaucuacugccucaugggcuccgggcagcugcugugggacaccgugaccggcgucgacauggcgcucuga

SEQ ID NO: 92775 - RNA, 1401 nt, Artificial Sequence
  derived and/or modified CDS sequence (opt1) from neuraminidase__InfluenzaB__ACF54151
augcugcccagcaccauccagacccucacgcuguuccugaccuccggcggggugcuccugagccuguacgucuccgccagccucuccuaccugcuguacagcgacauccuccugaaguucccguccaccgagaucaccgcccccacgaugccccuggacugcgcgaacgccagcaacgugcaggccgugaaccgcuccgccaccaagggcgucacccuccugcugcccgagccggaguggaccuacccccggcucagcugccccggguccacguuccagaaggcccugcugaucagcccccaccgcuucggcgagaccaaggggaacuccgcgccgcucaucauccgggagcccuucaucgccugcggccccaaggagugcaagcacuucgcccugacccacuacgccgcgcagcccggcggguacuacaacggcacccgcgggaaccggaacaagcugcgccaccucaucagcgugaagcugggcaagaucccgacgguggagaacuccaucuuccacauggccgccuggagcggguccgccugccacgacggcaaggaguggaccuacaucggcgucgacgggcccgacaacaacgcccugcucaagaucaaguacggcgaggcguacaccgacaccuaccacagcuacgccaacaacauccugcggacgcaggaguccgccugcaacugcaucgggggcaacugcuaccugaugaucaccgacggcagcgccagcgggguguccgagugccgcuuccucaagauccgggagggccgcaucaucaaggagaucuuccccaccgggcggaucaagcacaccgaggagugcacgugcggcuucgccagcaacaagaccaucgagugcgcgugccgcgacaacuccuacaccgccaagcggcccuucgugaagcugaacgucgagaccgacacggccgagauccgccugaugugcaccgagaccuaccucgacaccccgcggcccgacgacgggagcaucacgggccccugcgaguccaacggcgacaaggggagcggcgggaucaagggcggguucgugcaccagcgcauggccuccaagaucggccggugguacagccgcaccauguccaagaccaagcggaugggcauggggcuguacgugaaguacgacggcgaccccugggccgacagcgacgcgcuggccuucuccggggucauggugagcauggaggagccgggcugguacuccuucggguucgagaucaaggacaagaagugcgacgugcccugcaucggcaucgagaugguccacgacggcgggaaggagaccuggcacagcgccgccacggccaucuacugccucaugggcuccgggcagcugcugugggacaccgugaccggcgugaacauggcgcucuga

SEQ ID NO: 92776 - RNA, 1401 nt, Artificial Sequence
  derived and/or modified CDS sequence (opt1) from neuraminidase__InfluenzaB__ACF54162
augcugcccagcaccauccagacccucacgcuguuccugaccuccggcggggugcuccugagccuguacgucuccgccagccucuccuaccugcuguacagcgacauccuccugaaguucucccagaccgagaucaccgccccgaucaugccccuggacugcgcgaacgccagcaacgugcaggccgugaaccgcuccgccacgaagggcgucacccuccugcugcccgagcccgaguggaccuacccgcggcucagcugccccggguccaccuuccagaaggcccugcugaucagcccccaccgcuucggcgagacgaaggggaacuccgcgccccucaucauccgggagccguucaucgccugcggccccaaggagugcaagcacuucgcccugacccacuacgccgcgcagcccggcggguacuacaacggcacccgcgaggaccggaacaagcugcgccaccucaucagcgugaagcuggggaagauccccaccguggagaacuccaucuuccacauggccgccuggagcggcuccgccugccacgacgggaaggaguggacguacaucggcgucgacggcccggacagcaacgcccugcucaagaucaaguacggggaggcguacaccgacaccuaccacuccuacgccaagaacauccugcggacccaggagagcgccugcaacugcaucggcggggacugcuaccugaugaucacggacggccccgccagcggcaucuccgagugccgcuuccucaagauccgggaggggcgcaucaucaaggagaucuuccccaccggccgggugaagcacaccgaggagugcacgugcggguucgccagcaacaagaccaucgagugcgcgugccgcgacaacaacuacaccgccaagcggcccuucgugaagcugaacgucgagaccgacaccgccgagauccgccugaugugcacggagaccuaccucgacaccccgcggcccaacgacggcuccaucaccgggcccugcgagagcgacggcgacaagggcuccgggggcaucaagggcggguucgugcaccagcgcauggccagcaagaucgggcggugguacucccgcacgaugagcaagaccaagcggaugggcauggagcuguacgugaaguacgacggcgaccccuggaccgacuccgaggcccuggcgcucagcggggucaugguguccauggaggagccgggcugguacagcuucggguucgagaucaaggacaagaagugcgacgugcccugcaucggcaucgagaugguccacgacgggggcaagaccacguggcacuccgccgccaccgccaucuacugccugaugggcagcgggcagcugcucugggacaccgugaccggcguggacauggcccuguga

SEQ ID NO: 92777 - RNA, 1401 nt, Artificial Sequence
  derived and/or modified CDS sequence (opt1) from neuraminidase__InfluenzaB__ACF54184
augcugcccagcaccauccagacccucacgcuguuccugaccuccggcggggugcuccugagccuguacgucuccgccagccucuccuaccugcuguacagcgacauccuccugaaguucuccaccaccgagaucacggccccgaccaugccccuggacugcgcgaacgccagcaacgugcaggccgugaaccgcuccgccaccaagggcgucacccuccugcugcccgagcccgaguggacguacccgcggcucagcugccccggguccaccuuccagaaggcccugcugaucagcccccaccgcuucggcgagaccaaggggaacuccgcgccccucaucauccgggagccguucaucgccugcggccccaaggagugcaagcacuucgcccugacccacuacgccgcgcagcccggcggguacuacaacggcacgaaggaggaccgcaacaagcugcggcaccucaucagcgugaagcuggggaagauccccaccguggagaacuccaucuuccacauggccgccuggagcggcuccgccugccacgacgggaaggaguggaccuacaucggcgucgacggcccggacagcaacgcccugcucaagaucaaguacggggaggcguacaccgacacguaccacuccuacgccaacaacauccugcgcacccaggagagcgccugcaacugcaucggcgggaacugcuaccugaugaucaccgacggcagcgccuccggcaucagcgagugccgguuccucaagauccgcgaggggcggaucaucaaggagaucuuccccaccggccgcgugaagcacacggaggagugcacgugcggguucgccuccaacaagaccaucgagugcgcgugccgggacaacagcuacaccgccaagcgccccuucgugaagcugaacgucgagaccgacaccgccgagauccggcugaugugcaccgagaccuaccucgacacgccccgcccggacgacggcuccaucaccgggcccugcgagagcaacggcaacaagggcuccgggggcaucaagggcggguucgugcaccagcggauggccagcaagaucgggcgcugguacucccggaccaugagcaagaccaagcgcaugggcaugggccuguacgugaaguacgacggggaccccuggacggacuccgacgcccuggcgcucagcggcgucaugguguccauggaggagcccgggugguacagcuucggcuucgagaucaaggacaagaagugcgacgugccgugcaucgggaucgagaugguccacgacggcggcaaggagaccuggcacuccgccgccaccgccaucuacugccugauggggagcggccagcugcucugggacaccgugacggggguggacauggcccuguga

SEQ ID NO: 92778 - RNA, 1401 nt, Artificial Sequence
  derived and/or modified CDS sequence (opt1) from neuraminidase__InfluenzaB__ACF54206
augcugcccagcaccauccagacccucacgcuguuccugaccuccggcggggugcuccugagccuguacgucuccgccagccucuccuaccugcuguacagcgacauccuccugaaguucuccaccaccgagacgaccgccccgaccaugccccuggacugcgcgaacgccagcaacgugcaggccgugaaccgcuccgccaccaagggcgucacgcuccugcugcccgagcccgaguggaccuacccgcggcucagcugccccggguccaccuuccagaaggcccugcugaucagcccccaccgcuucggcgagaccaaggggaacuccgcgccccucaucauccgggagccguucaucgccugcggccccaaggagugcaagcacuucgcccugacgcacuacgccgcgcagcccggcggguacuacaacggcacccgcgaggaccggaacaagcugcgccaccucaucagcgugaagcuggggaagauccccaccguggagaacuccaucuuccacauggccgccuggagcggcuccgccugccacgacgggaaggaguggaccuacaucggcgucgacggcccggacagcaacgcccugcucaagaucaaguacggggaggcguacacggacaccuaccacuccuacgccaacaacauccugcggacccaggagagcgccugcaacugcaucggcgggaacugcuaccugaugaucaccgacggcagcgccuccggcaucagcgagugccgcuuccucaagauccgggaggggcgcaucaucaaggagaucuuccccacgggccgggugaagcacaccgaggagugcacgugcggguucgccuccaacaagaccaucgagugcgcgugccgcgacaacagcuacaccgccaagcggcccuucgugaagcugaacgucgagaccgacaccgccgagauccgccugaugugcaccgagacguaccucgacacgccccggccggacgacggcuccaucaccgggcccugcgagagcaacggcaacaagggcuccgggggcaucaagggcggguucgugcaccagcgcauggccagcaagaucgggcggugguacucccgcaccaugagcaagaccaagcggaugggcaugggccuguacgugaaguacgacggggaccccuggaccgacuccgacgcccuggcgcucagcggcgucaugguguccauggaggagcccgggugguacagcuucggcuucgagaucaaggacaagaagugcgacgugccgugcaucgggaucgagaugguccacgacggcggcaaggagaccuggcacuccgccgccaccgccaucuacugccugauggggagcggccagcugcucugggacacggugaccgggguggacauggcccuguga

SEQ ID NO: 92779 - RNA, 1401 nt, Artificial Sequence
  derived and/or modified CDS sequence (opt1) from neuraminidase__InfluenzaB__ACF54217
augcugcccagcaccauccagacccucacgcuguuccugaccuccggcggggugcuccugagccuguacgucuccgccagccucuccuaccugcuguacagcgacauccuccugaaguucucccagaccgagaucaccgccccgaucaugccccuggacugcgcgaacgccagcaacgugcaggccgugaaccacuccgccacgaagggcgucacccuccugcugcccgagcccgaguggaccuacccgcgccucagcugccccggguccaccuuccagaaggcccugcugaucagcccccaccgguucggcgagacgaaggggaacuccgcgccccucaucauccgcgagccguucaucgccugcggccccaaggagugcaagcacuucgcccugacccacuacgccgcgcagcccggcggguacuacaacggcacccgggaggaccgcaacaagcugcggcaccucaucagcgugaagcuggggaagauccccaccguggagaacuccaucuuccacauggccgccuggagcggcuccgccugccacgacgggcgcgaguggacguacaucggcgucgacggcccggacagcaacgcccugcucaagaucaaguacggggaggcguacaccgacaccuaccacuccuacgccaagaacauccugcggacccaggagagcgccugcaacugcaucggcggggacugcuaccugaugaucacggacggccccgccagcggcaucuccgagugccgcuuccucaagauccgggaggggcgcaucaucaaggagaucuuccccaccggccgggugaagcacaccgaggagugcacgugcggguucgccagcaacaagaccaucgagugcgcgugccgcgacaacuccuacaccgccaagcggcccuucgugaagcugaacgucgagaccgacaccgccgagauccgccugaugugcacggagaccuaccucgacaccccgcggcccaacgacggcagcaucaccgggcccugcgaguccaacggcgacaagggcagcgggggcaucaagggcggguucgugcaccagcgcauggccuccaagaucgggcggugguacagccgcacgauguccaagaccaagcggaugggcaugggccuguacgugaaguacgacggggaccccuggaccgacagcgaggcccuggcgcucuccggcgucauggugagcauggaggagccggggugguacuccuucggcuucgagaucaaggacaagaagugcgacgugcccugcaucgggaucgagaugguccacgacggcggcaagaccacguggcacagcgccgccaccgccaucuacugccugaugggguccggccagcugcucugggacaccgugaccgggguggacauggcccuguga

SEQ ID NO: 92780 - RNA, 1401 nt, Artificial Sequence; identical to SEQ ID NO: 92671
  derived and/or modified CDS sequence (opt1) from neuraminidase__InfluenzaB__ACF54228

SEQ ID NO: 92781 - RNA, 1401 nt, Artificial Sequence; identical to SEQ ID NO: 92692
  derived and/or modified CDS sequence (opt1) from neuraminidase__InfluenzaB__ACF54239

SEQ ID NO: 92782 - RNA, 1401 nt, Artificial Sequence
  derived and/or modified CDS sequence (opt1) from neuraminidase__InfluenzaB__ACF54261
augcugcccagcaccauccagacccucacgcuguuccugaccuccggcggggugcuccugagccuguacgucuccgccagccucuccuaccugcuguacagcgacauccuccugaaguucuccccgaccgagaucaccgcccccacgaugccccuggacugcgcgaacgccagcaacgugcaggccgugaaccgcuccgccaccaagggcgucacccuccugcugcccgagccggaguggaccuacccccggcucagcugccccggguccacguuccagaaggcccugcugaucagcccccaccgcuucggcgagaccaaggggaacuccgcgccgcucaucauccgggagcccuucaucgccugcggccccaaggagugcaagcacuucgcccugacccacuacgccgcgcagcccggcggguacuacaacggcacccgcgaggaccggaacaagcugcgccaccucgugagcgugaagcuggggaagaucccgacggucgagaacuccaucuuccacauggccgccuggagcggcuccgccugccacgacgggaaggaguggaccuacaucggcguggacggccccgacagcaacgcccugcucaagaucaaguacggggaggcguacaccgacaccuaccacuccuacgccaacaacauccugcggacgcaggagagcgccugcaacugcaucggcgggaacugcuaccugaugaucaccgacggcagcgccuccggcaucagcgagugccgcuuccucaagauccgggaggggcgcaucaucaaggagaucuuccccaccggccgggugaagcacaccgaggagugcacgugcggguucgccuccaacaagaccaucgagugcgcgugccgcgacaacagcuacaccgccaagcggcccuucgucaagcugaacguggagaccgacacggccgagauccgccugaugugcaccgagaccuaccucgacaccccgcggcccgacgacggcuccaucacggggcccugcgagagcaacggcgacaagggcuccgggggcaucaagggcggguucgugcaccagcgcauggccagcaagaucgggcggugguacucccgcaccaugagcaagaccaagcggaugggcaugggccuguacgucaaguacgacggggaccccuggaccgacuccgacgcccuggcgcucagcggcgugaugguguccauggaggagccggggugguacagcuucggcuucgagaucaaggacaagaagugcgacguccccugcaucgggaucgagauggugcacgacggcggcaaggagacguggcacuccgccgccaccgccaucuacugccugauggggagcggccagcugcucugggacaccgugaccggggucgacauggcccuguga

SEQ ID NO: 92783 - RNA, 1401 nt, Artificial Sequence
  derived and/or modified CDS sequence (opt1) from neuraminidase__InfluenzaB__ACF54272
augcugcccagcaccauccagacccucacgcuguuccugaccuccggcggggugcuccugagccuguacgucuccgccagccucuccuaccugcuguacagcgacauccuccugaaguucuccaccaccgagaucacggccccgaccaugccccuggacugcgcgaacgccagcaacgugcaggccgugaaccgcuccgccaccaagggcgucacccuccugcugcccgagcccgaguggacguacccgcggcucagcugccccggguccaccuuccagaaggcccugcugaucagcccccaccgcuucggcgagaccaaggggaacuccgcgccccucaucauccgggagccguucaucgccugcggccccaaggagugcaagcacuucgcccugacccacuacgccgcgcagcccggcggguacuacaacggcacgcgcgaggaccggaacaagcugcgccaccucaucagcgugaagcuggggaagauccccaccguggagaacuccaucuuccacauggccgccuggagcggcuccgccugccacgacgggaaggaguggaccuacaucggcgucgacggcccggacagcaacgcccugcucaagaucaaguacggggaggcguacaccgacacguaccacuccuacgccaacaacauccugcggacccaggagagcgccugcaacugcaucggcgggaacugcuaccugaugaucaccgacggcagcgccuccggcaucagcgagugccgcuuccucaagauccgggaggggcgcaucaucaaggagaucuuccccaccggccgggugaagcacacggaggagugcacgugcggguucgccuccaacaagaccaucgagugcgcgugccgcgacaacagcuacaccgccaagcggcccuucgugaagcugaacgucgagaccgacaccgccgagauccgccugaugugcaccgagaccuaccucgacacgccccggccggacgacggcuccaucaccgggcccugcgagagcaacggcgacaagggcuccgggggcaucaagggcggguucgugcaccagcgcauggccagcaagaucgggcggugguacucccgcaccaugagcaagaccaagcggaugggcaugggccuguacgugaaguacgacggggaccccuggacggacuccgacgcccuggcgcucagcggcgucaugguguccauggaggagcccgggugguacagcuucggcuucgagaucaaggacaagaagugcgacgugccgugcaucgggaucgagaugguccacgacggcggcaaggagaccuggcacuccgccgccaccgccaucuacugccugauggggagcggccagcugcucugggacaccgugacggggguggacauggcccuguga

SEQ ID NO: 92784 - RNA, 1401 nt, Artificial Sequence
  derived and/or modified CDS sequence (opt1) from neuraminidase__InfluenzaB__ACF54283
augcugcccagcaccauccagacccucacgcuguuccugaccuccggcggggugcuccugagccuguacgucuccgccagccucuccuaccugcuguacagcgacauccuccugaaguucuccaccaccgagaucacggccccgaccaugccccuggacugcgcgaacgccagcaacgugcaggccgugaaccgcuccgccaccaagggcgucacccuccugcugcccgagcccgaguggacguacccgcggcucagcugccccggguccaccuuccagaaggcccugcugaucagcccccaccgcuucggcgagaccaaggggaacuccgcgccccucaucauccgggagccguucaucgccugcggccccaaggagugcaagcacuucgcccugacccacuacgccgcgcagcccggcggguacuacaacggcacgcgcgaggaccggaacaagcugcgccaccucgugagcgugaagcuggggaagauccccaccgucgagaacuccaucuuccacauggccgccuggagcggcuccgccugccacgacgggaaggaguggaccuacaucggcguggacggcccggacagcaacgcccugcucaagaucaaguacggggaggcguacaccgacacguaccacuccuacgccaacaacauccugcggacccaggagagcgccugcaacugcaucggcgggaacugcuaccugaugaucaccgacggcagcgccuccggcaucagcgagugccgcuuccucaagauccgggaggggcgcaucaucaaggagaucuuccccaccggccgggugaagcacacggaggagugcacgugcggguucgccuccaacaagaccaucgagugcgcgugccgcgacaacagcuacaccgccaagcggcccuucgucaagcugaacguggagaccgacaccgccgagauccgccugaugugcaccgagaccuaccucgacacgccccggccggacgacggcuccaucaccgggcccugcgagagcaacggcgacaagggcuccgggggcaucaagggcggguucgugcaccagcgcauggccagcaagaucgggcggugguacucccgcaccaugagcaagaccaagcggaugggcaugggccuguacgucaaguacgacggggaccccuggacggacuccgacgcccuggcgcucagcggcgugaugguguccauggaggagcccgggugguacagcuucggcuucgagaucaaggacaagaagugcgacgucccgugcaucgggaucgagauggugcacgacggcggcaaggagaccuggcacuccgccgccaccgccaucuacugccugauggggagcggccagcugcucugggacaccgugacgggggucgacauggcccuguga

SEQ ID NO: 92785 - RNA, 1401 nt, Artificial Sequence
  derived and/or modified CDS sequence (opt1) from neuraminidase__InfluenzaB__ACF54294
augcugcccagcaccauccagacccucacgcuguuccugaccuccggcggggugcuccugagccuguacgucuccgccagccucuccuaccugcuguacagcgacauccuccugaaguucuccaccaccgagaucacggccccgaccaucccccuggacugcgcgaacgccagcaacgugcaggccgugaaccgcuccgccaccaagggcgucaccuuccuccugcccgagcccgaguggacguacccgcggcugagcugccccggguccaccuuccagaaggcccuccugaucagcccccaccgcuucggcgagaccaaggggaacuccgcgccccugaucauccgggagccguucaucgccugcggccccaaggagugcaagcacuucgcccucacccacuacgccgcgcagcccggcggguacuacaacggcacgcgcgaggaccggaacaagcugcgccaccugaucagcgugaagcucgggaagauccccaccguggagaacuccaucuuccacauggccgccuggagcggcuccgccugccacgacgggaaggaguggaccuacaucggcgucgacggcccggacagcaacgcccugcugaagaucaaguacggggaggcguacaccgacacguaccacuccuacgccaacaacauccuccggacccaggagagcgccugcaacugcaucggcgggaacugcuaccugaugaucaccgacggcagcgccuccggcaucagcgagugccgcuuccugaagauccgggaggggcgcaucaucaaggagaucuuccccaccggccgggugaagcacacggaggagugcacgugcggguucgccuccaacaagaccaucgagugcgcgugccgcgacaacagcuacaccgccaagcggcccuucgugaagcucaacgucgagaccgacaccgccgagauccgccugaugugcaccgagaccuaccuggacacgccccggccggacgacggcuccaucaccgggcccugcgagagcaacggcaacaagggcuccgggggcaucaagggcggguucgugcaccagcgcauggccagcaagaucgggcggugguacucccgcaccaugagcaagaccaagcggaugggcaugggccucuacgugaaguacgacggggaccccuggacggacuccgacgcccuggcgcugagcggcgucaugguguccauggaggagcccgggugguacagcuucggcuucgagaucaaggacaagaagugcgacgugccgugcaucgggaucgagaugguccacgacggcggcaaggagaccuggcacuccgccgccaccgccaucuacugccucauggggagcggccagcugcugugggacaccgugacggggguggacauggcccucuga

SEQ ID NO: 92786 - RNA, 1401 nt, Artificial Sequence
  derived and/or modified CDS sequence (opt1) from neuraminidase__InfluenzaB__ACF54305
augcugcccagcaccauccagacccucacgcuguuccugaccuccggcggggugcuccugagccuguacgucuccgccagccucuccuaccugcuguacagcgacauccuccugaaguucuccaccaccgagaucacggccccgaccaugccccuggacugcgcgaacgccagcaacgugcaggccgugaaccgcuccgccaccaagggcgucaccuuccuccugcccgagcccgaguggacguacccgcggcugagcugccccggguccaccuuccagaaggcccuccugaucagcccccaccgcuucggcgagaccaaggggaacuccgcgccccugaucauccgggagccguucaucgccugcggccccaaggagugcaagcacuucgcccucacccacuacgccgcgcagcccggcggguacuacaacggcacgcgcgaggaccggaacaagcugcgccaccugaucagcguggagcucgggaagauccccaccguggagaacuccaucuuccacauggccgccuggagcggcuccgccugccacgacgggaaggaguggaccuacaucggcgucgacggcccggacagcaacgcccugcugaagaucaaguacggggaggcguacaccgacacguaccacuccuacgccaacaacauccuccggacccaggagagcgccugcaacugcaucggcgggaacugcuaccugaugaucaccgacggcagcgccuccggcaucagcgagugccgcuuccugaagauccgggaggggcgcaucaucaaggagaucuuccccaccggccgggugaagcacacggaggagugcacgugcggguucgccuccaacaagaccaucgagugcgcgugccgcgacaacagcuacaccgccaagcggcccuucgugaagcucaacgucgagaccgacaccgccgagauccgccugaugugcaccgagaccuaccuggacacgccccggccggacgacggcuccaucaccgggcccugcgagagcaacggcaacaagggcuccgggggcaucaagggcggguucgugcaccagcgcauggccagcaagaucgggcggugguacucccgcaccaugagcaagaccaagcggaugggcaugggccucuacgugaaguacgacggggaccccuggacggacuccgacgcccuggcgcugagcggcgucaugguguccauggaggagcccgggugguacagcuucggcuucgagaucaaggacaagaagugcgacgugccgugcaucgggaucgagaugguccacgacggcggcaaggagaccuggcacuccgccgccaccgccaucuacugccucauggggagcggccagcugcugugggacaccgugacggggguggacauggcccucuga

SEQ ID NO: 92787 - RNA, 1401 nt, Artificial Sequence
  derived and/or modified CDS sequence (opt1) from neuraminidase__InfluenzaB__ACF54316
augcugcccagcaccauccagacccucacgcuguuccugaccuccggcggggugcuccugagccuguacgucuccgccagccucuccuaccugcuguacagcgacauccuccugaaguucuccccgaccgagaucaccgcccccacgaugccccuggacugcgcgaacgccagcaacgugcaggccgugaaccgcuccgccaccaagggcgucacccuccugcugcccgagccggaguggaccuacccccggcucagcugccccggguccacguuccagaaggcccugcugaucagcccccaccgcuucggcgagaccaaggggaacuccgcgccgcucaucauccgggagcccuucaucgccugcggccccaacgagugcaagcacuucgcccugacccacuacgccgcgcagcccggcggguacuacaacggcacccgcggggaccggaacaagcugcgccaccucaucagcgugaagcugggcaagaucccgacgguggagaacuccaucuuccacauggccgccuggagcggguccgccugccacgacggcaaggaguggaccuacaucggcgucgacgggcccgacaacaacgcccugcucaagaucaaguacggcgaggcguacaccgacaccuaccacagcuacgccaacaacauccugcggacgcaggaguccgccugcaacugcaucgggggcaacugcuaccugaugaucaccgacggcagcgccagcgggguguccgagugccgcuuccucaagauccgggagggccgcaucaucaaggagaucuuccccaccgggcgggugaagcacaccgaggagugcacgugcggcuucgccagcaacaagaccaucgagugcgcgugccgcgacaacuccuacaccgccaagcggcccuucgucaagcugaacguggagaccgacacggccgagauccgccugaugugcaccgagaccuaccucgacaccccgcggcccgacgacgggagcaucacgggccccugcgaguccaacggcgacaaggggagcggcgggaucaagggcggguucgugcaccagcgcauggccuccaagaucggccggugguacagccgcaccauguccaagaccgagcggaugggcauggggcuguacgucaaguacgacggcgaccccugggccgacagcgacgcgcuggcccucaucggggugaugguguccauggaggagccgggcugguacagcuucggguucgagaucaaggacaagaacugcgacguccccugcaucggcaucgagauggugcacgacggcgggaaggagaccuggcacuccgccgccacggccaucuacugccugaugggcagcgggcagcugcucugggacaccgugaccggcgucaacauggcgcuguga

SEQ ID NO: 92788 - RNA, 1404 nt, Artificial Sequence
  derived and/or modified CDS sequence (opt1) from neuraminidase__InfluenzaB__ACF54338
augcugcccagcaccauccagacccucacgcuguuccugaccuccggcggggugcuccugagccuguacgucuccgccagccucuccuaccugcuguacagcgacauccuccugaaguucccguccaccgagaucaccgcccccacgaugccccuggacugcgcgaacgccagcaacgugcaggccgugaaccgcuccgccaccaagggcgucacccuccugcugcuccccgagccggaguggaccuacccccggcugagcugccccggguccacguuccagaaggcccugcucaucagcccccaccgcuucggcgagaccaaggggaacuccgcgccgcugaucauccgggagcccuucaucgccugcggccccaaggagugcaagcacuucgcccugacccacuacgccgcgcagcccggcggguacuacaacggcacccgcggggaccggaacaagcuccgccaccugaucagcgugaagcugggcaagaucccgacgguggagaacuccaucuuccacauggccgccuggagcggguccgccugccacgacggcaaggaguggaccuacaucggcgucgacgggcccgacaacaacgcccuccugaagaucaaguacggcgaggcguacaccgacaccuaccacagcuacgccaacaacauccugcggacgcaggaguccgccugcaacugcaucgggggcaacugcuaccucaugaucaccgacggcagcgccagcgggguguccgagugccgcuuccugaagauccgggagggccgcaucaucaaggagaucuuccccaccgggcggaucaagcacaccgaggagugcacgugcggcuucgccagcaacaagaccaucgagugcgcgugccgcgacaacuccuacaccgccaagcggcccuucgugaagcugaacgucgagaccgacacggccgagauccgccucaugugcaccgagaccuaccuggacaccccgcggcccgacgacgggagcaucacgggccccugcgaguccaacggcgggaagggcagcgggggcaucaagggcggguucgugcaccagcgcauggccuccaagaucggccggugguacagccgcaccauguccaagaccgagcggaaggggaugggccuguacgugaaguacgacggggaccccugggccgacagcgacgcgcucgucuucuccggcgugauggugagcauggaggagccggggugguacuccuucggcuucgagaucaaggacaagaagugcgacguccccugcaucggcaucgagauggugcacgacgggggcaaggagaccuggcacagcgccgccacggccaucuacugccugaugggguccggccagcugcucugggacaccgugaccggcgucaacauggcccuguga

SEQ ID NO: 92789 - RNA, 1401 nt, Artificial Sequence
  derived and/or modified CDS sequence (opt1) from neuraminidase__InfluenzaB__ACF54349
augcugcccagcaccauccagacccucacgcuguuccugaccuccggcggggugcuccugagccuguacgucuccgccagccucuccuaccugcuguacagcgacauccuccugaaguucucccagaccgagaucaccgccccgaucaugccccuggacugcgcgaacgccagcaacgugcaggccgugaaccgcuccgccgccaagggcgucacgcuccugcugcccgagcccgaguggaccuacccgcggcucagcugccccggguccaccuuccagaaggcgcugcugaucaacccccaccgcuucggcgagaccaaggggaacagcgcgccccucaucauccgggagccguucaucgccugcggccccacggagugcaagcacuucgcccugacccacuacgccgcccagcccggcggguacuacaacggcacccgcgaggaccggaacaagcugcgccaccucaucuccgugaagcuggggaagauccccaccguggagaacagcaucuuccacauggccgccugguccggcagcgccugccacgacgggaaggaguggacguacaucggcgucgacggcccggacuccaacgcgcugcucaagaucaaguacggggaggccuacaccgacaccuaccacagcuacgccaagaacauccugcggacccaggaguccgccugcaacugcaucggcggggacugcuaccugaugaucacggacggcagcgccagcggcaucuccgagugccgcuuccucaagauccgggaggggcgcaucaucaaggagaucuuccccaccggccgggugaagcacaccgaggagugcacgugcggguucgcgagcaacaagaccaucgagugcgccugccgcgacaacuccuacaccgccaagcggcccuucgugaagcugaacgucgagaccgacaccgccgagauccgccugaugugcacggagaccuaccucgacacgccccggccgaacgacggcagcaucaccgggcccugcgaguccgacggcgacaagggcagcgggggcaucaagggcggguucgugcaccagcgcauggccuccaagaucgggcggugguacagccgcaccauguccaagaccaagcggaugggcaugggccuguacgugaaguacgacggggaccccuggaccgacagcgaggcgcuggcccucuccggcgucauggugagcauggaggagcccgggugguacuccuucggcuucgagaucaaggacaagaagugcgacgugccgugcaucgggaucgagaugguccacgacggcggcaagaccacguggcacagcgccgccaccgccaucuacugccugaugggguccggccagcugcucugggacaccgugaccgggguggacauggcgcuguga

SEQ ID NO: 92790 - RNA, 1401 nt, Artificial Sequence
  derived and/or modified CDS sequence (opt1) from neuraminidase__InfluenzaB__ACF54371
augcugcccagcaccauccagacccucacgcuguuccugaccuccggcggggugcuccugagccuguacgucuccgccagccucuccuaccugcuguacagcgacauccuccugaaguucucccagaccgagaucaccgccccgaucaugccccuggacugcgcgaacgccagcaacgugcaggccgugaaccgcuccgccgccaagggcgucacgcuccugcugcccgagcccgaguggaccuacccgcggcucagcugccccggguccaccuuccagaaggcgcugcugaucagcccccaccgcuucggcgagaccaaggggaacuccgcgccccucaucauccgggagccguucaucgccugcggccccacggagugcaagcacuucgcccugacccacuacgccgcccagcccggcggguacuacaacggcacccgcgaggaccggaacaagcugcgccaccucaucagcgugaagcuggggaagauccccaccguggagaacuccaucuuccacauggccgccuggagcggcuccgccugccacgacgggaaggaguggacguacaucggcgucgacggcccggacagcaacgcgcugcucaagaucaaguacggggaggccuacaccgacaccuaccacuccuacgccaagaacauccugcggacccaggagagcgccugcaacugcaucggcggggacugcuaccugaugaucacggacggccccgccagcggcaucuccgagugccgcuuccucaagauccgggaggggcgcaucaucaaggagaucuuccccaccggccgggugaagcacaccgaggagugcacgugcggguucgcgagcaacaagaccaucgagugcgccugccgcgacaacuccuacaccgccaagcggcccuucgugaagcugaacgucgagaccgacaccgccgagauccgccugaugugcacggagaccuaccucgacaccccgcggcccaacgacggcagcaucaccgggcccugcgaguccgacggcgacaagggcagcgggggcaucaagggcggguucgugcaccagcgcauggccuccaagaucgggcggugguacagccgcacgauguccaagaccaagcggaugggcaugggccuguacgugaaguacgacggggaccccuggaccgacagcgaggcgcuggcccucuccggcgucauggugagcauggaggagccggggugguacuccuucggcuucgagaucaaggacaagaagugcgacgugcccugcaucgggaucgagaugguccacgacggcggcaagaccacguggcacagcgccgccaccgccaucuacugccugaccggguccggccagcugcucugggacaccgugacggggguggacauggcgcuguga

SEQ ID NO: 92791 - RNA, 1401 nt, Artificial Sequence
  derived and/or modified CDS sequence (opt1) from neuraminidase__InfluenzaB__ACI22549
augcugcccagcaccauccagacccucacgcuguuccugaccuccggcggggugcuccugagccuguacgucuccgccagccucuccuaccugcuguacagcgacauccuccugaaguucuccccgaccgagaucaccgcccgcacgaugccccuggacugcgcgaacgccagcaacgugcaggccgugaaccgguccgccaccaagggcgucacccuccugcugcccgagcccgaguggaccuacccgcgccucagcugccccggguccacguuccagaaggcccugcugaucagcccccaccgguucggcgagaccaaggggaacuccgcgccccucaucauccgcgagccguucaucgccugcggccccaacgagugcaagcacuucgcccugacccacuacgccgcgcagcccggcggguacuacaacggcacccgcggggaccggaacaagcugcggcaccucaucagcgugaagcugggcaagauccccacgguggaggacuccaucuuccacauggccgccuggagcggguccgccugccacgacggcaaggaguggaccuacaucggcgucgacgggccggacaacaacgcccugcucaagaucaaguacggcgaggcguacaccgacaccuaccacagcuacgccaacaacauccugcgcacgcaggaguccgccugcaacugcaucgggggcaacugcuaccugaugaucaccgacggcagcgccagcgggguguccgagugccgguuccucaagauccgcgagggccggaucaucaaggagaucuuccccaccgggcgcgugaagcacaccgaggagugcacgugcggcuucgccagcaacaagaccaucgagugcgcgugccgggacaacuccuacaccgccaagcgccccuucgucaagcugaacguggagaccgacacggccgagauccggcugaugugcaccgagaccuaccucgacacgccccgcccggacgacgggagcaucaccggccccugcgaguccaacggcgacaaggggagcggcgggaucaagggcggguucgugcaccagcggauggccuccaagaucggccgcugguacagccggaccauguccaagaccgagcgcaugggcauggggcuguacgucaaguacgacggcgaccccugggccgacagcgacgcgcuggcccucaucggggugaugguguccauggaggagcccggcugguacagcuucggguucgagaucaaggacaagaacugcgacgucccgugcaucggcaucgagauggugcacgacggcgggaaggagaccuggcacuccgccgccacggccaucuacugccugaugggcagcgggcagcugcucugggacaccgugaccggcgucaacauggcgcuguga

SEQ ID NO: 92792 - RNA, 1401 nt, Artificial Sequence
  derived and/or modified CDS sequence (opt1) from neuraminidase__InfluenzaB__ACI22551
augcugcccagcaccauccagacccucacgcuguuccugaccuccggcggggugcuccugagccuguacgucuccgccagccucuccuaccugcuguacagcgacauccuccugaaguucuccccgaccgagaucaccgcccugacgaugccccucgacugcgcgaacgccagcaacgugcaggccgugaaccgcuccgccaccaagggcgucacccugcugcuccccgagcccgaguggaccuacccgcggcugagcugccccggguccacguuccagaaggcccugcucaucagcccccaccgcuucggcgagaccaaggggaacuccgcgccccugaucauccgggagccguucaucgccugcggccccaacgagugcaagcacuucgcccugacccacuacgccgcgcagcccggcggguacuacaacggcacccgcggggaccggaacaagcuccgccaccugaucagcgugaagcugggcaagauccccacgguggagaacuccaucuuccacauggccgccuggagcggguccgccugccacgacggcaaggaguggaccuacaucggcgucgacgggccggacaacaacgcccuccugaagaucaaguacggcgaggcguacaccgacaccuaccacagcuacgccaacaacauccugcggacgcaggaguccgccugcaacugcaucgggggcaacugcuaccucaugaucaccgacggcagcgccagcgggguguccgagugccgcuuccugaagauccgggagggccgcaucaucaaggagaucuuccccaccgggcgggugaagcacaccgaggagugcacgugcggcuucgccagcaacaagaccaucgagugcgcgugccgcgacaacuccuacaccgccaagcggcccuucgucaagcugaacguggagaccgacacggccgagauccgccucaugugcaccgagaccuaccuggacacgccccggccggacgacgggagcaucaccggccccugcgaguccaacggcgacaaggggagcggcgggaucaagggcggguucgugcaccagcgcauggccuccaagaucggccggugguacagccgcaccauguccaagaccgagcggaugggcauggggcuguacgucaaguacgacggcgaccccugggccgacagcgacgcgcucgcccugaucggggugaugguguccauggaggagcccggcugguacagcuucggguucgagaucaaggacaagaacugcgacgucccgugcaucggcaucgagauggugcacgacggcgggaaggagaccuggcacuccgccgccacggccaucuacugccugaugggcagcgggcagcuccugugggacaccgugaccggcgucaacauggcgcuguga

SEQ ID NO: 92793 - RNA, 1401 nt, Artificial Sequence; identical to SEQ ID NO: 92792
  derived and/or modified CDS sequence (opt1) from neuraminidase__InfluenzaB__ACI22555

SEQ ID NO: 92794 - RNA, 1401 nt, Artificial Sequence; identical to SEQ ID NO: 92659
  derived and/or modified CDS sequence (opt1) from neuraminidase__InfluenzaB__ACI22557

SEQ ID NO: 92795 - RNA, 1401 nt, Artificial Sequence
  derived and/or modified CDS sequence (opt1) from neuraminidase__InfluenzaB__ACI22559
augcugcccagcaccauccagacccucacgcuguuccugaccuccggcggggugcuccugagccuguacgucuccgccagccucuccuaccugcuguacagcgacauccuccugaaguucccguccaccgagaucaccgcccccacgaugccccuggacugcgcgaacgccagcaacgugcaggccgugaaccucuccgccaccaagggcgucacccugcugcuccccgagccggaguggaccuacccccgccugagcugccccggguccacguuccagaaggcccugcucaucagcccccaccgguucggcgagaccaaggggaacuccgcgccgcugaucauccgcgagcccuucaucgccugcggccccaaggagugcaagcacuucgcccugacccacuacgccgcgcagcccggcggguacuacaacggcacccgcggggaccggaacaagcuccggcaccugaucagcgugaagcugggcaagaucccgacgguggagaacuccaucuuccacauggccgccuggagcggguccgccugccacgacggcaaggaguggaccuacaucggcgucgacgggcccgacaacaacgcccuccugaagaucaaguacggcgaggcguacaccgacaccuaccacagcuacgccaacaacauccugcgcacgcaggaguccgccugcaacugcaucgggggcaacugcuaccucaugaucaccgacggcagcgccagcgggguguccgagugccgguuccugaagauccgcgagggccggaucaucaaggagaucuuccccaccgggcgcaucaagcacaccgaggagugcacgugcggcuucgccagcaacaagaccaucgagugcgcgugccgggacaacuccuacaccgccaagcgccccuucgugaagcugaacgucgagaccgacacggccgagauccggcucaugugcaccgagaccuaccuggacaccccgcgccccgacgacgggagcaucacgggccccugcgaguccaacggcgggaagggcagcgggggcaucaagggcggguucgugcaccagcggauggccuccaagaucggccgcugguacagccggaccauguccaagaccgagcgcaaggggaugggccuguacgugaaguacgacggggaccccugggccgacagcgacgcgcucgccuucuccggcgucauggugagcauggaggagccggggugguacuccuucggcuucgagaucaaggacaagaagugcgacgugcccugcaucggcaucgagaugguccacgacgggggcaaggagaccuggcacagcgccgccacggccaucuacugccugaugggguccggccagcugcucugggacaccgugaccggcgugaacauggcgcuguga

SEQ ID NO: 92796 - RNA, 1401 nt, Artificial Sequence
  derived and/or modified CDS sequence (opt1) from neuraminidase__InfluenzaB__ACI22561
augcugcccagcaccauccagacccucacgcuguuccugaccuccggcggggugcuccugagccuguacgucuccgccagccucuccuaccugcuguacagcgacauccuccugaaguucuccccgaccgagaucaccgcccccacgaugccccuggacugcgcgaacgccagcaacgugcaggccgugaaccgcuccgccaccaagggcgggacccuccugcugcccgagccggaguggaccuacccccggcucagcugccccggcuccacguuccagaaggcccugcugaucagcccccaccgcuucggggagaccaagggcaacuccgcgccgcucaucauccgggagcccuucaucgccugcggccccaacgagugcaagcacuucgcccugacccacuacgccgcgcagcccgggggcuacuacaacgggacccgcggcgaccggaacaagcugcgccaccucaucagcgucaagcuggggaagaucccgacgguggagaacuccaucuuccacauggccgccuggagcggcuccgccugccacgacggcaaggaguggaccuacaucgggguggacggccccgacaacaacgcccugcucaagaucaaguacggggaggcguacaccgacaccuaccacagcuacgccaacaagauccugcggacgcaggaguccgccugcaacugcaucggcggcaacugcuaccugaugaucaccgacgggagcgccagcggcgucuccgagugccgcuuccucaagauccgggaggggcgcaucaucaaggagaucuuccccaccggccgggugaagcacaccgaggagugcacgugcggguucgccagcaacaagaccaucgagugcgcgugccgcgacaacuccuacaccgccaagcggcccuucgugaagcugaacgucgagaccgacacggccgagauccgccugaugugcaccgacaccuaccucgacaccccgcggcccgacgacggcagcaucacgggccccugcgaguccaacggggacaagggcagcgggggcaucaagggcggguucgugcaccagcgcauggccuccaagaucggccggugguacagccgcaccauguccaagaccgagcggauggggaugggccuguacgugaaguacgacggggaccccugggccgacagcgacgcgcuggccuucuccggcgucauggugagcaugaaggagccggggugguacuccuucggcuucgagaucaaggacaagaagugcgacgugcccugcaucggcaucgagaugguccacgacgggggcaaggagaccuggcacagcgccgccacggccaucuacugccucaugggguccggccagcugcugugggacaccgugaccggcguggacauggcgcucuga

SEQ ID NO: 92797 - RNA, 1401 nt, Artificial Sequence; identical to SEQ ID NO: 92659
  derived and/or modified CDS sequence (opt1) from neuraminidase__InfluenzaB__ACI22563

SEQ ID NO: 92798 - RNA, 1401 nt, Artificial Sequence
  derived and/or modified CDS sequence (opt1) from neuraminidase__InfluenzaB__ACI22565
augcugcccagcaccauccagacccucacgcuguuccugaccuccggcggggugcuccugagccuguacgucuccgccagccucuccuaccugcuguacagcgacauccuccugaaguucccguccaccgagaucaccgcccccacgaugccccuggacugcgcgaacgccagcaacgugcaggccgugaaccacuccgccaccaagggcgucacccuccugcugcccgagccggaguggaccuacccccgccucagcugccccggguccacguuccagaaggcccugcugaucagcccccaccgguucggcgagaccaaggggaacuccgcgccgcucaucauccgcgagcccuucaucgccugcggccccaaggagugcaagcacuucgcccugacccacuacgccgcgcagcccggcggguacuacaacggcacccgcggggaccggaacaagcugcggcaccucaucagcgugaagcugggcaagaucccgacgguggagaacuccaucuuccacauggccgccuggagcggguccgccugccacgacggcaaggaguggaccuacaucggcgucgacgggcccgacaacaacgcccugcucaagaucaaguacggcgaggcguacaccgacaccuaccacagcuacgccaacaacauccugcgcacgcaggaguccgccugcaacugcaucgggggcaacugcuaccugaugaucaccgacggcagcgccagcgggguguccgagugccgguuccucaagauccgcgagggccggaucaucaaggagaucuuccccaccgggcgcaucaagcacaccgaggagugcacgugcggcuucgccagcaacaagaccaucgagugcgcgugccgggacaacuccuacaccgccaagcgccccuucgugaagcugaacgucgagaccgacacggccgagauccggcugaugugcaccgagaccuaccucgacaccccgcgccccgacgacgggagcaucacgggccccugcgaguccaacggcgggaagggcagcgggggcaucaagggcggguucgugcaccagcggauggccuccaagaucggccgcugguacagccggaccauguccaagaucgagcgcaaggggaugggccuguacgugaaguacgacggggaccccugggccgacagcgacgcgcuggccuucuccggcgucauggugagcauggaggagccggggugguacuccuucggcuucgagauccgggacaagaagugcgacgugcccugcaucggcaucgagaugguccacgacgggggcaaggagaccuggcacagcgccgccaccgccaucuacugccucaugggguccggccagcugcugugggacacggugaccggcgugaacauggcgcucuga

SEQ ID NO: 92799 - RNA, 1401 nt, Artificial Sequence; identical to SEQ ID NO: 92659
  derived and/or modified CDS sequence (opt1) from neuraminidase__InfluenzaB__ACI22567

SEQ ID NO: 92800 - RNA, 1401 nt, Artificial Sequence; identical to SEQ ID NO: 92659
  derived and/or modified CDS sequence (opt1) from neuraminidase__InfluenzaB__ACI22569

SEQ ID NO: 92801 - RNA, 1401 nt, Artificial Sequence
  derived and/or modified CDS sequence (opt1) from neuraminidase__InfluenzaB__ACJ53908
augcugcacagcaccauccagacccucacgcuguuccugaccuccggcggggugcuccugagccuguacgucuccgccagccucuccuaccugcuguacagcgacauccuccugaaguucucccagaccgagaucaccgcccccaucaugccgcuggacugcgcgaacgccagcuccgugcaggccgugaaccgcagcgccgccaagggcgucacgcuccugcugcccgagcccgaguggaccuacccccggcucuccugcccggggagcaccuuccagaaggcgcugcugaucagcccccaccgcuucggcgagaccaaggggaacuccgcgccccucaucauccgggagcccuucaucgccugcggcccgacggagugcaagcacuucgcccugacccacuacgccgcccagcccggcggguacuacaacggcacccgcgaggaccggaacaagcugcgccaccucaucuccgugaagcuggggaagauccccaccguggagaacagcaucuuccacauggccgccugguccggcagcgccugccacgacgggaaggaguggacguacaucggcgucgacggccccgacuccaacgcgcugcucaagaucaaguacggggaggccuacaccgacaccuaccacagcuacgccaagaacauccugcggacccaggagagcgccugcaacugcaucggcggggacugcuaccugaugaucacggacggcccggccuccggcaucagcgagugccgcuuccucaagauccgggaggggcgcaucaucaaggagaucuuccccaccggccgggugaagcacaccgaggagugcacgugcggguucgcguccaacaagaccaucgagugcgccugccgcgacaacagcuacaccgccaagcggcccuucgugaagcugaacgucgagaccgacaccgccgagauccgccugaugugcacggagaccuaccucgacacgccccggccgaacgacggcuccaucaccgggcccugcgagagcgacggcgacaagggcuccgggggcaucaagggcggguucgugcaccagcgcauggccagcaagaucgggcggugguacucccgcaccaugagcaagaccaagcggaugggcaugggccuguacgugaaguacgacggggaccccuggaccgacuccgaggcgcuggcccucagcggcgucaugguguccauggaggagcccgggugguacagcuucggcuucgagaucaaggacaagaagugcgacgugccgugcaucgggaucgagaugguccacgacggcggcaagaccacguggcacuccgccgccaccgccaucuacugccugauggggagcggccagcugcucugggacaccgugaccgggguggacauggcgcuguga

SEQ ID NO: 92802 - RNA, 1401 nt, Artificial Sequence; identical to SEQ ID NO: 92677
  derived and/or modified CDS sequence (opt1) from neuraminidase__InfluenzaB__ACN32560

SEQ ID NO: 92803 - RNA, 1401 nt, Artificial Sequence; identical to SEQ ID NO: 92747
  derived and/or modified CDS sequence (opt1) from neuraminidase__InfluenzaB__ACN32582

SEQ ID NO: 92804 - RNA, 1401 nt, Artificial Sequence; identical to SEQ ID NO: 92659
  derived and/or modified CDS sequence (opt1) from neuraminidase__InfluenzaB__ACN32593

SEQ ID NO: 92805 - RNA, 1401 nt, Artificial Sequence
  derived and/or modified CDS sequence (opt1) from neuraminidase__InfluenzaB__ACN32604
augcugcccagcaccauccagacccucacgcuguuccugaccuccggcggggugcuccugagccuguacgucuccgccagccucuccuaccugcuguacagcgacauccuccugaaguucuccccgaccgagaucaccgcccccacgaugccccuggacugcgcgaacgccagcaacgugcacgccgugaaccgcuccgccaccaagggcgucacccuccugcugcccgagccggaguggaccuacccccggcucagcugccccggguccacguuccagaaggcccugcugaucagcccccaccgcuucggcgagaccaaggggaacuccgcgccgcucaucauccgggagcccuucaucgccugcggccccaacgagugcaagcacuucgcccugacccacuacgccgcgcagcccggcggguacuacaacggcacccgcggggaccggaacaagcugcgccaccucaucagcgugaagcugggcaagaucccgacgguggagaacuccaucuuccacauggccgccuggagcggguccgccugccacgacggcaaggaguggaccuacaucggcgucgacgggcccgacaacaacgcccugcucaagaucaaguacggcgaggcguacaccgacaccuaccacagcuacgccaacaacauccugcggacgcaggaguccgccugcaacugcaucgggggcaacugcuaccugaugaucaccgacggcagcgccagcgggguguccgagugccgcuuccucaagauccgggagggccgcaucaucaaggagaucuuccccaccgggcgggugaagcacaccgaggagugcacgugcggcuucgccagcaacaagaccaucgagugcgcgugccgcgacaacuccuacaccgccaagcggcccuucgucaagcugaacguggagaccgacacggccgagauccgccugaugugcaccgacaccuaccucgacaccccgcggcccgacgacgggagcaucacgggccccugcgaguucaacggcgacaagggguccggcgggaucaagggcggguucgugcaccagcgcauggccagcaagaucggccggugguacucccgcaccaugagcaagaccgagcggaugggcauggggcuguacgucaaguacgacggcgaccccugggccgacuccgacgcgcuggccuucagcggggugaugguguccaugaaggagccgggcugguacagcuucggguucgagaucaaggacaagaagugcgacguccccugcaucggcaucgagauggugcacgacggcgggaaggagaccuggcacuccgccgccacggccaucuacugccucaugggcagcgggcagcugcugugggacaccgugaccggcgucgacauggcgcucuga

SEQ ID NO: 92806 - RNA, 1401 nt, Artificial Sequence; identical to SEQ ID NO: 92659
  derived and/or modified CDS sequence (opt1) from neuraminidase__InfluenzaB__ACN32615

SEQ ID NO: 92807 - RNA, 1401 nt, Artificial Sequence
  derived and/or modified CDS sequence (opt1) from neuraminidase__InfluenzaB__ACN32775
augcugcccagcaccauccagacccucacgcuguuccugaccuccggcggggugcuccugagccuguacgucuccgccagccucuccuaccugcuguacagcgacauccuccugaaguucuccccgaccgagaucaacgcccccaccaugccccuggacugcgcgaacgccagcaacgugcacgccgugaaccgcuccgccacgaagggcgucacccuccugcugcccgagccggaguggaccuacccccggcucagcugccccggguccaccuuccagaaggcccugcugaucagcccccaccgcuucggcgagacgaaggggaacuccgcgccgcucaucauccgggagcccuucaucgccugcggccccaacgagugcaagcacuucgcccugacccacuacgccgcgcagcccggcggguacuacaacggcacccgcggggaccggaacaagcugcgccaccucaucagcgugaagcugggcaagaucccgaccguggagaacuccaucuuccacauggccgccuggagcggguccgccugccacgacggcaaggaguggacguacaucggcgucgacgggcccgacaacaacgcccugcucaagaucaaguacggcgaggcguacaccgacaccuaccacagcuacgccaacaacauccugcggacccaggaguccgccugcaacugcaucgggggcaacugcuaccugaugaucacggacggcagcgccagcgggaucuccgagugccgcuuccucaagauccgggagggccgcaucaucaaggagaucuuccccaccgggcgggugaagcacaccgaggagugcacgugcggcuucgccagcaacaaguccaucgagugcgcgugccgcgacaacagcuacaccgccaagcggcccuucgugaagcugaacgucgagaccgacaccgccgagauccgccugaugugcaccgacacguaccucgacaccccgcggcccgacgacggguccaucaccggccccugcgagagcaacggcgacaagggguccggcgggaucaagggcggguucgugcaccagcgcauggccagcaagaucggccggugguacucccgcaccaugagcaagacggagcggaugggcauggggcuguacgugaaguacgacggcgaccccugggccgacuccgacgcgcuggccuucagcggggucaugguguccaugaaggagccgggcugguacagcuucggguucgagaucaaggacaagaagugcgacgugcccugcaucggcaucgagaugguccacgacggcgggaaggagaccuggcacuccgccgccaccgccaucuacugccucaugggcagcgggcagcugcugugggacaccgugacgggcguggacauggcgcucuga

SEQ ID NO: 92808 - RNA, 1401 nt, Artificial Sequence; identical to SEQ ID NO: 92659
  derived and/or modified CDS sequence (opt1) from neuraminidase__InfluenzaB__ACN32786

SEQ ID NO: 92809 - RNA, 1401 nt, Artificial Sequence
  derived and/or modified CDS sequence (opt1) from neuraminidase__InfluenzaB__ACO05928
augcugcccagcaccauccagacccucacgcuguuccugaccuccggcggggugcuccugagccuguacgucuccgccagccucuccuaccugcuguacagcgacauccuccugaaguucccguccaccgagaucaccgcccccacgaugccccuggacugcgcgaacgccagcaacgugcaggccgugaaccgcuccgccaccaagggcgucacccuccugcugcccgagccggaguggaccuacccccggcucagcugccccggguccacguuccagaaggcccugcugaucagcccccaccgcuucggcgagaccaaggggaacuccgcgccgcucaucauccgggagcccuucaucgccugcggccccaaggagugcaagcacuucgcccugacccacuacgccgcgcagcccggcggguacuacaacggcacccgcggggaccggaacaagcugcgccaccucaucagcgugaagcugggcaagaucccgacgguggagaacuccaucuuccacauggccgccuggagcggguccgccugccacgacggcaaggaguggaccuacaucggcgucgacgggcccgacaacaacgcccugcucaagaucaaguacggcgaggcguacaccgacaccuaccacagcuacgccaacaacauccugcggacgcaggaguccgccugcaacugcaucgggggcaacugcuaccugaugaucaccgacggcagcgccagcgggguguccgagugccgcuuccucaagauccgggagggccgcaucaucaaggagaucuuccccaccgggcggaucaagcacaccgaggagugcacgugcggcuucgccagcaacaagaccaucgagugcgcgugccgcgacaacuccuacaccgccaagcggcccuucgugaagcugaacgucgagaccgacacggccgagauccgccugaugugcaccgagaccuaccucgacaccccgcggcccgacgacgggagcaucacgggccccugcgaguccaacggcgacaaggggagcggcgggaucaagggcggguucgugcaccagcgcauggccuccaagaucggccggugguacagccgcaccauguccaagaccaagcggaugggcauggggcuguacgugaaguacgacggcgaccccugggccgacagcgacgcgcuggccuucuccggggucauggugccgauggaggagcccggcugguacagcuucggguucgagaucaaggacaagaagugcgacgugcccugcaucggcaucgagaugguccacgacggcgggaaggagaccuggcacuccgccgccacggccaucuacugccucaugggcagcgggcagcugcugugggacaccgugaccggcgugaacauggcgcucuga

SEQ ID NO: 92810 - RNA, 1401 nt, Artificial Sequence; identical to SEQ ID NO: 92671
  derived and/or modified CDS sequence (opt1) from neuraminidase__InfluenzaB__ACO05950

SEQ ID NO: 92811 - RNA, 1401 nt, Artificial Sequence
  derived and/or modified CDS sequence (opt1) from neuraminidase__InfluenzaB__ACO05961
augcugcccagcaccauccagacccucacgcuguuccugaccuccggcggggugcuccugagccuguacgucuccgccagccucuccuaccugccguacagcgacauccugcucaaguuccccuccaccgagaucaccgcccccacgaugccccuggacugcgcgaacgccagcaacgugcaggccgugaaccgcuccgccaccaagggcgucacccugcuccugccggagcccgaguggaccuacccccggcugagcugccccggguccacguuccagaaggcccuccugaucagcccgcaccgcuucggcgagaccaaggggaacuccgcgccccugaucauccgggagcccuucaucgccugcggccccaaggagugcaagcacuucgcccucacccacuacgccgcgcagccgggcggguacuacaacggcacccgcggggaccggaacaagcugcgccaccugaucagcgugaagcucggcaagauccccacgguggagaacuccaucuuccacauggccgccuggagcggguccgccugccacgacggcaaggaguggaccuacaucggcgucgacgggcccgacaacaacgcccugcugaagaucaaguacggcgaggcguacaccgacaccuaccacagcuacgccaacaacauccuccggacgcaggaguccgccugcaacugcaucgggggcaacugcuaccugaugaucaccgacggcagcgccagcgggguguccgagugccgcuuccugaagauccgggagggccgcaucaucaaggagaucuuccccaccgggcggaucaagcacaccgaggagugcacgugcggcuucgccagcaacaagaccaucgagugcgcgugccgcgacaacuccuacaccgccaagcggccguucgugaagcucaacgucgagaccgacacggccgagauccgccugaugugcaccgagaccuaccuggacacgccccggcccgacgacgggagcaucaccggccccugcgaguccaacggcgacaaggggagcggcgggaucaagggcggguucgugcaccagcgcauggccuccaagaucggccggugguacagccgcaccauguccaagaccaagcggaugggcauggggcucuacgugaaguacgacggcgacccgugggccgacagcgacgcgcuggccuucuccggggucauggugagcauggaggagcccggcugguacuccuucggguucgagaucaaggacaagaagugcgacgugcccugcaucggcaucgagaugguccacgacggcgggaaggagaccuggcacagcgccgccacggccaucuacugccugaugggcuccgggcagcuccugugggacaccgugaccggcgugaacauggcgcuguga

SEQ ID NO: 92812 - RNA, 1401 nt, Artificial Sequence
  derived and/or modified CDS sequence (opt1) from neuraminidase__InfluenzaB__ACO05972
augcugcccagcaccauccagacccucacgcuguuccugaccuccggcggggugcuccugagccuguacgucuccgccagccucuccuaccugcuguacagcgacauccuccugaaguucucccagaccgagaucaccgccccgaucaugccccuggacugcgcgaacgccagcaacgugcaggccgugaaccgcuccgccgccaagggcgucacgcuccugcugcccgagcccgaguggaccuacccgcggcucagcugccccggguccaccuuccagaaggcgcugcugaucagcccccaccgcuucggcgagaccaaggggaacuccgcgccccucaucauccgggagccguucaucgccugcggccccacggagugcaagcacuucgcccugacccacuacgccgcccagcccggcggguacuacaacggcacccgcgaggaccggaacaagcugcgccaccucaucagcgugaagcuggggaagauccccaccguggagaacuccaucuuccacauggccgccuggagcggcuccgccugccacgacgggaaggaguggacguacaucggcgucgacggcccggacagcaacgcgcugcucaagaucaaguacggggaggccuacaccgacaccuaccacuccuacgccaagaacauccugcggacccaggagagcgccugcaacugcaucggcggggacugcuaccugaugaucacggacggccccgccagcggcaucuccgagugccgcuuccucaagauccgggaggggcgcaucaucaaggagaucuuccccaccggccgggugaagcacaccgaggagugcacgugcggguucgcgagcaacaagaccaucgagugcgccugccgcgacaacuccuacaccgccaagcggcccuucgugaagcugaacgucgagaccgacaccgccgagauccgccugaugugcacggagaccuaccucgacaccccgcggcccaacgacggcagcaucaccgggcccugcgaguccgacggcgacaagggcagcgggggcaucaagggcggguucgugcaccagcgcauggccuccaagaucgggcggugguacagccgcacgauguccaagaccaagcggaugggcaugggccuguacgugaaguacgacggggaccccuggaccgacagcgaggcgcuggcccucuccggcgucauggugagcauggaggagccggggugguacuccuucggcuucgagaucaaggacaagaagugcgacgugcccugcaucgggaucgagaugguccacgacggcggcaagaccacguggcacagcgccgccaccgccaucuacugccugaugggguccggccagcugcucugggacaccgugaccgggguggacauggcgcuguga

SEQ ID NO: 92813 - RNA, 1401 nt, Artificial Sequence; identical to SEQ ID NO: 92812
  derived and/or modified CDS sequence (opt1) from neuraminidase__InfluenzaB__ACO05983

SEQ ID NO: 92814 - RNA, 1401 nt, Artificial Sequence; identical to SEQ ID NO: 92812
  derived and/or modified CDS sequence (opt1) from neuraminidase__InfluenzaB__ACO05994

SEQ ID NO: 92815 - RNA, 1401 nt, Artificial Sequence
  derived and/or modified CDS sequence (opt1) from neuraminidase__InfluenzaB__ACO06005
augcugcccagcaccauccagacccucacgcuguuccugaccuccggcggggugcuccugagccuguacgucuccgccagccucuccuaccugcuguacagcgacauccuccugaaguucuccccgaccgagaucaccgcccccacgaugccccuggacugcgcgaacgccagcaacgugcaggccgugaaccgcuccgccaccaagggcgucacccuccugcugcccgagccggaguggaccuacccccggcucagcugccccggguccacguuccagaaggcccugcugaucagcccccaccgcuucggcgagaccaaggggaacuccgcgccgcucaucauccgggagcccuucaucgccugcggccccaacgagugcaagcacuucgcccugacccacuacgccgcgcagcccggcggguacuacaacggcacccgcggggaccggaacaagcugcgccaccucaucagcgugaagcugggcaagaucccgacgguggagaacuccaucuuccacauggccgccuggagcggguccgccugccacgacggcaaggaguggaccuacaucggcgucgacgggcccgacaacaacgcccugcucaagaucaaguacggcgaggcguacaccgacaccuaccacagcuacgccaacaagauccugcggacgcaggaguccgccugcaacugcaucgggggcaacugcuaccugaugaucaccgacggcagcgccagcgggguguccgagugccgcuuccucaagauccgggagggccgcaucaucaaggagaucuuccccaccgggcgggugaagcacaccgaggagugcacgugcggcuucgccagcaacaagaccaucgagugcgcgugccgcgacaacuccuacaccgccaagcggcccuucgucaagcugaacguggagaccgacacggccgagauccgccugaugugcaccgacaccuaccucgacaccccgcggcccgacgacgggagcaucacgggccccugcgaguccaacggcgaccgcgggagcggcgggaucaagggcggguucgugcaccagcggauggccuccaagaucggccgcugguacagccggaccauguccaagaccgagcgcaugggcauggggcuguacgucaaguacgacggcgaccccugggccgacagcgacgcgcuggccuucuccggggugauggugagcaugaaggagccgggcugguacuccuucggguucgagaucaaggacaagaagugcgacguccccugcaucggcaucgagauggugcacgacggcgggaaggagaccuggcacagcgccgccacggccaucuacugccucaugggcuccgggcagcugcugugggacaccgugaccggcgucgacauggcgcucuga

SEQ ID NO: 92816 - RNA, 1401 nt, Artificial Sequence
  derived and/or modified CDS sequence (opt1) from neuraminidase__InfluenzaB__ACO06027
augcugcccagcaccauccagacccucacgcuguuccugaccuccggcggggugcuccugagccuguacgucuccgccagccucuccuaccugcuguacagcgacauccuccugaaguucucccagaccgagaucaccgccccgaucaugccccuggacugcgcgaacgccagcaacgugcaggccgugaaccgcuccgccgccaagggcgucacgcuccugcugcccgagcccgaguggaccuacccgcggcucagcugccccggguccaccuuccagaaggcgcugcugaucagcccccaccgcuucggcgagaccaaggggaacuccgcgccccucaucauccgggagccguucaucgccugcggccccacggagugcaagcacuucgcccugacccacuacgccgcccagcccggcggguacuacaacggcacccgcgaggaccggaacaagcugcgccaccucaucagcgugaagcuggggaagauccccaccguggagaacuccaucuuccacauggccgccuggagcggcuccgccugccacgacgggaaggaguggacguacaucggcgucgacggcccggacagcaacgcgcugcucaagaucaaguacggggaggccuacaccgacaccuaccacuccuacgccaagaacauccugcggacccaggagagcgccugcaacugcaucggcggggacugcuaccugaugaucacggacggccccgccagcggcaucuccgagugccgcuuccucaagauccgggaggggcgcaucaucaaggagaucuuccccaccggccgggugaagcacaccgaggagugcacgugcggguucgcgagcaacaagaccaucgagugcgccugccgcgacaacuccuacaccgccaagcggcccuucgugaagcugaacgucgagaccgacaccgccgagauccgccugaugugcacggagaccuaccucgacaccccgcggcccaacgacggcagcaucaccgggcccugcgaguccgacggcgacaagggcagcgggggcaucaagggcggguucgugcaccagcgcauggccuccaagaucgggcggugguacagccgcacgauguccaagaccaagcggaugggcaugggccuguacgugaaguacgacggggaccccuggaccgacagcgaggcgcuggcccucuccggcgucauggugagcauggaggagccggggugguacuccuucggcuucgagaucaaggacaagaagugcgacgugcccugcaucgggaucgagaugguccacgacggcggcaagaccacguggcacagcgccgccaccgccaucuacugccugaugggguccggccagcugcucugggacaccgugaccgggguggacaugacgcuguga

SEQ ID NO: 92817 - RNA, 1401 nt, Artificial Sequence
  derived and/or modified CDS sequence (opt1) from neuraminidase__InfluenzaB__ACO06066
augcugcccagcaccauccagacccucacgcuguuccugaccuccggcggggugcuccugagccuguacgucuccgccagccucuccuaccugcuguacagcgacauccuccugaaguucucccagaccgagaucaccgccccgaucaugccccuggacugcgcgaacgccagcaacgugcaggccgugaaccgcuccgucgccaagggcgugacgcuccugcugcccgagcccgaguggaccuacccgcggcucagcugccccggguccaccuuccagaaggcccugcugaucagcccccaccgcuucggcgagaccaaggggaacuccgcgccccucaucauccgggagccguucaucgccugcggccccacggagugcaagcacuucgcccugacccacuacgccgcgcagcccggcggguacuacaacggcacccgcgaggaccggaacaagcugcgccaccucaucagcgugaagcuggggaagauccccaccgucgagaacuccaucuuccacauggccgccuggagcggcuccgccugccacgacgggaaggaguggacguacaucggcguggacggcccggacagcaacgcccugcucaagaucaaguacggggaggcguacaccgacaccuaccacuccuacgccaagaacauccugcggacccaggagagcgccugcaacugcaucggcggggacugcuaccugaugaucacggacggccccgccagcggcaucuccgagugccgcuuccucaagauccgggaggggcgcaucaucaaggagaucuuccccaccggccgggugaagcacaccgaggagugcacgugcggguucgccagcaacaagaccaucgagugcgcgugccgcgacaacuccuacaccgccaagcggcccuucgucaagcugaacguggagaccgacaccgccgagauccgccugaugugcacggagaccuaccucgacaccccgcggcccaacgacggcagcaucaccgggcccugcgaguccgacggcgacaagggcagcgggggcaucaagggcggguucgugcaccagcgcauggccuccaagaucgggcggugguacagccgcacgauguccaagaccaagcggaugggcaugggccuguacgucaaguacgacggggaccccuggaccgacagcgaggcccuggcgcucuccggcgugauggugagcauggaggagccggggugguacuccuucggcuucgagaucaaggacaagaagugcgacguccccugcaucgggaucgagauggugcacgacggcggcaagaccacguggcacagcgccgccaccgccaucuacugccugaugggguccggccagcugcucugggacaccgugaccggggucgacaugacgcuguga

SEQ ID NO: 92818 - RNA, 1401 nt, Artificial Sequence
  derived and/or modified CDS sequence (opt1) from neuraminidase__InfluenzaB__ACO94665
augcugcccagcaccauccagacccucacgcuguuccugaccuccggcggggugcuccugagccuguacgucuccgccagccucuccuaccugcuguacagcgacauccuccugaaguucuccccgaccgagaucaccgccagcacgaugccccuggacugcgcgaacgccuccaacgugcaggccgugaaccgcagcgccaccaagggcgucacccuccugcugcccgagcccgaguggaccuacccgcggcucuccugccccgggagcacguuccagaaggcccugcugaucagcccccaccgcuucggcgagaccaaggggaacuccgcgccccucaucauccgggagccguucaucgccugcggccccaacgagugcaagcacuucgcccugacccacuacgccgcgcagcccggcggguacuacaacggcacccgcggggaccggaacaagcugcgccaccucaucuccgugaagcugggcaagauccccacgguggagaacagcaucuuccacauggccgccugguccgggagcgccugccacgacggcaaggaguggaccuacaucggcgucgacgggccggacaacaacgcccugcucaagaucaaguacggcgaggcguacaccgacaccuaccacuccuacgccaacaagauccugcggacgcaggagagcgccugcaacugcaucgggggcaacugcuaccugaugaucaccgacggcagcgccuccggggugagcgagugccgcuuccucaagauccgggagggccgcaucaucaaggagaucuuccccaccgggcgggugaagcacaccgaggagugcacgugcggcuucgccuccaacaagaccaucgagugcgcgugccgcgacaacagcuacaccgccaagcggcccuucgucaagcugaacguggagaccgacacggccgagauccgccugaugugcaccgacaccuaccucgacacgccccggccggacgacggguccaucaccggccccugcgagagcaacggcgacaagggguccggcgggaucaagggcggguucgugcaccagcgcauggccagcaagaucggccggugguacucccgcaccaugagcaagaccgagcggaugggcauggggcuguacgucaaguacgacggcgaccccugggccgacuccgacgcgcuggccuucagcggggugaugguguccaugaaggagcccggcugguacagcuucggguucgagaucaaggacaagaagugcgacgucccgugcaucggcaucgagauggugcacgacggcgggaaggagaccuggcacuccgccgccacggccaucuacugccucaugggcagcgggcagcugcugugggacaccgugaccggcgucgacauggcgcucuga

SEQ ID NO: 92819 - RNA, 1401 nt, Artificial Sequence; identical to SEQ ID NO: 92659
  derived and/or modified CDS sequence (opt1) from neuraminidase__InfluenzaB__ACQ45607

SEQ ID NO: 92820 - RNA, 1401 nt, Artificial Sequence
  derived and/or modified CDS sequence (opt1) from neuraminidase__InfluenzaB__ACQ45610
augcugcccagcaccauccagacccucacgcuguuccugaccuccggcggggugcuccugagccuguacgucuccgccagccucuccuaccugcuguacagcgacauccuccugaaguucuccccgaccgagaucaccgcccccacggugccccuggacugcgcgaacgccagcaacgugcaggccgucaaccgcuccgccaccaagggcgugacccuccugcugcccgagccggaguggaccuacccccggcucagcugccccggguccacguuccagaaggcccugcugaucagcccccaccgcuucggcgagaccaaggggaacuccgcgccgcucaucauccgggagcccuucaucgccugcggccccaacgagugcaagcacuucgcccugacccacuacgccgcgcagcccggcggguacuacaacggcacccgcggggaccggaacaagcugcgccaccucaucagcgugaagcugggcaagaucccgacggucgagaacuccaucuuccacauggccgccuggagcggguccgccugccacgacggcaaggaguggaccuacaucggcguggacgggcccgacaacaacgcccugcucaagaucaaguacggcgaggcguacaccgacaccuaccacagcuacgccaacaagauccugcggacgcaggaguccgccugcaacugcaucgggggcaacugcuaccugaugaucaccgacggcagcgccagcgggguguccgagugccgcuuccucaagauccgggagggccgcaucaucaaggagaucuuccccaccgggcgggucaaguacaccgaggagugcacgugcggcuucgccagcaacaagaccaucgagugcgcgugccgcgacaacuccuacaccgccaagcggcccuucgugaagcugaacguggagaccgacacggccgagauccgccugaugugcaccgacaccuaccucgacaccccgcggcccgacgacgggagcaucacgggccccugcgaguccaacggcgacaaggggagcggcgggaucaagggcggguucguccaccagcgcauggccuccaagaucggccggugguacagccgcaccauguccaagaccgagcggaugggcauggggcuguacgugaaguacgacggcgaccccugggccgacagcgacgcgcuggccuucuccggggugauggucagcaugaaggagccgggcugguacuccuucggguucgagaucaaggacaagaagugcgacgugcccugcaucggcaucgagauggugcacgacggcgggaaggagaccuggcacagcgccgccacggccaucuacugccucaugggcuccgggcagcugcugugggacaccgucaccggcguggacauggcgcucuga

SEQ ID NO: 92821 - RNA, 1401 nt, Artificial Sequence; identical to SEQ ID NO: 92659
  derived and/or modified CDS sequence (opt1) from neuraminidase__InfluenzaB__ACQ45613

SEQ ID NO: 92822 - RNA, 1401 nt, Artificial Sequence; identical to SEQ ID NO: 92815
  derived and/or modified CDS sequence (opt1) from neuraminidase__InfluenzaB__ACR15626

SEQ ID NO: 92823 - RNA, 1401 nt, Artificial Sequence; identical to SEQ ID NO: 92815
  derived and/or modified CDS sequence (opt1) from neuraminidase__InfluenzaB__ACR15637

SEQ ID NO: 92824 - RNA, 1401 nt, Artificial Sequence; identical to SEQ ID NO: 92786
  derived and/or modified CDS sequence (opt1) from neuraminidase__InfluenzaB__ACR15648

SEQ ID NO: 92825 - RNA, 1401 nt, Artificial Sequence; identical to SEQ ID NO: 92815
  derived and/or modified CDS sequence (opt1) from neuraminidase__InfluenzaB__ACR15659

SEQ ID NO: 92826 - RNA, 1401 nt, Artificial Sequence; identical to SEQ ID NO: 92815
  derived and/or modified CDS sequence (opt1) from neuraminidase__InfluenzaB__ACR15670

SEQ ID NO: 92827 - RNA, 1401 nt, Artificial Sequence; identical to SEQ ID NO: 92640
  derived and/or modified CDS sequence (opt1) from neuraminidase__InfluenzaB__ACR15681

SEQ ID NO: 92828 - RNA, 1401 nt, Artificial Sequence
  derived and/or modified CDS sequence (opt1) from neuraminidase__InfluenzaB__ACR15692
augcugcccagcaccauccagacccucacgcuguuccugaccuccggcggggugcuccugagccuguacgucuccgccagccucuccuaccugcuguacagcgacauccuccugaaguucuccccgaccgagaucaccgcccccacgaugccccugggcugcgcgaacgccagcaacgugcaggccgugaaccgcuccgccaccaagggggucacccuccugcugcccgagccggaguggaccuacccccggcucagcugccccggcuccacguuccagaaggcccugcugaucagcccccaccgcuucggggagaccaagggcaacuccgcgccgcucaucauccgggagcccuucaucgccugcggccccaaggagugcaagcacuucgcccugacccacuacgccgcgcagcccgggggcuacuacaacgggacccgcggcgaccggaacaagcugcgccaccucaucagcgugaagcuggggaagaucccgacgguggagaacuccaucuuccacauggccgccuggagcggcuccgccugccacgacggcaaggaguggaccuacaucggggucgacggccccgacaacaacgcccugcucaagaucaaguacggggaggcguacaccgacaccuaccacagcuacgccaacaacauccugcggacgcaggaguccgccugcaacugcaucggcggcaacugcuaccugaugaucaccgacgggagcgccagcggcaucuccgagugccgcuuccucaagauccgggaggggcgcaucaucaaggagaucuuccccaccggccgggugaagcacaccgaggagugcacgugcggguucgccagcaacaagaccaucgagugcgcgugccgcgacaacuccuacaccgccaagcggcccuucgugaagcugaacgucgagaccgacacggccgagauccgccugaugugcaccgagaccuaccucgacaccccgcggcccgacgacggcagcaucacgggccccugcgaguccaacggggacaagggcagcgggggcaucaagggcggguucgugcaccagcgcauggccuccaagaucggccggugguacagccgcaccauguccaagaccaagcggauggggaugggccuguacgugaaguacgacggggaccccugggccgacaacgacgcgcuggcccucagcggcgucaugguguccauggaggagccggggugguacagcuucggcuucgagaucaaggacaagaagugcgacgugcccugcaucggcaucgagaugguccacgacgggggcaaggagaccuggcacuccgccgccacggccaucuacugccugauggggagcggccagcugcucugggacaccgugaccggcguggacauggcgcuguga

SEQ ID NO: 92829 - RNA, 1401 nt, Artificial Sequence; identical to SEQ ID NO: 92816
  derived and/or modified CDS sequence (opt1) from neuraminidase__InfluenzaB__ACR15703

SEQ ID NO: 92830 - RNA, 1401 nt, Artificial Sequence; identical to SEQ ID NO: 92816
  derived and/or modified CDS sequence (opt1) from neuraminidase__InfluenzaB__ACR15714

SEQ ID NO: 92831 - RNA, 1401 nt, Artificial Sequence; identical to SEQ ID NO: 92731
  derived and/or modified CDS sequence (opt1) from neuraminidase__InfluenzaB__ACR15725

SEQ ID NO: 92832 - RNA, 1401 nt, Artificial Sequence; identical to SEQ ID NO: 92692
  derived and/or modified CDS sequence (opt1) from neuraminidase__InfluenzaB__ACR15736

SEQ ID NO: 92833 - RNA, 1401 nt, Artificial Sequence; identical to SEQ ID NO: 92815
  derived and/or modified CDS sequence (opt1) from neuraminidase__InfluenzaB__ACR39340

SEQ ID NO: 92834 - RNA, 1401 nt, Artificial Sequence
  derived and/or modified CDS sequence (opt1) from neuraminidase__InfluenzaB__ADL28399
augcugcccagcaccauccagacccucacgcuguuccugaccuccggcggggugcuccugagccuguacgucuccgccagccucuccuaccugcuguacagcgacauccuccugaaguucuccccgaccgagaucaccgcccccacgaugccccuggacugcgcgaacgccagcaacgugcaggccgugaaccgcuccgccaccaagggcgucacccuccugcugcccgagccggaguggaccuacccccggcucagcugccccggguccacguuccagaaggcccugcugaucagcccccaccgcuucggcgagaccaaggggaacuccgcgccgcucaucauccgggagcccuucaucgccugcggccccaacgagugcaagcacuucgcccugacccacuacgccgcgcagcccggcggguacuacaacggcacccgcggggaccggaacaagcugcgccaccucaucagcgugaagcugggcaagaucccgacgguggagaacuccaucuuccacauggccgccuggagcggguccgccugccacgacggcaaggaguggaccuacaucggcgucgacgggcccgacaacaacgcccugcucaagaucaaguacggcgaggcguacaccgacaccuaccacagcuacgccaacaacauccugcggacgcaggaguccgccugcaacugcaucgggggcaacugcuaccugaugaucaccgacggcagcgccagcgggguguccgagugccgcuuccucaagauccgggagggccgcaucaucaaggagaucuuccccaccgggcgggugaagcacaccgaggagugcacgugcggcuucgccagcaacaagaucaucgagugcgcgugccgcgacuccagcuacaccgccaagcggcccuucgucaagcugaacguggagaccgacaccgccgagauccgccugaugugcacggagaccuaccucgacaccccgcggcccaacgacggguccaucaccggccccugcgagagcaacggcgacaagggguccggcgggaucaagggcggguucgugcaccagcgcauggccagcaagaucggccggugguacucccgcacgaugagcaagaccgagcggaugggcauggggcuguacgucaaguacgacggcgaccccugggccgacuccgacgcgcuggcccucagcggggugaugguguccauggaggagccgggcugguacagcuucggguucgagaucaaggacaagaagugcgacguccccugcaucggcaucgagauggugcacgacggcgggaaggagaccuggcacuccgccgccaccgccaucuacugccugaugggcagcgggcagcugcucugggacacggugaccggcgucgacauggcgcuguga

SEQ ID NO: 92835 - RNA, 1401 nt, Artificial Sequence; identical to SEQ ID NO: 92812
  derived and/or modified CDS sequence (opt1) from neuraminidase__InfluenzaB__ADN32822

SEQ ID NO: 92836 - RNA, 1401 nt, Artificial Sequence
  derived and/or modified CDS sequence (opt1) from neuraminidase__InfluenzaB__ADR02756
augcugcccagcaccauccagacccucacgcuguuccugaccuccggcggggugcuccugagccuguacgucuccgccagccucuccuaccugcuguacagcgacauccuccugaaguucucccagaccgagaucaccgccccgaucaucccccuggacugcgcgaacgccagcaacgugcaggccgugaaccgcuccgccgccaagggcgucacgcuccugcugcccgagcccgaguggaccuacccgcggcucagcugccccggguccaccuuccagaaggcgcugcugaucagcccccaccgcuucggcgagaccaaggggaacuccgcgccccucaucauccgggagccguucaucgccugcggccccacggagugcaagcacuucgcccugacccacuacgccgcccagcccggcggguacuacaacggcacccgcgaggaccggaacaagcugcgccaccucaucagcgugaagcuggggaagauccccaccguggagaacuccaucuuccacauggccgccuggagcggcuccgccugccacgacgggaaggaguggacguacaucggcgucgacggcccggacagcaacgcgcugcucaagaucaaguacggggaggccuacaccgacaccuaccacuccuacgccaagaacauccugcggacccaggagagcgccugcaacugcaucggcggggacugcuaccugaugaucacggacggccccgccagcggcaucuccgagugccgcuuccucaagauccgggaggggcgcaucaucaaggagaucuuccccaccggccgggugaagcacaccgaggagugcacgugcggguucgcgagcaacaagaccaucgagugcgccugccgcgacaacuccuacaccgccaagcggcccuucgugaagcugaacgucgagaccgacaccgccgagauccgccugaugugcacggagaccuaccucgacaccccgcggcccaacgacggcagcaucaccgggcccugcgaguccgacggcgacaagggcagcgggggcaucaagggcggguucgugcaccagcgcauggccuccaagaucgggcggugguacagccgcacgauguccaagaccaagcggaugggcaugggccuguacgugaaguacgacggggaccccuggaccgacagcgaggcgcuggcccucuccggcgucauggugagcauggaggagccggggugguacuccuucggcuucgagaucaaggacaagaagugcgacgugcccugcaucgggaucgagaugguccacgacggcggcaagaccacguggcacagcgccgccaccgccaucuacugccugaugggguccggccagcugcucugggacaccgugaccgggguggacauggcgcuguga

SEQ ID NO: 92837 - RNA, 1401 nt, Artificial Sequence
  derived and/or modified CDS sequence (opt1) from neuraminidase__InfluenzaB__AEA51353
augcugcccagcaccauccagacccucacgcuguuccugaccuccggcggggugcuccugagccuguacgucuccgccagccucuccuaccugcuguacagcgacauccuccugaaguucucccgcaccgagaucaccgccccgaucaugccccuggacugcgcgaacgccagcaacgugcaggccgugaaccgguccgccacgaagggcgucacccuccugcugcccgagcccgaguggaccuacccgcgccucagcugccccggguccaccuuccagaaggcccugcugaucagcccccaccgguucggcgagacgaaggggaacuccgcgccccucaucauccgcgagccguucaucgccugcggccccaaggagugcaagcacuucgcccugacccacuacgccgcgcagcccggcggguacuacaacggcacccgggaggaccgcaacaagcugcggcaccucaucagcgugaagcuggggaagauccccaccguggagaacuccaucuuccacauggccgccuggagcggcuccgccugccacgacgggcgcgaguggacguacaucggcgucgacggcccggacagcaacgcccugcucaagaucaaguacgggggcgcguucaccgacaccuaccacuccuacgccaagaacauccugagcccccaggagagcgccugcaacugcaucgggggcgacugcuaccugaugaucaccgacggccccgccuccgggaucagcgagugccgguuccucaagauccgcgagggccggaucaucaaggagaucuuccccacggggcgcgugaagcacaccgaggagugcacgugcggcuucgccuccaacaagaccaucgagugcgcgugccgggacaacagcuacaccgccaagcgcccguucgugaagcugaacgucgagaccgacaccgccgagauccggcugaugugcaccgagacguaccucgacacgccccgccccaacgacggguccaucaccggccccugcgagagcaacggcgacaagggguccggcgggaucaagggcggguucgugcaccagcggauggccagcaagaucggccgcugguacucccggaccaugagcaagaccaagcgcaugggcauggggcuguacgugaaguacgacggcgacccguggaccgacuccgaggcccuggcgcucagcggggucaugguguccauggaggagcccggcugguacagcuucggguucgagaucaaggacaagaagugcgacgugcccugcaucggcaucgagaugguccacgacggcgggaagaccaccuggcacuccgccgccacggccaucuacugccugaugggcagcgggcagcugcucugggacaccgugaccggcgugaacaugacccuguga

SEQ ID NO: 92838 - RNA, 1401 nt, Artificial Sequence
  derived and/or modified CDS sequence (opt1) from neuraminidase__InfluenzaB__AEA51355
augcugcccagcaccauccagacccucacgcuguuccugaccuccggcggggugcuccugagccuguacgucuccgccagccucuccuaccugcuguacagcgacauccuccugaaguucuccccgaccgagaucaccgcccccacgaugccccuggacugcgcgaacaccagcaacgugcaggccgugaaccgcuccgccaccaagggcgucacccuccugcugcccgagccggaguggacguacccccggcucagcugccccggguccaccuuccagaaggcccugcugaucagcccccaccgcuucggcgagaccaaggggaacuccgccccgcucaucauccgggagcccuucaucgcgugcggccccaacgagugcaagcacuucgcccugacccacuacgccgcccagcccggcggguacuacaacggcacgcgcggggaccggaacaagcugcgccaccucaucagcgugaagcugggcaagaucccgaccguggagaacuccaucuuccacauggcggccuggagcggguccgccugccacgacggcaaggaguggaccuacaucggcgucgacgggcccgacaacaacgcccugcucaagaucaccuacggcgaggccuaccccgggacguaccacagcuacgcgaucaagaacccccggacccaggaguccgccccgaacugcuucggcggccacagcuuccccaucaucacccacgccccgcccagcggggugugggagccccgcuuccugaagauccgggagggccgcaucaucaacgagaucuuccccaccgggcgggugaagccgcccgaggagugcacgugcggcuucgccuccaacaacaccaucgagugcgccugccgcgacaacaacugcaccgcgaagcggcccuucgucaaguuccacguggagagcgaccccgccgagauccgcgccaugugcaccgacacguaccuggacagcccccggcccgacgacggguccaucaccggcccgugcgacuccaacggcgacaaggggagcggcgggaucaagggcggguucgugcaccagcgcauggaguccaagaucggccggugguacagccgcaccauguccaagaccgagcggaugggcauggggcucuacgucaaguacgacggcgaccccugggccgacagcgacgcccuggcgaacuccggggugauggugagcaugaacgagcccggcuccagcuccuucggguucgagaucaaggacaagaagugcgacgucccgugcaucggcaucgagauggugcacgacggcgggaaggagacguggcacagcgccgccaccgccaucuacugccugaugggcuccgggcagcuccugugggacaccgugaccggcgucgacauggcccuguga

SEQ ID NO: 92839 - RNA, 1401 nt, Artificial Sequence
  derived and/or modified CDS sequence (opt1) from neuraminidase__InfluenzaB__AEA51357
augcugcccagcaccauccagacccucacgcuguuccugaccuccggcggggugcuccugagccuguacgucuccgccagccucuccuaccugcuguacagcgacauccuccugaaguucucccgcaccgagaucaccgccccgaucaugccccuggacugcgcgaacgccagcaacgugcaggccgugaaccgguccgccacgaagggcgucacccuccugcugcccgagcccgaguggaccuacccgcgccucagcugccccggguccaccuuccagaaggcccugcugaucagcccccaccgguucggcgagacgaaggggaacuccgcgccccucaucauccgcgagccguucaucgccugcggccccaaggagugcaagcacuucgcccugacccacuacgccgcgcagcccggcggguacuacaacggcacccgggaggaccgcaacaagcugcggcaccucaucagcgugaagcuggggaagauccccaccguggagaacuccaucuuccacauggccgccuggagcggcuccgccugccacgacgggcgcgaguggacguacaucggcgucgacggcccggacagcaacgcccugcucaagaucaaguucggggaggcguacaccgacaccuaccacuccuacgccaagaacauccugggcacccaggagagcgccugcaacugcaucgggggcgacugcaaccugaugaucacggacggccccgccagcgggaucuccgagagccgguuccucaagaucggcgaggggcgcaucaucaaggagaucuuccccaccggccgggugaagcacaccgaggagugcacgugcggguucgccuccaacaagaccaucgagugcgcgugccgcgacaacagcuacaccgccaagcggcccuucgugaagcugaacgucgagaccgacaccgccgagauccgccugaugugcacggagaccuaccucgacaccccgcggcccaacgacggcuccaucaccggccccugcgagagcaacggggacaagggcuccgggggcaucaagggcggguucgugcaccagcgcauggccagcaagaucggccggugguacucccgcacgaugagcaagaccgagcggauggggaugggccuguacgugaaguacgacggggaccccugggccgacuccgacgcgcuggccuucagcggcgucaugguguccaugaaggagccggggugguacagcuucggcuucgagaucaaggacaagaagugcgacgugcccugcaucggcaucgagaugguccacgacgggggcaaggagaccuggcacuccgccgccaccgccaucuacugccucauggggagcggccagcugcugugggacacggugaccggcgugaacauggcgcucuga

SEQ ID NO: 92840 - RNA, 1401 nt, Artificial Sequence
  derived and/or modified CDS sequence (opt1) from neuraminidase__InfluenzaB__AEA51359
augcugcccagcaccauccagacccucacgcuguuccugaccuccggcggggugcuccugagccuguacgucuccgccagccucuccuaccugcuguacagcgacauccuccugaaguucucccgcaccgagaucaccgccccgaucaugccccuggacugcgcgaacgccagcaacgugcaggccgugaaccgguccgccacgaagggcgucacccuccugcugcccgagcccgaguggaccuacccgcgccucagcugccccggguccaccuuccagaaggcccugcugaucagcccccaccgguucggcgagacgaaggggaacuccgcgccccucaucauccgcgagccguucaucgccugcggccccaaggagugcaagcacuucgcccugacccacuacgccgcgcagcccggcggguacuacaacggcacccgggaggaccgcaacaagcugcggcaccucaucagcgugaagcuggggaagauccccaccguggagaacuccaucuuccacauggccgccuggagcggcuccgccugccacgacgggcgcgaguggacguacaucggcgucgacggcccggacagcaacgcccugcucaagaucaaguacggggaggcguacaccgacaccuaccacuccuacgccaagaacauccugcggacccaggagagcgccugcaacugcaucggcggggacugcuaccugaugaucacggacggccccgccagcggcaucuccgagugccgcuuccucaagauccgggaggggcgcaucaucaaggagaucuuccccaccggccgggugaagcacaccgaggagugcacgugcggguucgccagcaacaagaccaucgagugcgcgugccgcgacaacuccuacaccgccaagcggcccuucgugaagcugaacgucgagaccgacaccgccgagauccgccugaugugcacggagaccuaccucgacaccccgcggcccaacgacggcagcaucaccgggcccugcgaguccgacggcgacaagggcagcgggggcaucaagggcggguucgugcaccagcgcauggccuccaagaucgggcggugguacagccgcacgauguccaagaccaagcggaugggcaugggccuguacgugaaguacgacggggaccccuggaccgacagcgaggcccuggcgcucuccggcgucauggugagcauggaggagccggggugguacuccuucggcuucgagaucaaggacaagaagugcgacgugcccugcaucgggaucgagaugguccacgacggcggcaagaccacguggcacagcgccgccaccgccaucuacugccugaugggguccggccagcugcucugggacaccgugaccgggguggacauggcccuguga

SEQ ID NO: 92841 - RNA, 1401 nt, Artificial Sequence
  derived and/or modified CDS sequence (opt1) from neuraminidase__InfluenzaB__AEA51365
augcugcccagcaccauccagacccucacgcuguuccugaccuccggcggggugcuccugagccuguacgucuccgccagccucuccuaccugcuguacagcgacauccuccugaaguucucccgcaccgagaucaccgccccgaucaugccccuggacugcgcgaacgccagcaacgugcaggccgugaaccgguccgccacgaagggcgucacccuccugcugcccgagcccgaguggaccuacccgcgccucagcugccccggguccaccuuccagaaggcccugcugaucagcccccaccgguucggcgagacgaaggggaacuccgcgccccucaucauccgcgagccguucaucgccugcggccccaaggagugcaagcacuucgcccugacccacuacgccgcgcagcccggcggguacuacaacggcacccgggaggaccgcaacaagcugcggcaccucaucagcgugaagcuggggaagauccccaccguggagaacuccaucuuccacauggccgccuggagcggcuccgccugccacgacgggcgcgaguggacguacaucggcgucgacggcccggacagcaacgcccugcucaagaucaaguacggggaggcguacaccgacaccuaccacuccuacgccaagaacauccugcggacccaggagagcgccugcaacugcaucggcggggacugcuaccugaugaucacggacggccccgccagcggcaucuccgagugccgcuuccucaagauccgggaggggcgcaucaucaaggagaucuuccccaccggccgggugaagcacaccgaggagugcacgugcggguucgccagcaacaagaccaucgagugcgcgugccgcgacaacuccuacaccgccaagcggcccuucgugaagcugaacgucgagaccgacaccgccgagauccgccugaugugcacggagaccuaccucgacaccccgcggcccaacgacggcagcaucaccgggcccugcgaguccaacggcgacaagggcagcgggggcaucaagggcggguucgugcaccagcgcauggccuccaagaucgggcggugguacagccgcacgauguccaagaccaagcggaugggcaugggccuguacgugaaguacgacggggaccccuggaccgacagcgaggcccuggcgcucuccggcgucauggugagcauggaggagccggggugguacuccuucggcuucgagaucaaggacaagaagugcgacgugcccugcaucgggaucgagaugguccacgacggcggcaagaccacguggcacagcgccgccaccgccaucuacugccugaugggguccggccagcugcucugggacaccgugaccggggugaacaugacgcuguga

SEQ ID NO: 92842 - RNA, 1401 nt, Artificial Sequence; identical to SEQ ID NO: 92841
  derived and/or modified CDS sequence (opt1) from neuraminidase__InfluenzaB__AEA51367

SEQ ID NO: 92843 - RNA, 1401 nt, Artificial Sequence; identical to SEQ ID NO: 92841
  derived and/or modified CDS sequence (opt1) from neuraminidase__InfluenzaB__AEA51371

SEQ ID NO: 92844 - RNA, 1401 nt, Artificial Sequence
  derived and/or modified CDS sequence (opt1) from neuraminidase__InfluenzaB__AEA51373
augcugcccagcaccauccagacccucacgcuguuccugaccuccggcggggugcuccugagccuguacgucuccgccagccucuccuaccugcuguacagcgacauccuccugaaguucuccccgaccgagaucaccgcccccacgaugccccuggacugcgcgaacgccagcaacgugcaggccgugaaccgcuccgccaccaagggcgucacccuccugcugcccgagccggaguggaccuacccccggcucagcugccccggguccacguuccagaaggcccugcugaucagcccccaccgcuucggcgagaccaaggggaacuccgcgccgcucaucauccgggagcccuucaucgccugcggccccaacgagugcaagcacuucgcccugacccacuacgccgcgcagcccggcggguacuacaacggcacccgcggggaccggaacaagcugcgccaccucaucagcgugaagcugggcaagaucccgacgguggagaacuccaucuuccacauggccgccuggagcggguccgccugccacgacggcaaggaguggaccuacaucggcgucgacgggcccgacaacaacgcccugcucaaggugaaguacggcgaggcguacaccgacaccuaccacagcuacgccaacaagauccugcggacgcaggaguccgccugcaacugcaucgggggcaacugcuaccugaugaucaccgacggcagcgccagcgggguguccgagugccgcuuccucaagauccgggagggccgcaucaucaaggagaucuuccccaccgggcgggucaagcacaccgaggagugcacgugcggcuucgccagcaacaagaccaucgagugcgcgugccgcgacaacuccuacaccgccaagcggcccuucgugaagcugaacguggagaccgacacggccgagauccgccugaugugcaccgacaccuaccucgacaccccgcggcccgacgacgggagcaucacgggccccugcgaguccaacggcgacaaggggagcggcgggaucaagggcggguucguccaccagcgcauggccuccaagaucggccggugguacagccgcaccauguccaagaccaagcggaugggcauggggcuguacgugaaguacgacggcgaccccuggaccgacagcgaggcccuggcgcucuccggggugauggucagcauggaggagccgggcugguacuccuucggguucgagaucaaggacaagaagugcgacgugcccugcaucggcaucgagauggugcacgacggcgggaaggagacguggcacagcgccgccaccgccaucuacugccugaugggcuccgggcagcugcucugggacaccgucaccggcgugaacaugacgcuguga

SEQ ID NO: 92845 - RNA, 1401 nt, Artificial Sequence
  derived and/or modified CDS sequence (opt1) from neuraminidase__InfluenzaB__AEA51377
augcugcccagcaccauccagacccucacgcuguuccugaccuccggcggggugcuccugagccuguacgucuccgccagccucuccuaccugcuguacagcgacauccuccugaaguucuccccgaccgagaucaccgcccccacgaugccccuggacugcgcgaacgccagcaacgugcaggccgugaaccgcuccgccaccaagggcgucacccuccugcugcccgagccggaguggaccuacccccggcucagcugccccggguccacguuccagaaggcccugcugaucagcccccaccgcuucggcgagaccaaggggaacuccgcgccgcucaucauccgggagcccuucaucgccugcggccccaacgagugcaagcacuucgcccugacccacuacgccgcgcagcccggcggguacuacaacggcacccgcggggaccggaacaagcugcgccaccucaucagcgugaagcugggcaagaucccgacgguggagaacuccaucuuccacauggccgccuggagcggguccgccugccacgacggcaaggaguggaccuacaucggcgucgacgggcccgacaacaacgcccugcucaaggugaaguacggcgaggcguacaccgacaccuaccacagcuacgccaacaagauccugcggacgcaggaguccgccugcaacugcaucgggggcaacugcuaccugaugaucaccgacggcagcgccagcgggguguccgagugccgcuuccucaagauccgggagggccgcaucaucaaggagaucuuccccaccgggcgggucaagcacaccgaggagugcacgugcggcuucgccagcaacaagaccaucgagugcgcgugccgcgacaacuccuacaccgccaagcggcccuucgugaagcugaacguggagaccgacacggccgagauccgccugaugugcaccgacaccuaccucgacaccccgcggcccgacgacgggagcaucacgggccccugcgaguccaacggcgacaaggggagcggcgggaucaagggcggguucguccaccagcgcauggaguccaagaucggccggugguacagccgcaccauguccaagaccgagcggaugggcauggggcuguacgugaaguacgacggcgaccccugggccgacagcgacgcccuggcguucuccggggugauggucagcaugaaggagccgggcugguacuccuucggguucgagaucaaggacaagaagugcgacgugcccugcaucggcaucgagauggugcacgacggcgggaaggagaccuggcacagcgccgccacggccaucuacugccucaugggcuccgggcagcugcugugggacaccgucaccggcguggacauggcccucuga

SEQ ID NO: 92846 - RNA, 1401 nt, Artificial Sequence; identical to SEQ ID NO: 92845
  derived and/or modified CDS sequence (opt1) from neuraminidase__InfluenzaB__AEA51379

SEQ ID NO: 92847 - RNA, 1401 nt, Artificial Sequence
  derived and/or modified CDS sequence (opt1) from neuraminidase__InfluenzaB__AEA51381
augcugcccagcaccauccagacccucacgcuguuccugaccuccggcggggugcuccugagccuguacgucuccgccagccucuccuaccugcuguacagcgacauccuccugaaguucuccccgaccgagaucaccgcccccacgaugccccuggacugcgcgaacgccagcaacgugcaggccgugaaccgcuccgccaccaagggcgucacccuccugcugcccgagccggaguggaccuacccccggcucagcugccccggguccacguuccagaaggcccugcugaucagcccccaccgcuucggcgagaccaaggggaacuccgcgccgcucaucauccgggagcccuucaucgccugcggccccaacgagugcaagcacuucgcccugacccacuacgccgcgcagcccggcggguacuacaacggcacccgcggggaccggaacaagcugcgccaccucaucagcgugaagcugggcaagaucccgacgguggagaacuccaucuuccacauggccgccuggagcggguccgccugccacgacggcaaggaguggaccuacaucggcgucgacgggcccgacaacaacgcccugcucaaggugaaguacggcgaggcguacaccgacaccuaccacagcuacgccaacaagauccugcggacgcaggaguccgccugcaacugcaucgggggcaacugcuaccugaugaucaccgacggcagcgccagcgggguguccgagugccgcuuccucaagauccgggagggccgcaucaucaaggagaucuuccccaccgggcgggucaagcacaccgaggagugcacgugcggcuucgccagcaacaagaccaucgagugcgcgugccgcgacaacuccuacaccgccaagcggcccuucgugaagcugaacguggagaccgacacggccgagauccgccugaugugcaccgacaccuaccucgacaccccgcggcccaacgacgggagcaucacgggccccugcgaguccgacggcgacaaggggagcggcgggaucaagggcggguucguccaccagcgcaugaaguccaagaucggccggugguacagccgcaccauguccaagaccgagcggaugggcauggggcuguacgugaaguacgacggcgaccccugggccgacagcgacgcccuggcguucuccggggugauggucagcgugaaggagccgggcugguacuccuucggguucgagaucaaggacaagaagugcgacgugcccugcaucggcaucgagaugguccacgacggcgggaaggagaccuggcacagcgccgccacggccaucuacugccucaugggcuccgggcagcugcugugggacaccgugaccggcguggacauggcccucuga

SEQ ID NO: 92848 - RNA, 1401 nt, Artificial Sequence; identical to SEQ ID NO: 92845
  derived and/or modified CDS sequence (opt1) from neuraminidase__InfluenzaB__AEA51383

SEQ ID NO: 92849 - RNA, 1401 nt, Artificial Sequence
  derived and/or modified CDS sequence (opt1) from neuraminidase__InfluenzaB__AEG20998
augcugcccagcaccauccagacccucacgcuguuccugaccuccggcggggugcuccugagccuguacgucuccgccagccucuccuaccugcuguacagcgacauccuccugaaguucucccgcaccgagaucaccgccccgauccugcggcucgcgugcgccaacgccagcaacgugcaggccgugaaccgcuccgccacgaagggcgucacccugcugcuccccgagcccgaguggaccuacccccggcugagcugcccgggguccaccuuccagaaggcgcugcucaucagcccccaccgcuucggcgagacgaaggggaacuccgcgccccugaucauccgggagcccuucaucgccugcggcccgaaggagugcaagcacuucgcccugacccacuacgccgcccagcccggcggguacuacaacggcacccgcgaggaccggaacaagcuccgccaccugaucagcgugaagcuggggaagauccccaccguggagaacuccaucuuccacauggccgccuggagcggcuccgccugccacgacgggcgggaguggacguacaucggcgucgacggccccgacagcaacgcgcuccugaagaucaaguacgggggcgccuucaccgacaccuaccacuccuacgccaagaacauccugagcccgcaggagagcgccugcaacugcaucgggggcgacugcuaccucaugaucaccgacggccccgccuccgggaucagcgagugccgcuuccugaagauccgggagggccgcaucaucaaggagaucuuccccacggggcgggugaagcacaccgaggagugcacgugcggcuucgcguccaacaagaccaucgagugcgccugccgcgacaacagcuacaccgccaagcggcccuucgugaagcugaacgucgagaccgacaccgccgagauccgccucaugugcaccgagacguaccuggacaccccgcggcccaacgacggguccaucaccggccccugcgagagcaacggcgacaagggguccggcgggaucaagggcggguucgugcaccagcgcauggccagcaagaucggccggugguacucccgcaccaugagcaagacgaagcggaugggcauggggcuguacgugaaguacgacggcgaccccuggaccgacuccgaggcgcucgcccugagcggggucaugguguccauggaggagccgggcugguacagcuucggguucgagaucaaggacaagaagugcgacgugcccugcaucggcaucgagaugguccacgacggcgggaagaccaccuggcacuccgccgccacggccaucuacugccugaugggcagcgggcagcuccugugggacaccgugaccggcgugaacaugacccuguga

SEQ ID NO: 92850 - RNA, 1401 nt, Artificial Sequence
  derived and/or modified CDS sequence (opt1) from neuraminidase__InfluenzaB__AEG20999
augcugcccagcaccauccagacccucacgcuguuccugaccuccggcggggugcuccugagccuguccgucagcgccucccucagcuaccugcuguacuccgacauccuccugaaguucagccgcaccgagaucaccgccccgaucaugccccuggacugcgcgaacgccuccaacgugcaggccgugaaccggagcgccacgaagggcgucacccuccugcugcccgagcccgaguggaccuacccgcgccucuccugccccgggagcaccuuccagaaggcccugcugaucagcccccaccgguucggcgagacgaaggggaacuccgcgccccucaucauccgcgagccguucaucgccugcggccccaaggagugcaagcacuucgcccugacccacuacgccgcgcagcccggcggguacuacaacggcacccgggaggaccgcaacaagcugcggcaccucaucuccgugaagcuggggaagauccccaccguggagaacagcaucuuccacauggccgccugguccggcagcgccugccacgacgggcgcgaguggacguacaucggcgucgacggcccggacuccaacgcccugcucaagaucaaguacgggggcgcguucaccgacaccuaccacagcuacgccaagaacauccugagcccccaggaguccgccugcaacugcaucgggggcgacugcuaccugaugaucaccgacggccccgccagcgggaucuccgagugccgguuccucaagauccgcgagggccggaucaucaaggagaucuuccccacggggcgcgugaagcacaccgaggagugcacgugcggcuucgccagcaacaagaccaucgagugcgcgugccgggacaacuccuacaccgccaagcgcccguucgugaagcugaacgucgagaccgacaccgccgagauccggcugaugugcaccgagacguaccucgacacgccccgccccaacgacgggagcaucaccggccccugcgaguccaacggcgacaaggggagcggcgggaucaagggcggguucgugcaccagcggauggccuccaagaucggccgcugguacagccggaccauguccaagaccaagcgcaugggcauggggcuguacgugaaguacgacggcgacccguggaccgacagcgaggcccuggcgcucuccggggucauggugagcauggaggagcccggcugguacuccuucggguucgagaucaaggacaagaagugcgacgugcccugcaucggcaucgagaugguccacgacggcgggaagaccaccuggcacagcgccgccacggccaucuacugccugaugggcuccgggcagcugcucugggacaccgugaccggcgugaacaugacccuguga

SEQ ID NO: 92851 - RNA, 1401 nt, Artificial Sequence
  derived and/or modified CDS sequence (opt1) from neuraminidase__InfluenzaB__AEG21000
augcugcccagcaccauccagacccucacgcuguuccugaccuccggcggggugcuccugagccuguacgucuccgccagccucuccuaccugcuguacagcgacauccuccugaaguucucccgcaccgagaucaccgccgcgauccugauccucgacugcgccaacgccagcaacgugcaggccgugaaccgguccgccacgaagggcgucacccugcugcucccggagcccgaguggaccuacccccgccugagcugccccggguccaccuuccagaaggcgcugcucaucagcccgcaccgguucggcgagacgaaggggaacuccgcgccccugaucauccgcgagcccuucaucgccugcggccccaaggagugcaagcacuucgcccugacccacuacgccgcccagccgggcggguacuacaacggcacccgggaggaccgcaacaagcuccggcaccugaucagcgugaagcuggggaagauccccaccguggagaacuccaucuuccacauggccgccuggagcggcuccgccugccacgacgggcgcgaguggacguacaucggcgucgacggccccgacagcaacgcgcuccugaagaucaaguacgggggcgccuucaccgacaccuaccacuccuacgccaagaacauccugagcccccaggagagcgccugcaacugcaucgggggcgacugcuaccucaugaucaccgacggcccggccuccgggaucagcgagugccgguuccugaagauccgcgagggccggaucaucaaggagaucuuccccacggggcgcgugaagcacaccgaggagugcacgugcggcuucgcguccaacaagaccaucgagugcgccugccgggacaacagcuacaccgccaagcgccccuucgugaagcugaacgucgagaccgacaccgccgagauccggcucaugugcaccgagacguaccuggacacgccccgcccgaacgacggguccaucaccggccccugcgagagcaacggcgacaagggguccggcgggaucaagggcggguucgugcaccagcggauggccagcaagaucggccgcugguacucccggaccaugagcaagaccaagcgcaugggcauggggcuguacgugaaguacgacggcgaccccuggaccgacuccgaggcgcucgcccugagcggggucaugguguccauggaggagcccggcugguacagcuucggguucgagaucaaggacaagaagugcgacgugccgugcaucggcaucgagaugguccacgacggcgggaagaccaccuggcacuccgccgccacggccaucuacugccugaugggcagcgggcagcuccugugggacaccgugaccggcgugaacaugacccuguga

SEQ ID NO: 92852 - RNA, 1401 nt, Artificial Sequence
  derived and/or modified CDS sequence (opt1) from neuraminidase__InfluenzaB__AEG21002
augcugcccagcaccauccagacccucacgcuguuccugaccuccggcggggugcuccugagccuguacgucuccgccagccucuccuaccugcuguacagcgacauccuccugaaguucucccgcaccgagaucaccgccccgaucaugccccuggacugcgcgaacgccagcaacgugcaggccgugaaccgguccgccacgaagggcgucacccuccugcugcccgagcccgaguggaccuacccgcgccucagcugccccggguccaccuuccagaaggcccugcugaucagcccccaccgguucggcgagacgaaggggaacuccgcgccccucaucauccgcgagccguucaucgccugcggccccaaggagugcaagcacuucgcccugacccacuacgccgcgcagcccggcggguacuacaacggcacccgggaggaccgcaacaagcugcggcaccucaucagcgugaagcuggggaagauccccaccguggagaacuccaucuuccacauggccgccuggagcggcuccgccugccacgacgggcgcgaguggacguacaucggcgucgacggcccggacagcaacgcccugcucaagaucaaguacggggaggcguacaccgacaccuaccacuccuacgccaagaacauccugcggacccaggagagcgccugcaacugcaucggcggggacugcuaccugaugaucacggacggccccgccagcggcaucuccgagugccgcuuccucaagauccgggaggggcgcaucaucaaggagaucuuccccaccggccgggugcgccacaccgaggagugcacgugcggguucgccagcaacaagaccaucgagugcgcgugccgggacaacuccuacaccgccaagcgccccuucgugaagcugaacgucgagaccgacaccgccgagauccggcugaugugcacggagaccuaccucgacaccccgcgccccaacgacggcagcaucaccgggcccugcgaguccaacggcgacaagggcagcgggggcaucaagggcggguucgugcaccagcggauggccuccaagaucgggcgcugguacagccggacgauguccaagaccaagcgcaugggcaugggccuguacgugaaguacgacggggaccccuggaccgacagcgaggcccuggcgcucuccggcgucauggugagcauggaggagccggggugguacuccuucggcuucgagaucaaggacaagaagugcgacgugcccugcaucgggaucgagaugguccacgacggcggcaagaccacguggcacagcgccgccaccgccaucuacugccugaugggguccggccagcugcucugggacaccgugaccggggugaacaugacgcuguga

SEQ ID NO: 92853 - RNA, 1401 nt, Artificial Sequence
  derived and/or modified CDS sequence (opt1) from neuraminidase__InfluenzaB__AEG21003
augcugcccagcaccauccagacccucacgcuguuccugaccuccggcggggugcuccugagccuguacgucuccgccagccucuccuaccugcuguacagcgacauccuccugaaguucucccgcaccgagaucaccgccccgaucaugccccuggacugcgcgaacgccagcaacgugcaggccgugaaccgguccgccacgaagggcgucacccuccugcugcccgagcccgaguggaccuacccgcgccucagcugccccggguccaccuuccagaaggcccugcugaucagcccccaccgguucggcgagacgaaggggaacuccgcgccccucaucauccgcgagccguucaucgccugcggccccaaggagugcaagcacuucgcccugacccacuacgccgcgcagcccggcggguacuacaacggcacccgggaggaccgcaacaagcugcggcaccucaucagcgugaagcuggggaagauccccaccguggagaacuccaucuuccacauggccgccuggagcggcuccgccugccacgacgggcgcgaguggacguacaucggcgucgacggcccggacagcaacgcccugcucaagaucaaguacggggaggcguacaccgacaccuaccacuccuacgccaagaacauccugcggacccaggagagcgccugcaacugcaucggcggggacugcuaccugaugaucacggacggccccgccagcggcaucuccgagugccgcuuccucaagauccgggaggggcgcaucaucaaggagaucuuccccaccggccgggugaagcacaccgaggagugcacgugcggguucgccagcaacaagaccaucgagugcgcgugccgcgacaacuccuacaccgccaagcggcccuucgugaagcugaacgucgagaccgacaccgccgagauccgccugaugugcacggagaccuaccucgacaccccgcggcccaacgacggcagcaucaccgggcccugcgaguccgacggcgacaagggcagcgggggcaucaagggcggguucgugcaccagcgcauggccuccaagaucgggcggugguacagccgcacgauguccaagaccaagcggaugggcaugggccuguacgugaaguacgacggggaccccuggaccgacagcgaggcccuggcgcucuccggcgucauggugagcauggaggagccggggugguacuccuucggcuucgagaucaaggacaagaagugcgacgugcccugcaucgggaucgagaugguccacgacggcggcaagaccacguggcacagcgccgccaccgccaucuacugccugaugggguccggccagcugcucugggacaccgugaccggggugaacaugacgcuguga

SEQ ID NO: 92854 - RNA, 1401 nt, Artificial Sequence
  derived and/or modified CDS sequence (opt1) from neuraminidase__InfluenzaB__AEG21004
augcugcccagcaccauccagacccucacgcuguuccugaccuccggcggggugcuccugagccuguacgucuccgccagccucuccuaccugcuguacagcgacauccuccugaaguucuccccgaccgagaucaccgcccccacgaugccccuggacugcgcgaacgccagcaacgugcaggccgugaaccgcuccgccaccaagggcgucacccuccugcugcccgagccggaguggaccuacccccggcucagcugccccggguccacguuccagaaggcccugcugaucagcccccaccgcuucggcgagaccaaggggaacuccgcgccgcucaucauccgggagcccuucaucgccugcggccccaacgagugcaagcacuucgcccugacccacuacgccgcgcagcccggcggguacuacaacggcacccgcggggaccggaacaagcugcgccaccucaucagcgugaagcugggcaagaucccgacgguggagaacuccaucuuccacauggccgccuggagcggguccgccugccacgacggcaaggaguggaccuacaucggcgucgacgggcccgacaacaacgcccugcucaaggugaaguacggcgaggcguacaccgacaccuaccacagcuacgccaacaagauccugcggacgcaggaguccgccugcaacugcaucgggggcaacugcuaccugaugaucaccgacggcagcgccagcgggguguccgagugccgcuuccucaagauccgggagggccgcaucaucaaggagaucuuccccaccgggcgggucaagcacaccgaggagugcacgugcggcuucgccagcaacaagaccaucgagugcgcgugccgcgacaacuccuacaccgccaagcggcccuucgugaagcugaacguggagaccgacacggccgagauccgccugaugugcaccgacaccuaccucgacaccccgcggcccgacgacgggagcaucacgggccccugcgaguccaacggcgacaagggcggcgggggcaucaagggcggguucguccaccagcgcauggagagcaagaucgggcggugguacucccgcaccaugagcaagaccgagcggauggggaugggccuguacgugaaguacgacggggaccccugggccgacuccgacgcccuggcguucagcggcgugauggucuccaugaaggagccggggugguacagcuucggcuucgagaucaaggacaagaagugcgacgugcccugcaucggcaucgagauggugcacgacgggggcaaggagaccuggcacuccgccgccacggccaucuacugccucauggggagcggccagcugcugugggacaccgucaccggcguggacauggcccucuga

SEQ ID NO: 92855 - RNA, 1401 nt, Artificial Sequence
  derived and/or modified CDS sequence (opt1) from neuraminidase__InfluenzaB__AEG21005
augcugcccagcaccauccagacccucacgcuguuccugaccuccggcggggugcuccugagccuguacgucuccgccagccucuccuaccugcuguacagcgacauccuccugaaguucuccccgaccgagaucaccgcccccacgaugccccuggacugcgcgaacgccagcaacgugcaggccgugaaccgcuccgccaccaagggcgucacccuccugcugcccgagccggaguggaccuacccccggcucagcugccccggguccacguuccagaaggcccugcugaucagcccccaccgcuucggcgagaccaaggggaacuccgcgccgcucaucauccgggagcccuucaucgccugcggccccaacgagugcaagcacuucgcccugacccacuacgccgcgcagcccggcggguacuacaacggcacccgcggggaccggaacaagcugcgccaccucaucagcgugaagcugggcaagaucccgacgguggagaacuccaucuuccacauggccgccuggagcggguccgccugccacgacggcaaggaguggaccuacaucggcgucgacgggcccgacaacaacgcccugcucaaggugaaguacggcgaggcguacaccgacaccuaccacagcuacgccaacaagauccugcggacgcaggaguccgccugcaacugcaucgggggcaacugcuaccugaugaucaccgacggcagcgccagcgggguguccgagugccgcuuccucaagauccgggagggccgcaucaucaaggagaucuuccccaccgggcgggucaagcacaccgaggagugcacgugcggcuucgccagcaacaagaccaucgagugcgcgugccgcgacaacuccuacaccgccaagcggcccuucgugaagcugaacguggagaccgacacggccgagauccgccugaugugcaccgacaccuaccucgacaccccgcggcccgacgacgggagcaucacgggccccugcgaguccaacggcgacaagggcggcgggggcaucaagggcggguucguccaccagcgcauggagagcaagaucgggcggugguacucccgcaccaugagcaagaccgagcggauggggaugggccuguacgugaaguacgacggggaccccugggccgacuccgacgcccuggcguucagcggcgugauggucuccaugaaggagccggggugguacagcuucggcuucgagaucaaggacaagaagugcgacgugcccugcaucggcaucgagauggugcacgacgggggcaaggagaccuggcacuccgccgccacggccaucuacugccucauggggagcggccagcugcugugggacaccgucaccggcgugaacaugacccucuga

SEQ ID NO: 92856 - RNA, 1401 nt, Artificial Sequence; identical to SEQ ID NO: 92841
  derived and/or modified CDS sequence (opt1) from neuraminidase__InfluenzaB__AEG21006

SEQ ID NO: 92857 - RNA, 1401 nt, Artificial Sequence; identical to SEQ ID NO: 92845
  derived and/or modified CDS sequence (opt1) from neuraminidase__InfluenzaB__AEG21007

SEQ ID NO: 92858 - RNA, 1401 nt, Artificial Sequence
  derived and/or modified CDS sequence (opt1) from neuraminidase__InfluenzaB__AEG21008
augcugcccagcaccauccagacccucacgcuguuccugaccuccggcggggugcuccugagccuguacgucuccgccagccucuccuaccugcuguacagcgacauccuccugaaguucuccccgaccgagaucaccgcccccacgaugccccuggacugcgcgaacgccagcaacgugcaggccgugaaccgcuccgccaccaagggcgucacccuccugcugcccgagccggaguggaccuacccccggcucagcugccccggguccacguuccagaaggcccugcugaucagcccccaccgcuucggcgagaccaaggggaacuccgcgccgcucaucauccgggagcccuucaucgccugcggccccaacgagugcaagcacuucgcccugacccacuacgccgcgcagcccggcggguacuacaacggcacccgcggggaccggaacaagcugcgccaccucaucagcgugaagcugggcaagaucccgacgguggagaacuccaucuuccacauggccgccuggagcggguccgccugccacgacggcaaggaguggaccuacaucggcgucgacgggcccgacaacaacgcccugcucaaggugaaguacggcgaggcguacaccgacaccuaccacagcuacgccaacaagauccugcggacgcaggaguccgccugcaacugcaucgggggcaacugcuaccugaugaucaccgacggcagcgccagcgggguguccgagugccgcuuccucaagauccgggagggccgcaucaucaaggagaucuuccccaccgggcgggucaagcacaccgaggagugcacgugcggcuucgccagcaacaagaccaucgagugcgcgugccgcgacaacuccuacaccgccaagcggcccuucgugaagcugaacguggagaccgacacggccgagauccgccugaugugcaccgacaccuaccucgacaccccgcggcccgacgacgggagcaucacgggccccugcgaguccaacggcgacaaggggagcggcgggaucaagggcggguucguccaccagcgcauggccuccaagaucggccggugguacagccgcaccauguccaagaccaagcggaugggcauggggcuguacgugaaguacgacggcgaccccugggccgacagcgacgcgcuggccuucuccggggugauggucagcaugaaggagccgggcugguacuccuucggguucgagaucaaggacaagaagugcgacgugcccugcaucggcaucgagauggugcacgacggcgggaaggagaccuggcacagcgccgccacggccaucuacugccucaugggcuccgggcagcugcugugggacaccgucaccggcguggacauggcgcucuga

SEQ ID NO: 92859 - RNA, 1401 nt, Artificial Sequence; identical to SEQ ID NO: 92845
  derived and/or modified CDS sequence (opt1) from neuraminidase__InfluenzaB__AEG21009

SEQ ID NO: 92860 - RNA, 1401 nt, Artificial Sequence; identical to SEQ ID NO: 92845
  derived and/or modified CDS sequence (opt1) from neuraminidase__InfluenzaB__AEG21010

SEQ ID NO: 92861 - RNA, 1401 nt, Artificial Sequence; identical to SEQ ID NO: 92845
  derived and/or modified CDS sequence (opt1) from neuraminidase__InfluenzaB__AEG21011

SEQ ID NO: 92862 - RNA, 1401 nt, Artificial Sequence; identical to SEQ ID NO: 92845
  derived and/or modified CDS sequence (opt1) from neuraminidase__InfluenzaB__AEG21012

SEQ ID NO: 92863 - RNA, 1401 nt, Artificial Sequence
  derived and/or modified CDS sequence (opt1) from neuraminidase__InfluenzaB__AEG21013
augcugcccagcaccauccagacccucacgcuguuccugaccuccggcggggugcuccugagccuguacgucuccgccagccucuccuaccugcuguacagcgacauccuccugaaguucuccccgaccgagaucaccgcccccacgaugccccuggacugcgcgaacgccagcaacgugcaggccgugaaccgcuccgccaccaagggcgucacccuccugcugcccgagccggaguggaccuacccccggcucagcugccccggguccacguuccagaaggcccugcugaucagcccccaccgcuucggcgagaccaaggggaacuccgcgccgcucaucauccgggagcccuucaucgccugcggccccaacgagugcaagcacuucgcccugacccacuacgccgcgcagcccggcggguacuacaacggcacccgcggggaccggaacaagcugcgccaccucaucagcgugaagcugggcaagaucccgacgguggagaacuccaucuuccacauggccgccuggagcggguccgccugccacgacggcaaggaguggaccuacaucggcgucgacgggcccgacaacaacgcccugcucaaggugaaguacggcgaggcguacaccgacaccuaccacagcuacgccaacaagauccugcggacgcaggaguccgccugcaacugcaucgggggcaacugcuaccugaugaucaccgacggcagcgccagcgggguguccgagugccgcuuccucaagauccgggagggccgcaucaucaaggagaucuuccccaccgggcgggucaagcacaccgaggagugcacgugcggcuucgccagcaacaagaccaucgagugcgcgugccgcgacaacuccuacaccgccaagcggcccuucgugaagcugaacguggagaccgacacggccgagauccgccugaugugcaccgacaccuaccucgacaccccgcggcccaacgacgggagcaucacgggccccugcgaguccgacggcgacaaggggagcggcgggaucaagggcggguucguccaccagcgcaugaaguccaagaucggccggugguacagccgcaccauguccaagaccgagcggaugggcauggggcuguacgugaaguacgacggcgaccccugggccgacagcgacgcccuggcguucuccggggugauggucagcaugaaggagccgggcugguacuccuucggguucgagaucaaggacaagaagugcgacgugcccugcaucggcaucgagauggugcacgacggcgggaaggagaccuggcacagcgccgccacggccaucuacugccucaugggcuccgggcagcugcugugggacaccgucaccggcguggacauggcccucuga

SEQ ID NO: 92864 - RNA, 1401 nt, Artificial Sequence
  derived and/or modified CDS sequence (opt1) from neuraminidase__InfluenzaB__AEN68957
augcugcccagcaccauccagacccucacgcuguuccugaccuccggcggggugcuccugagccuguacgucuccgccagccucuccuaccugcuguacagcgacauccuccugaaguucucccgcaccgagaucccggcccccaucaugccccuggacugcgcgaacgccagcaacgugcaggccgugaaccgguccgccaccaagggcgucacgcuccugcugcccgagccggaguggaccuacccccgccucagcugccccggguccaccuuccagaaggcccugcugaucagcccccaccgguucggcgagaccaaggggaacuccgcgccgcucaucauccgcgagcccuucaucgccugcggccccaaggagugcaagcacuucgcccugacgcacuacgccgcgcagcccggcggguacuacaacggcacccgggaggaccgcaacaagaugcggcaccugaucagcgugaagcucgggaagaucccgaccguggagaacuccaucuuccacauggccgccuggagcggcuccgccugccacgacgggcgcgaguggaccuacaucggcgucgacggccccgacagcaacgcccugcugaagaucaaguacggggaggcguacacggacaccuaccacuccuacgccaagaacauccuccggacccaggagagcgccugcaacugcaucggcggggacugcuaccugaugaucaccgacggccccgccagcggcaucuccgagugccgcuuccugaagauccgggaggggcgcaucaucaaggagaucuuccccacgggccgggugaaguacaccgaggagugcacgugcggguucgccagcaacaagaccaucggcugcgcgugccgcgacaacuccuacaccgccaagcggccguucgugaagcucaacgucgagaccgacaccgccgagauccgccugaugugcaccgagacguaccuggacacgccccggcccaacgacgggagcaucaccggccccugcgaguccaacggcgacaaggggagcggcgggaucaagggcggguucgugcaccagcgcauggccuccaagaucggccggugguacagccgcaccauguccaagaccaagcggaugggcauggggcucuacgugaaguacgacggcgacccguggaccgacagcgaggcccuggcgcuguccggggucauggugagcauggaggagcccggcugguacuccuucggguucgagaucaaggacaagaagugcgacgugcccugcaucggcaucgagaugguccacgacggcgggaagaccaccuggcacagcgccgccacggccaucuacugccucaugggcuccgggcagcugaugugggacaccgugaccggcgugaacaugacccuguga

SEQ ID NO: 92865 - RNA, 1401 nt, Artificial Sequence
  derived and/or modified CDS sequence (opt1) from neuraminidase__InfluenzaB__AEO80071
augcugcccagcaccauccagacccucacgcuguuccugaccuccggcggggugcuccugagccuguacgucuccgccagccucuccuaccugcuguacagcgacauccuccugaaguucuccccgaccgagaucaccgcccccacgaugccccuggacugcgcgaacgccagcaacgugcacgccgugaaccgcuccgccaccaagggcgucacccuccugcugcccgagccggaguggaccuacccccggcucagcugccccggguccacguuccagaaggcccugcugaucagcccccaccgcuucggcgagaccaaggggaacuccgcgccgcucaucauccgggagcccuucaucgccugcggccccaacgagugcaagcacuucgcccugacccacuacgccgcgcagcccggcggguacuacaacggcacccgcggggaccggaacaagcugcgccaccucaucagcgugaagcugggcaagaucccgacgguggagaacuccaucuuccacauggccgccuggagcggguccgccugccacgacggcaaggaguggaccuacaucggcgucgacgggcccgacaacaacgcccugcucaagaucaaguacggcgaggcguacaccgacaccuaccacagcuacgccaacaacauccugcggacgcaggaguccgccugcaacugcaucgggggcaacugcuaccugaugaucaccgacggcagcgccagcgggguguccgagugccgcuuccucaagauccgggagggccgcaucaucaaggagaucuuccccaccgggcgggugaagcacaccgaggagugcacgugcggcuucgccagcaacaagaccaucgagugcgcgugccgcgacaacuccuacaccgccaagcggcccuucgucaagcugaacguggagaccgacacggccgagauccgccugaugugcaccgacaccuaccucgacaccccgcggcccgacgacgggagcaucacgggccccugcgaguccaacggcgacaaggggagcggcgggaucaagggcggguucgugcaccagcgcauggccuccaagaucggccggugguacagccgcaccauguccaagaccgagcggaugggcauggggcuguacgucaaguacgacggcgaccccugggccgacagcgacgcgcuggccuucuccggggugauggugagcaugaaggagccgggcugguacuccuucggguucgagaucaaggacaagaagugcgacguccccugcaucggcaucgagauggugcacgacggcgggaaggagaccuggcacagcgccgccacggccaucuacugccucaugggcuccgggcagcugcugugggacaccgugaccggcgucgacauggcgcucuga

SEQ ID NO: 92866 - RNA, 1401 nt, Artificial Sequence
  derived and/or modified CDS sequence (opt1) from neuraminidase__InfluenzaB__AEO80082
augcugcccagcaccauccagacccucacgcuguuccugaccuccggcggggugcuccugagccuguacgucuccgccagccucuccuaccugcuguacagcgacauccuccugaaguucucccagaccggcaucaccgccccgaucaugccccuggacugcgcgaacgccagcaacgugcaggccgugaaccgcuccgccacgaagggggucacccuccugcugcccgagcccgaguggaccuacccgcggcucagcugccccggcuccaccuuccagaaggcccugcugaucagcccccaccgcuucggggagacgaagggcaacuccgcgccccucaucauccgggagccguucaucgccugcggccccaccgagugcaaguacuucgcccugacccacuacgccgcgcagcccgggggcuacuacaacgggacccgcgaggaccggaacaagcugcgccaccucaucagcgugaagcugggcaagauccccacgguggagaacuccaucuuccacauggccgccuggagcggguccgccugccacgacggcaaggaguggaccuacaucggcgucgacgggccggacagcaacgcccugcucaagaucaaguacggcgaggcguacaccgacaccuaccacuccuacgccaagaacauccugcggacgcaggagagcgccugcaacugcaucgggggcgacugcuaccugaugaucaccgacggccccgccagcgggaucuccgagugccgcuuccucaagauccgggagggccgcaucaucaaggagaucuuccccaccgggcgggugaagcacaccgaggagugcacgugcggcuucgccagcaacaagaccaucgagugcgcgugccgcgacaacuccuacaccgccaagcggcccuucgugaagcugaacgucgagaccgacacggccgagauccgccugaugugcaccgagaccuaccucgacaccccgcggcccaacgacgggagcaucacgggccccugcgaguccgacggcgacaaggggagcggcgggaucaagggcggguucgugcaccagcgcauggccuccaagaucggccggugguacagccgcaccauguccaagaccaagcggaugggcauggggcuguacgugaaguacgacggcgaccccuggaccgacagcgaggcccuggcgcucuccggggucauggugagcauggaggagccgggcugguacuccuucggguucgagaucaaggacaagaagugcgacgugcccugcaucggcaucgagaugguccacgacggcgggaagacgaccuggcacagcgccgccaccgccaucuacugccugaugggcuccgggcagcugcucugggacaccgugacgggcguggacauggcccuguga

SEQ ID NO: 92867 - RNA, 1401 nt, Artificial Sequence; identical to SEQ ID NO: 92706
  derived and/or modified CDS sequence (opt1) from neuraminidase__InfluenzaB__AEO80090

SEQ ID NO: 92868 - RNA, 1401 nt, Artificial Sequence; identical to SEQ ID NO: 92651
  derived and/or modified CDS sequence (opt1) from neuraminidase__InfluenzaB__AEO80101

SEQ ID NO: 92869 - RNA, 1401 nt, Artificial Sequence; identical to SEQ ID NO: 92747
  derived and/or modified CDS sequence (opt1) from neuraminidase__InfluenzaB__AEO80149

SEQ ID NO: 92870 - RNA, 1401 nt, Artificial Sequence; identical to SEQ ID NO: 92659
  derived and/or modified CDS sequence (opt1) from neuraminidase__InfluenzaB__AEO80158

SEQ ID NO: 92871 - RNA, 1401 nt, Artificial Sequence; identical to SEQ ID NO: 92659
  derived and/or modified CDS sequence (opt1) from neuraminidase__InfluenzaB__AEO80167

SEQ ID NO: 92872 - RNA, 1401 nt, Artificial Sequence; identical to SEQ ID NO: 92747
  derived and/or modified CDS sequence (opt1) from neuraminidase__InfluenzaB__AEO80176

SEQ ID NO: 92873 - RNA, 1401 nt, Artificial Sequence
  derived and/or modified CDS sequence (opt1) from neuraminidase__InfluenzaB__AEO80187
augcugcccagcaccauccagacccucacgcuguuccugaccuccggcggggugcuccugagccuguacgucuccgccagccucuccuaccugcuguacagcgacauccuccugaaguucuccccgaccgagaucaccgcccccacgaugccccugggcugcgcgaacgccagcaacgugcaggccgugaaccgcuccgccaccaagggggucacccuccugcugcccgagccggaguggaccuacccccggcucagcugccccggcuccacguuccagaaggcccugcugaucagcccccaccgcuucggggagaccaagggcaacuccgcgccgcucaucauccgggagcccuucaucgccugcggccccaacgagugcaagcacuucgcccugacccacuacgccgcgcagcccgggggcuacuacaacgggacccgcggcgaccggaacaagcugcgccaccucaucagcgugaagcuggggaagaucccgacgguggagaacuccaucuuccacauggccgccuggagcggcuccgccugccacgacggcaaggaguggaccuacaucggggucgacggccccgacaacaacgcccugcucaagaucaaguacggggaggcguacaccgacaccuaccacagcuacgccaacaagauccugcggacgcaggaguccgccugcaacugcaucggcggcaacugcuaccugaugaucaccgacgggagcgccagcggcguguccgagugccgcuuccucaagauccgggaggggcgcaucaucaaggagaucuuccccaccggccgggugaagcacaccgaggagugcacgugcggguucgccagcaacaagaccaucgagugcgcgugccgcgacaacuccuacaccgccaagcggcccuucgucaagcugaacguggagaccgacacggccgagauccgccugaugugcaccgacaccuaccucgacaccccgcggcccgacgacggcagcaucacgggccccugcgaguccaacggggaccgcggcagcgggggcaucaagggcggguucgugcaccagcggauggccuccaagaucggccgcugguacagccggaccauguccaagaccgagcgcauggggaugggccuguacgucaaguacgacggggaccccugggccgacagcgacgcgcuggccuucuccggcgugauggugagcaugaaggagccggggugguacuccuucggcuucgagaucaaggacaagaagugcgacguccccugcaucggcaucgagauggugcacgacgggggcaaggagaccuggcacagcgccgccacggccaucuacugccucaugggguccggccagcugcugugggacaccgugaccggcgucgacauggcgcucuga

SEQ ID NO: 92874 - RNA, 1401 nt, Artificial Sequence
  derived and/or modified CDS sequence (opt1) from neuraminidase__InfluenzaB__AEO80198
augcugcccagcaccauccagacccucacgcuguuccugaccuccggcggggugcuccugagccuguacgucuccgccagccucuccuaccugcuguacagcgacauccuccugaaguucuccccgaccgagaucaccgcccccacgaugccccuggacugcgcgaacgccagcaacgugcaggccgugaaccgguccgccaccaagggcgucacccuccugcugcccgagccggaguggaccuacccccggcucagcugccccggguccacguuccagaaggcccugcugaucagcccccaccgcuucggcgagaccaaggggaacuccgcgccgcucaucauccgggagcccuucaucgccugcggccccaacgagugcaagcacuucgcccugacccacuacgccgcgcagcccggcggguacuacaacggcacccgcggggaccggaacaagcugcgccaccucaucagcgugaagcugggcaagaucccgacgguggagaacuccaucuuccacauggccgccuggagcggguccgccugccacgacggcaaggaguggaccuacaucggcgucgacgggcccgacaacaacgcccugcucaagaucaaguacggcgaggcguacaccgacaccuaccacagcuacgccaacaagauccugcggacgcaggaguccgccugcaacugcaucgggggcaacugcuaccugaugaucaccgacggcagcgccagcgggguguccgagugccgcuuccucaagauccgggagggccgcaucaucaaggagaucuuccccaccgggcgggugaagcacaccgaggagugcacgugcggcuucgccagcaacaagaccaucgagugcgcgugccgcgacaacuccuacaccgccaagcggcccuucgucaagcugaacguggagaccgacacggccgagauccgccugaugugcaccgacaccuaccucgacaccccgcggcccgacgacgggagcaucacgggccccugcgaguccaacggcgaccgcgggagcggcgggaucaagggcggguucgugcaccagcggauggccuccaagaucggccgcugguacagccggaccauguccaagaccgagcgcaugggcauggggcuguacgucaaguacgacggcgaccccugggccgacagcgacgcgcuggccuuccgcggggugaugguguccaugaaggagccgggcugguacagcuucggguucgagaucaaggacaagaagugcgacguccccugcaucggcaucgagauggugcacgacggcgggaaggagaccuggcacuccgccgccacggccaucuacugccucaugggcagcgggcagcugcugugggacaccgugaccggcgucgacauggcgcucuga

SEQ ID NO: 92875 - RNA, 1401 nt, Artificial Sequence; identical to SEQ ID NO: 92815
  derived and/or modified CDS sequence (opt1) from neuraminidase__InfluenzaB__AEO80209

SEQ ID NO: 92876 - RNA, 1401 nt, Artificial Sequence
  derived and/or modified CDS sequence (opt1) from neuraminidase__InfluenzaB__AEO80220
augcugcccagcaccauccagacccucacgcuguuccugaccuccggcggggugcuccugagccuguacgucuccgccagccucuccuaccugcuguacagcgacauccuccugaaguucuccccgaccgagaucaccgcccccacgaugccccuggacugcgcgaacgccagcaacgugcaggccgugaaccgcuccgccaccaagggccucacccugcugcuccccgagccggaguggaccuacccccggcugagcugccccggguccacguuccagaaggcccugcucaucagcccccaccgcuucggcgagaccaaggggaacuccgcgccgcugaucauccgggagcccuucaucgccugcggccccaacgagugcaagcacuucgcccugacccacuacgccgcgcagcccggcggguacuacaacggcacccgcggggaccggaacaagcuccgccaccugaucagcgucaagcugggcaagaucccgacgguggagaccuccaucuuccacauggccgccuggagcggguccgccugccacgacggcaaggaguggaccuacaucggcguggacgggcccgacaacaacgcccuccugaagaucaaguacggcgaggcguacaccgacacguaccacagcuacgccaacaagauccugcggacccaggaguccgccugcaacugcaucgggggcaacugcuaccucaugaucaccgacggcagcgccagcggggucuccgagugccgcuuccugaagauccgggagggccgcaucaucaaggagaucuuccccaccgggcgggugaagcacacggaggagugcacgugcggcuucgccagcaacaagaccaucgagugcgcgugccgcgacaacuccuacaccgccaagcggcccuucgugaagcugaacgucgagaccgacaccgccgagauccgccucaugugcaccgacaccuaccuggacacgccgcggcccgacgacgggagcaucaccggccccugcgaguccaacggcgaccgcgggagcggcgggaucaagggcggguucgugcaccagcggauggccuccaagaucggccgcugguacagccggaccauguccaagaccgagcgcaugggcauggggcuguacgugaaguacgacggcgaccccugggccgacagcgacgcgcucgccuucuccggggucauggugagcaugaaggagccgggcugguacuccuucggguucgagaucaaggacaagaagugcgacgugcccugcaucggcaucgagaugguccacgacggcgggaaggagacguggcacagcgccgccaccgccaucuacugccugaugggcuccgggcagcugcucugggacaccgugaccggcguggacauggcgcuguga

SEQ ID NO: 92877 - RNA, 1401 nt, Artificial Sequence; identical to SEQ ID NO: 92812
  derived and/or modified CDS sequence (opt1) from neuraminidase__InfluenzaB__AEO80231

SEQ ID NO: 92878 - RNA, 1401 nt, Artificial Sequence; identical to SEQ ID NO: 92815
  derived and/or modified CDS sequence (opt1) from neuraminidase__InfluenzaB__AEO80242

SEQ ID NO: 92879 - RNA, 1401 nt, Artificial Sequence; identical to SEQ ID NO: 92659
  derived and/or modified CDS sequence (opt1) from neuraminidase__InfluenzaB__AEP20182

SEQ ID NO: 92880 - RNA, 1401 nt, Artificial Sequence
  derived and/or modified CDS sequence (opt1) from neuraminidase__InfluenzaB__AEP20193
augcugcccagcaccauccagacccucacgcuguuccugaccuccggcggggugcuccugagccuguacgucuccgccagccucuccuaccugcuguacagcgacauccuccugaaguucuccccgaccgagaucaccgcccccacgaugccccuggacugcgcgaacgccagcaacgugcacgccgugaaccgcuccgccaccaagggcgucacccuccugcugcccgagccggaguggaccuacccccggcucagcugccccggguccacguuccagaaggcccugcugaucagcccccaccgcuucggcgagaccaaggggaacuccgcgccgcucaucauccgggagcccuucaucgccugcggccccaacgagugcaagcacuucgcccugacccacuacgccgcgcagcccggcggguacuacaacggcacccgcggggaccggaacaagcugcgccaccucaucagcgugaagcugggcaagaucccgacgguggagaacuccaucuuccacauggccgccuggagcggguccgccugccacgacggcaaggaguggaccuacaucggcgucgacgggcccgacaacaacgcccugcucaagaucaaguacggcgaggcguacaccgacaccuaccacagcuacgccaacaacauccugcggacgcaggaguccgccugcaacugcaucgggggcaacugcuaccugaugaucaccgacggcagcgccagcgggguguccgagugccgcuuccucaagauccgggagggccgcaucaucaaggagaucuuccccaccgggcgggugaagcacaccgaggagugcacgugcggcuucgccagcaacaagaccaucgagugcgcgugccgcgacaacuccuacaccgccaagcggcccuucgucaagcugaacguggagaccgacacggccgagauccgccugaugugcaccgacaccuaccucgacaccccgcggcccgacgacgggagcaucacgggccccugcgaguccaacggcgacaaggggagcggcgggaucaagggcggguucgugcaccagcgcauggccuccaagaucggccggugguacagccgcaccauguccaagaccgagcggaugggcauggggcuguacgucaaguacgacggcgaccccugggccgacagcgacgcgcuggccuucuccggggugauggugagcgucaaggagccgggcugguacuccuucggguucgagaucaaggacaagaagugcgacgugcccugcaucggcaucgagauggugcacgacggcgggaaggagaccuggcacagcgccgccacggccaucuacugccucaugggcuccgggcagcugcugugggacaccgucaccggcguggacauggcgcucuga

SEQ ID NO: 92881 - RNA, 1401 nt, Artificial Sequence
  derived and/or modified CDS sequence (opt1) from neuraminidase__InfluenzaB__AEP20204
augcugcccagcaccauccagacccucacgcuguuccugaccuccggcggggugcuccugagccuguacgucuccgccagccucuccuaccugcuguacagcgacauccuccugaaguucuccccgaccgagaucaccgcccccacgaugccccuggacugcgcgaacgccagcaacgugcaggccgugaaccgcuccgccaccaagggcgucacccuccugcugcccgagccggaguggaccuacccccggcucagcugccccggguccacguuccagaaggcccugcugaucagcccccaccgcuucggcgagaccaaggggaacuccgcgccgcucaucauccgggagcccuucaucgccugcggccccaacgagugcaagcacuucgcccugacccacuacgccgcgcagcccggcggguacuacaacggcacccgcggggaccggaacaagcugcgccaccucaucagcgugaagcugggcaagaucccgacgguggagaacuccaucuuccacauggccgccuggagcggguccgccugccacgacggcaaggaguggaccuacaucggcgucgacgggcccgacaacaacgcccugcucaagaucaaguacggcgaggcguacaccgacaccuaccacagcuacgccaacaagauccugcggacgcaggaguccgccugcaacugcaucgggggcaacugcuaccugaugaucaccgacggcagcgccagcgggguguccgagugccgcuuccucaagauccgggagggccgcaucaucaaggagaucuuccccaccgggcgggugaagcacaccgaggagugcacgugcggcuucgccagcaacaagaccaucgagugcgcgugccgcgacaacuccuacaccgccaagcggcccuucgucaagcugaacguggagaccgacacggccgagauccgccugaugugcaccgacaccuaccucgacaccccgcggcccgacgacgggagcaucacgggccccugcgaguccaacggcgacaaggggagcggcgggaucaagggcggguucgugcaccagcgcauggccuccaagaucggccggugguacagccgcaccauguccaagaccgagcggaugggcauggggcuguacgucaaguacgacggcgaccccugggccgacagcgacgcgcuggccuucuccggggugauggugagcaucaaggagccgggcugguacuccuucggguucgagaucaaggacaagaagugcgacguccccugcaucggcaucgagauggugcacgacggcgggaaggagaccuggcacagcgccgccacggccaucuacugccucaugggcuccgggcagcugcugugggacaccgugaccggcgucgacauggcgcucuga

SEQ ID NO: 92882 - RNA, 1401 nt, Artificial Sequence; identical to SEQ ID NO: 92711
  derived and/or modified CDS sequence (opt1) from neuraminidase__InfluenzaB__AEP20215

SEQ ID NO: 92883 - RNA, 1401 nt, Artificial Sequence
  derived and/or modified CDS sequence (opt1) from neuraminidase__InfluenzaB__AEP20237
augcugcccagcaccauccagacccucacgcuguuccugaccuccggcggggugcuccugagccuguacgucuccgccagccucuccuaccugcuguacagcgacauccuccugaaguucuccccgaccgagaucaccgcccccacgaugccccuggacugcgcgaacgccagcaacgugcaggccgugaaccgcuccgccaccaagggcgucacccuccugcugcccgagccggaguggaccuacccccggcucagcugccccggguccacguuccagaaggcccugcugaucagcccccaccgcuucggcgagaccaaggggaacuccgcgccgcucaucauccgggagcccuucaucgccugcggccccaaggagugcaagcacuucgcccugacccacuacgccgcgcagcccggcggguacuacaacggcacccgcggggaccggaacaagcugcgccaccucaucagcgugaagcugggcaagaucccgacgguggagaacuccaucuuccacauggccgccuggagcggguccgccugccacgacggcaaggaguggaccuacaucggcgucgacgggcccgacagcaacgcccugcucaagaucaaguacggcgaggcguacaccgacaccuaccacuccuacgccaacaacauccugcggacgcaggagagcgccugcaacugcaucgggggcaacugcuaccugaugaucaccgacggcagcgccuccgggaucagcgagugccgcuuccucaagauccgggagggccgcaucaucaaggagaucuuccccaccgggcgggugaagcacaccgaggagugcacgugcggcuucgccuccaacaagaccaucgagugcgcgugccgcgacaacagcuacaccgccaagcggcccuucgugaagcugaacgucgagaccgacgccgccgagauccgccugaugugcacggagaccuaccucgacaccccgcggcccgacgacggguccaucaccggccccugcgagagcaacggcgacaagggguccggcgggaucaagggcggguucgugcaccagcgcauggccagcaagaucggccggugguacucccgcacgaugagcaagaccaagcggaugggcauggggcuguacgugaaguacgacggcgaccccuggaccgacuccgacgcgcuggcccucagcggggucaugguguccauggaggagccgggcugguacagcuucggguucgagaucaaggacaagaagugcgacgugcccugcaucggcaucgagaugguccacgacggcgggaaggagaccuggcacuccgccgccacggccaucuacugccugaugggcagcgggcagcugcucugggacaccgugaccggcguggacauggcgcuguga

SEQ ID NO: 92884 - RNA, 1401 nt, Artificial Sequence; identical to SEQ ID NO: 92711
  derived and/or modified CDS sequence (opt1) from neuraminidase__InfluenzaB__AEP20248

SEQ ID NO: 92885 - RNA, 1401 nt, Artificial Sequence
  derived and/or modified CDS sequence (opt1) from neuraminidase__InfluenzaB__AEP20259
augcugcccagcaccauccagacccucacgcuguuccugaccuccggcggggugcuccugagccuguacgucuccgccagccucuccuaccugcuguacagcgacauccuccugaaguucuccccgaccgagaucaccgcccccacgaugccccuggacugcgcgaacgccagcaacgugcaggccgugaaccgcuccgccaccaagggcgucacccuccugcugcccgagccggaguggaccuacccccggcucagcugccccggguccacguuccagaaggcccugcugaucagcccccaccgcuucggcgagaccaaggggaacuccgcgccgcucaucauccgggagcccuucaucgccugcggccccaacgagugcaagcacuucgcccugacccacuacgccgcgcagcccggcggguacuacaacggcacccgcggggaccggaacaagcugcgccaccucaucagcgugaagcugggcaagaucccgacgguggagaacuccaucuuccacauggccgccuggagcggguccgccugccacgacggcaaggaguggaccuacaucggcgucgacgggcccgacaacaacgcccugcucaagaucaaguacggcgaggcguacaccgacaccuaccacagcuacgccaacaacauccugcggacgcaggaguccgccugcaacugcaucgggggcaacugcuaccugaugaucaccgacggcagcgccagcgggguguccgagugccgcuuccucaagauccgggagggccgcaucaucaaggagaucuuccccaccgggcgggugaagcacaccgaggagugcacgugcggcuucgccagcaacaagaucaucgagugcgcgugccgcgacaacuccuacaccgccaagcggcccuucgucaagcugaacguggagaccgacaccgccgagauccgccugaugugcacggagaccuaccucgacaccccgcggcccgacgacgggagcaucaccggccccugcgaguccaacggcgacaaggggagcggcgggaucaagggcggguucgugcaccagcgcauggccuccaagaucggccggugguacagccgcacgauguccaagaccgagcggaugggcauggggcuguacgucaaguacgacggcgaccccugggccgacagcgacgcgcuggcccucuccggggugauggugagcauggaggagccgggcugguacuccuucggguucgagaucaaggacaagaagugcgacguccccugcaucggcaucgagauggugcacgacggcgggaaggagaccuggcacagcgccgccaccgccaucuacugccugaugggcuccgggcagcugcucugggacacggugaccggcgucgacauggcgcuguga

SEQ ID NO: 92886 - RNA, 1401 nt, Artificial Sequence
  derived and/or modified CDS sequence (opt1) from neuraminidase__InfluenzaB__AEP20281
augcugcccagcaccauccagacccucacgcuguuccugaccuccggcggggugcuccugagccuguacgucuccgccagccucuccuaccugcuguacagcgacauccuccugaaguucuccccgaccgagaucaccgcccccacgaugccccuggacugcgcgaacgccagcaacgugcaggccgugaaccgcuccaccaccaagggcgucacccuccugcugcccgagccggaguggacguacccccggcucagcugccccggguccaccuuccagaaggcccugcugaucagcccccaccgcuucggcgagaccaaggggaacuccgccccgcucaucauccgggagcccuucaucgcgugcggccccaacgagugcaagcacuucgcccugacccacuacgccgcccagcccggcggguacuacaacggcacgcgcggggaccggaacaagcugcgccaccucaucagcgugaagcugggcaagaucccgaccguggagaacuccaucuuccacauggcggccuggagcggguccgccugccacgacggcaaggaguggaccuacaucggcgucgacgggcccgacaacaacgcccugcucaagaucaaguacggcgaggccuacaccgacacguaccacagcuacgcgaacaacauccugcggacccaggaguccgccugcaacugcaucgggggcaacugcuaccugaugaucaccgacggcagcgccagcgggguguccgagugccgcuuccucaagauccgggagggccgcaucaucaaggagaucuuccccaccgggcgggugaagcacacggaggagugcacgugcggcuucgccagcaacaagaccaucgagugcgccugccgcgacaacuccuacaccgcgaagcggcccuucgucaagcugaacguggagaccgacaccgccgagauccgccugaugugcaccgagaccuaccucgacacgccgcggcccgacgacgggagcaucaccggccccugcgaguccaacggcgacaaggggagcggcgggaucaagggcggguucgugcaccagcgcauggccuccaagaucggccggugguacagccgcaccauguccaagaccgagcggaugggcauggggcuguacgucaaguacgacggcgaccccugggccgacagcgacgcccuggcgcucuccggggugauggugagcauggaggagccgggcugguacuccuucggguucgagaucaaggacaagaagugcgacguccccugcaucggcaucgagauggugcacgacggcgggaaggagacguggcacagcgccgccaccgccaucuacugccugaugggcuccgggcagcugcucugggacaccgugaccggcgucgacauggcccuguga

SEQ ID NO: 92887 - RNA, 1401 nt, Artificial Sequence; identical to SEQ ID NO: 92659
  derived and/or modified CDS sequence (opt1) from neuraminidase__InfluenzaB__AEP20292

SEQ ID NO: 92888 - RNA, 1401 nt, Artificial Sequence; identical to SEQ ID NO: 92651
  derived and/or modified CDS sequence (opt1) from neuraminidase__InfluenzaB__AEP20303

SEQ ID NO: 92889 - RNA, 1401 nt, Artificial Sequence
  derived and/or modified CDS sequence (opt1) from neuraminidase__InfluenzaB__AEP20314
augcugcccagcaccauccagacccucacgcuguuccugaccuccggcggggugcuccugagccuguacgucuccgccagccucuccuaccugcuguacagcgacauccuccugaaguucucccagaccggcaucaccgccccgaucaugccccuggacugcgcgaacgccagcaacgugcaggccgugaaccgcuccgccacgaagggggucacccuccugcugcccgagcccgaguggaccuacccgcggcucagcugccccggcuccaccuuccagaaggcccugcugaucagcccccaccgcuucggggagacgaagggcaacuccgcgccccucaucauccgggagccguucaucgccugcggccccaaggagugcaagcacuucgcccugacccacuacgccgcgcagcccgggggcuacuacaacgggacccgcgaggaccggaacaagcugcgccaccucaucagcgugaagcugggcaagauccccaccguggagaacuccaucuuccacauggccgccuggagcggguccgccugccacgacggccgggaguggacguacaucggcgucgacgggccggacagcaacgcccugcucaagaucaaguacggcgaggcguacaccgacaccuaccacuccuacgccaagaacauccugcgcacccaggagagcgccugcaacugcaucgggggcgacugcuaccugaugaucacggacggccccgccagcgggaucuccgagugccgguuccucaagauccgcgagggccggaucaucaaggagaucuuccccaccgggcgcgugaagcacaccgaggagugcacgugcggcuucgccagcaacaagaccaucgagugcgcgugccgggacaacuccuacaccgccaagcgccccuucgugaagcugaacgucgagaccgacaccgccgagauccggcugaugugcacggagaccuaccucgacaccccgcgccccaacgacgggagcaucaccggccccugcgaguccaacggcgacaaggggagcggcgggaucaagggcggguucgugcaccagcggauggccuccaagaucggccgcugguacagccggacgauguccaagaccaagcgcaugggcauggggcuguacgugaaguacgacggcgaccccuggaccgacagcgaggcccuggcgcucuccggggucaugaucagcauggaggagccgggcugguacuccuucggguucgagaucaaggacaagaagugcgacgugcccugcaucggcaucgagauggugcacgacggcgggaagaccacguggcacagcgccgccaccgccaucuacugccugaugggcuccgggcagcugcucugggacaccgucaccggcguggacauggcccuguga

SEQ ID NO: 92890 - RNA, 1401 nt, Artificial Sequence
  derived and/or modified CDS sequence (opt1) from neuraminidase__InfluenzaB__AEP20336
augcugcccagcaccauccagacccucacgcuguuccugaccuccggcggggugcuccugagccuguacgucuccgccagccucuccuaccugcuguacagcgacauccuccugaaguucuccccgaccgagaucaccgcccccacgaugccccuggacugcgcgaacgccagcaacgugcaggccgugaaccgcuccgccaccaagggcgucacccuccugcugcccgagccggaguggaccuacccccggcucagcugccccggguccacguuccagaaggcccugcugaucagcccccaccgcuucggcgagaccaaggggaacuccgcgccgcucaucauccgggagcccuucaucgccugcggccccaacgagugcaagcacuucgcccugacccacuacgccgcgcagcccggcggguacuacaacggcacccgcggggaccggaacaagcugcgccaccucaucagcgugaagcugggcaagaucccgacgguggagaacuccaucuuccacauggccgccuggagcggguccgccugccacgacggcaaggaguggaccuacaucggcgucgacgggcccgacaacaacgcccugcucaagaucaaguacggcgaggcguacaccgacaccuaccacagcuacgccaacaacauccugcggacgcaggaguccgccugcaacugcaucgggggcaacugcuaccugaugaucaccgacggcagcgccagcgggguguccgagugccgcuuccucaagauccgggagggccgcaucaucaaggagaucuuccccaccgggcgggugaagcacaccgaggagugcacgugcggcuucgccagcaacaagaccaucgagugcgcgugccgcgacaacuccuacaccgccaagcggcccuucgucaagcugaacguggagaccgacacggccgagauccgccugaugugcaccgagaccuaccucgacaccccgcggcccgacgacgggagcaucacgggccccugcgaguccaacggcgacaaggggagcggcgggaucaagggcggguucgugcaccagcgcauggccuccaagaucggccggugguacagccgcaccauguccaagaccgagcggaugggcauggggcuguacgucaaguacgacggcgaccccugggccgacagcgacgcgcugacccucuccggggugauggugagcauggaggagccgggcugguacuccuucggguucgagaucaaggacaagaagugcgacguccccugcaucggcaucgagauggugcacgacggcgggaaggagacguggcacagcgccgccaccuccaucuacugccugaugggcagcgggcagcugcucugggacaccgugaccggcgucgacauggcccuguga

SEQ ID NO: 92891 - RNA, 1401 nt, Artificial Sequence
  derived and/or modified CDS sequence (opt1) from neuraminidase__InfluenzaB__AEP20347
augcugcccagcaccauccagacccucacgcuguuccugaccuccggcggggugcuccugagccuguacgucuccgccagccucuccuaccugcuguacagcgacauccuccugaaguucucccagaccgagaucaccgccccgaucaugccccuggacugcgcgaacgccagcaacgugcaggccgugaaccgcuccgccacgaagggcgucacccuccugcugcccgagcccgaguggaccuacccgcggcucagcugccccggguccaccuuccagaaggcccugcugaucagcccccaccgcuucggcgagacgaaggggaacuccgcgccccucaucauccgggagccguucaucgccugcggccccaccgagugcaagcacuucgcccugacccacuacgccgcgcagcccggcggguacuacaacggcacccgcgaggaccggaacaagcugcgccaccucaucagcgugaagcuggggaagauccccacgguggagaacuccaucuuccacauggccgccuggagcggcuccgccugccacgacgggaaggaguggaccuacaucggcgucgacggcccggacagcaacgcccugcucaagaucaaguacggggaggcguacaccgacaccuaccacuccuacgccaagaacauccugcggacgcaggagagcgccugcaacugcaucggcggggacugcuaccugaugaucaccgacggccccgccagcggcaucuccgagugccgcuuccucaagauccgggaggggcgcaucaucaaggagaucuuccccaccggccgggugaagcacaccgaggagugcacgugcggguucgccagcaacaagaccaucgagugcgcgugccgcgacaacuccuacaccgccaagcggcccuucgugaagcugaacgucgagaccgacacggccgagauccgccugaugugcaccgagaccuaccucgacaccccgcggcccaacgacggcagcaucacggggcccugcgaguccgacggcgacaagggcagcgggggcaucaagggcggguucgugcaccagcgcauggccuccaagaucgggcggugguacagccgcaccauguccaagaccaagcggaugggcaugggccuguacgugaaguacgacggggaccccuggaccgacagcgaggcccuggcgcucuccggcgucauggugccgauggaggagcccgggugguacagcuucggcuucgagaucaaggacaagaagugcgacgugcccugcaucgggaucgagaugguccacgacggcggcaagacgaccuggcacuccgccgccaccgccaucuacugccugauggggagcggccagcugcucugggacaccgugacggggguggacauggcccuguga

SEQ ID NO: 92892 - RNA, 1401 nt, Artificial Sequence; identical to SEQ ID NO: 92891
  derived and/or modified CDS sequence (opt1) from neuraminidase__InfluenzaB__AEP20358

SEQ ID NO: 92893 - RNA, 1401 nt, Artificial Sequence; identical to SEQ ID NO: 92891
  derived and/or modified CDS sequence (opt1) from neuraminidase__InfluenzaB__AEP20369

SEQ ID NO: 92894 - RNA, 1401 nt, Artificial Sequence; identical to SEQ ID NO: 92891
  derived and/or modified CDS sequence (opt1) from neuraminidase__InfluenzaB__AEP20380

SEQ ID NO: 92895 - RNA, 1401 nt, Artificial Sequence
  derived and/or modified CDS sequence (opt1) from neuraminidase__InfluenzaB__AEP20391
augcugcccagcaccauccagacccucacgcuguuccugaccuccggcggggugcuccugagccuguacgucuccgccagccucuccuaccugcuguacagcgacauccuccugaaguucuccccgaccgagaucaccgcccccacgaugccccuggacugcgcgaacgccagcaacgugcaggccgugaaccgcuccgccaccaagggcgucacccuccugcugcccgagccggaguggaccuacccccggcucagcugccccggguccacguuccagaaggcccugcugaucagcccccaccgcuucggcgagaccaaggggaacuccgcgccgcucaucauccgggagcccuucaucgccugcggccccaacgagugcaagcacuucgcccugacccacuacgccgcgcagcccggcggguacuacaacggcacccgcggggaccggaaccgccugcggcaccucaucagcgugaagcugggcaagaucccgacgguggagaacuccaucuuccacauggccgccuggagcggguccgccugccacgacggcaaggaguggaccuacaucggcgucgacgggcccgacaacaacgcccugcucaagaucaaguacggcgaggcguacaccgacaccuaccacagcuacgccaacaacauccugcgcacgcaggaguccgccugcaacugcaucgggggcaacugcuaccugaugaucaccgacggcagcgccagcgggguguccgagugccgguuccucaagauccgcgagggccggaucaucaaggagaucuuccccaccgggcgcgugaagcacaccgaggagugcacgugcggcuucgccagcaacaagaccaucgagugcgcgugccgggacaacuccuacaccgccaagcgccccuucgucaagcugaacguggagaccgacacggccgagauccggcugaugugcaccgacaccuaccucgacaccccgcgccccgacgacgggagcaucacgggccccugcgaguccaacggcgacaaggggagcggcgggaucaagggcggguucgugcaccagcggauggccuccaaggucggccgcugguacagccggaccauguccaagaccgagcgcaugggcauggggcuguacgugaaguacgacggcgaccccugggccgacagcgacgcgcuggccuucuccggggugauggucagcaugaaggagccgggcugguacuccuucggguucgagaucaaggacaagaagugcgacgugcccugcaucggcaucgagauggugcacgacggcgggaaggagaccuggcacagcgccgccacggccaucuacugccucaugggcuccgggcagcugcugugggacaccgucaccggcguggacauggcgcucuga

SEQ ID NO: 92896 - RNA, 1401 nt, Artificial Sequence
  derived and/or modified CDS sequence (opt1) from neuraminidase__InfluenzaB__AEP20413
augcugcccagcaccauccagacccucacgcuguuccugaccuccggcggggugcuccugagccuguacgucuccgcccuccugagcuaccugcucuacuccgacauccugcugaaguucagcccgaccgagaucaucgcccccaccaugucccucgacugcgcgaacgccagcaacgugcaggccgugaaccgcuccgccacgaagggcgucaccuuccugcugcccgagcccgaguggaccuacccgcggcucagcugccccggguccaccuuccagaaggcccugcugaucagcccccaccgcuucggcgagacgaaggggaacuccgcgccccucaucauccgggagccguucaucgccugcggccccaacgagugcaagcacuucgcccugacccacuacgccgcgcagcccggcggguacuacaacggcacccgcggggaccggaacaagcugcgccaccucaucagcgugaagcugggcaagauccccaccguggagaacuccaucuuccacauggccgccuggagcggguccgccugccacgacggcaaggaguggacguacaucggcgucgacgggccggacaacgacgcccugcucaaggugaaguacggcgaggcguacaccgacaccuaccacagcuacgccaacaagauccugcggacccaggaguccgccugcaacugcaucgggggcaacugcuaccugaugaucacggacggcagcgccagcgggguguccgagugccgcuuccucaagauccgggagggccgcaucaucaaggagaucuuccccaccgggcgggucaagcacaccgaggagugcacgugcggcuucgccagcaacaagaccaucgagugcgcgugccgcgacaacuccuacaccgccaagcggcccuucgugaagcugaacguggagaccgacaccgccgagauccgccugaugugcacggacaccuaccucgacacgccccggccggacgacgggagcaucaccggccccugcgaguccaacggcgacaaggggagcggcgggaucaagggcggguucguccaccagcgcauggaguccaagaucggccggugguacagccgcaccauguccaagaccgagcggaugggcauggggcuguacgugaaguacaacggcgaccccugggccgacagcgacgcccuggcguucuccggggugauggucagcaugaaggagcccggcugguacuccuucggguucgagaucaaggacaagaagugcgacgugccgugcaucggcaucgagauggugcacgacggcgggaaggagaccuggcacagcgccgccaccgccaucuacugccucaugggcuccgggcagcugcugugggacacggucaccggcguggacauggcccucuga

SEQ ID NO: 92897 - RNA, 1401 nt, Artificial Sequence; identical to SEQ ID NO: 92896
  derived and/or modified CDS sequence (opt1) from neuraminidase__InfluenzaB__AEP20435

SEQ ID NO: 92898 - RNA, 1401 nt, Artificial Sequence; identical to SEQ ID NO: 92891
  derived and/or modified CDS sequence (opt1) from neuraminidase__InfluenzaB__AEQ39031

SEQ ID NO: 92899 - RNA, 1401 nt, Artificial Sequence
  derived and/or modified CDS sequence (opt1) from neuraminidase__InfluenzaB__AEQ39275
augcugcccagcaccauccagacccucacgcuguuccugaccuccggcggggugcuccugagccuguacgucuccgccagccucuccuaccugcuguacagcgacauccuccugaaguucuccccgaaggagaucaccgcccccaccaugccccuggacugcgcgaacgccagcaacgugcaggccgugaaccacuccgccacgaagggcgucacccuccugcugcccgagccggaguggaccuacccccgccucagcugccccggguccaccuuccagaaggcccugcugaucagcccccaccgguucggcgagacgaaggggaacuccgcgccgcucaucauccgcgagcccuucaucgccugcggccccaacgagugcaagcacuucgcccugacccacuacgccgcgcagcccggcggguacuacaacggcacccgcggggaccggaacaagcugcggcaccucaucagcgugaagcugggcaagaucccgaccguggagaacuccaucuuccacauggccgccuggagcggguccgccugccacgacggcaaggaguggacguacaucggcgucgacgggcccgacaacaacgcccugcucaaggugaaguacggcgaggcguacaccgacaccuaccacagcuacgccaacaagauccugcgcacccaggaguccgccugcaacugcaucgggggcaacugcuaccugaugaucacggacggcagcgccagcgggguguccgagugccgguuccucaagauccgcgagggccggaucaucaaggagaucuuccccaccgggcgcgucaagcacaccgaggagugcacgugcggcuucgccagcaacaagaccaucgagugcgcgugccgggacaacuccuacaccgccaagcgccccuucgugaagcugaacguggagaccgacaccgccgagauccggcugaugugcacggacaccuaccucgacaccccgcgccccgacgacgggagcaucaccggccccugcgaguccaacggcgacaaggggagcggcgggaucaagggcggguucguccaccagcggauggaguccaagaucggccgcugguacagccggacgauguccaagaccgagcgcaugggcauggggcuguacgugaaguacgacggcgaccccugggccgacagcgacgcccuggcguucuccggggugauggucagcaugaaggagccgggcugguacuccuucggguucgagaucaaggacaagaagugcgacgugcccugcaucggcaucgagauggugcacgacggcgggaaggagaccuggcacagcgccgccaccgccaucuacugccucaugggcuccgggcagcugcugugggacacggucaccggcguggacauggcccucuga

SEQ ID NO: 92900 - RNA, 1401 nt, Artificial Sequence; identical to SEQ ID NO: 92899
  derived and/or modified CDS sequence (opt1) from neuraminidase__InfluenzaB__AEQ39286

SEQ ID NO: 92901 - RNA, 1401 nt, Artificial Sequence; identical to SEQ ID NO: 92899
  derived and/or modified CDS sequence (opt1) from neuraminidase__InfluenzaB__AEQ39297

SEQ ID NO: 92902 - RNA, 1401 nt, Artificial Sequence; identical to SEQ ID NO: 92899
  derived and/or modified CDS sequence (opt1) from neuraminidase__InfluenzaB__AEQ39308

SEQ ID NO: 92903 - RNA, 1401 nt, Artificial Sequence; identical to SEQ ID NO: 92899
  derived and/or modified CDS sequence (opt1) from neuraminidase__InfluenzaB__AEQ39319

SEQ ID NO: 92904 - RNA, 1401 nt, Artificial Sequence
  derived and/or modified CDS sequence (opt1) from neuraminidase__InfluenzaB__AEQ39330
augcugcccagcaccauccagacccucacgcuguuccugaccuccggcggggugcuccugagccuguacgucuccgccagccucuccuaccugcuguacagcgacauccuccugaaguucuccccgaaggagaucaccgcccccaccaugccccuggacugcgcgaacgccagcaacgugcaggccgugaaccacuccgccacgaagggcgucacccuccugcugcccgagccggaguggaccuacccccgccucagcugccccggguccaccuuccagaaggcccugcugaucagcccccaccgguucggcgagacgaaggggaacuccgcgccgcucaucauccgcgagcccuucaucgccugcggccccaacgagugcaagcacuucgcccugacccacuacgccgcgcagcccggcggguacuacaacggcacccgcggggaccggaacaagcugcggcaccucaucagcgugaagcugggcaagaucccgaccguggagaacuccaucuuccacauggccgccuggagcggguccgccugccacgacggcaaggaguggacguacaucggcgucgacgggcccgacaacaacgcccugcucaaggugaaguacggcgaggcguacaccgacaccuaccacagcuacgccaacaagauccugcgcacccaggaguccgccugcaacugcaucgggggcaacugcuaccugaugaucacggacggcagcgccagcgggguguccgagugccgguuccucaagauccgcgagggccggaucaucaaggagaucuuccccaccgggcgcgucaagcacaccgaggagugcacgugcggcuucgccagcaacaagaccaucgagugcgcgugccgggacaacuccuacaccgccaagcgccccuucgugaagcugaacguggagaccgacaccgccgagauccggcugaugugcacggacaccuaccucgacaccccgcgccccgacgacgggagcaucaccggccccugcgaguccaacggcgacaaggggagcggcgggaucaagggcggguucguccaccagcggauggaguccaagaucggccgcugguacagccggacgauguccaagaccgagcgcaugggcauggggcuguacgugaaguacgacggcgaccccugggccgacagcgacgcccuggcguucuccggggugauggucagcaugaaggagccgggcugguacuccuucggguucgagaucaaggacaagaagugcgacgugcccugcaucggcaucgagauggugcacgacggcgggaaggagaccuggcacagcgccgccaccgccaucuacugccucaugggcuccgggcagcugcugugggacacggucaccggcguggacaucgcccucuga

SEQ ID NO: 92905 - RNA, 1401 nt, Artificial Sequence; identical to SEQ ID NO: 92899
  derived and/or modified CDS sequence (opt1) from neuraminidase__InfluenzaB__AEQ39341

SEQ ID NO: 92906 - RNA, 1401 nt, Artificial Sequence; identical to SEQ ID NO: 92899
  derived and/or modified CDS sequence (opt1) from neuraminidase__InfluenzaB__AEQ39352

SEQ ID NO: 92907 - RNA, 1401 nt, Artificial Sequence; identical to SEQ ID NO: 92899
  derived and/or modified CDS sequence (opt1) from neuraminidase__InfluenzaB__AEQ39363

SEQ ID NO: 92908 - RNA, 1401 nt, Artificial Sequence; identical to SEQ ID NO: 92865
  derived and/or modified CDS sequence (opt1) from neuraminidase__InfluenzaB__AEQ39374

SEQ ID NO: 92909 - RNA, 1401 nt, Artificial Sequence
  derived and/or modified CDS sequence (opt1) from neuraminidase__InfluenzaB__AEQ39385
augcugcccagcaccauccagacccucacgcuguuccugaccuccggcggggugcuccugagccuguacgucuccgccagccucuccuaccugcuguacagcgacauccuccugaaguucuccccgaccgagaucaccgcccccacgaugccccuggacugcgcgaacgccagcaacgugcaggccgugaaccgcuccgccaccaagggcgucacccuccugcugcccgagccggaguggaccuacccccggcucagcugccccggguccacguuccagaaggcccugcugaucagcccccaccgcuucggcgagaccaaggggaacuccgcgccgcucaucauccgggagcccuucaucgccugcggccccaaggagugcaagcacuucgcccugacccacuacgccgcgcagcccggcggguacuacaacggcacccgcggggaccggaacaagcugcgccaccucaucagcgugaagcugggcaagaucccgacgguggagaacuccaucuuccacauggccgccuggagcggguccgccugccacgacggcaaggaguggaccuacaucggcgucgacgggcccgacagcaacgcccugcucaagaucaaguacggcgaggcguacaccgacaccuaccacuccuacgccaacaacauccugcggacgcaggagagcgccugcaacugcaucgggggcaacugcuaccugaugaucaccgacggcagcgccuccgggaucagcgagugccgcuuccucaagauccgggagggccgcaucaucaaggagaucuuccccaccgggcgggugaagcacaccgaggagugcacgugcggcuucgccuccaacaagaccaucgagugcgcgugccgcgacaacagcuacaccgccaagcggcccuucgugaagcugaacgucgagaccgacacggccgagauccgccugaugugcaccgagaccuaccucgacaccccgcggcccgacgacggguccaucacgggccccugcgagagcaacggcgacaagggguccggcgggaucaagggcggguucgugcaccagcgcaugaccagcaagaucggccggugguacucccgcaccaugagcaagaccaagcggaugggcauggggcuguacgugaaguacgacggcgaccccuggacggacuccgacgcccuggcccucagcggggucaugguguccauggaggagccgggcugguacagcuucggguucgagaucaaggacaagaagugcgacgugcccugcaucggcaucgagaugguccacgacggcgggaaggagaccuggcacuccgcggccaccgccaucuacugccugaugggcagcgggcagcugcucugggacaccgugacgggcguggacauggcccuguga

SEQ ID NO: 92910 - RNA, 1401 nt, Artificial Sequence
  derived and/or modified CDS sequence (opt1) from neuraminidase__InfluenzaB__AEQ39444
augcugcccagcaccauccagacccucacgcuguuccugaccuccggcggggugcuccugagccuguacgucuccgccagccucuccuaccugcuguacagcgacauccuccugaaguucucccagaccgagaucaucgccccgaucaugccccuggacugcgcgaacgccagcaacgugcaggccgugaaccgcuccgccaccaagggcgucacgcuccugcugcccgagcccgaguggaccuacccgcggcucagcugccccggguccaccuuccagaaggcccugcugaucagcccccaccgcuucggcgagaccaaggggaacuccgcgccccucaucauccgggagccguucaucgccugcggccccacggagugcaagcacuucgcccugacccacuacgccgcgcagcccggcggguacuacaacggcacccgcgaggaccggaacaagcugcgccaccucaucagcgugaagcuggggaagauccccaccguggagaacuccaucuuccacauggccgccuggagcggcuccgccugccacgacgggaaggaguggacguacaucggcgucgacggcccggacagcaacgcccugcucaagaucaaguacggggaggcguacaccgacaccuaccacuccuacgccaagaacauccugcggacccaggagagcgccugcaacugcaucggcggggacugcuaccugaugaucacggacggccccgccagcggcaucuccgagugccgcuuccucaagauccgggaggggcgcaucaucaaggagaucuuccccaccggccgggugaagcacaccgaggagugcacgugcggguucgccagcaacaagaccaucgagugcgcgugccgcgacaacuccuacaccgccaagcggcccuucgugaagcugaacgucgagaccgacaccgccgagauccgccugaugugcacggagaccuaccucgacaccccgcggcccaacgacggcagcaucaccgggcccugcgaguccgacggcgacaagggcagcgggggcaucaagggcggguucgugcaccagcgcauggccuccaagaucgggcggugguacagccgcacgauguccaagaccaagcggaugggcaugggccuguacgugaaguacgacggggaccccuggaccgacagcgaggcccuggcgcucuccggcgucauggugagcauggaggagccggggugguacuccuucggcuucgagaucaaggacaagaagugcgacgugcccugcaucgggaucgagaugguccacgacggcggcaagaccacguggcacagcgccgccaccgccaucuacugccugaugggguccggccagcugcucugggacaccgugaccgggguggacauggcccuguga

SEQ ID NO: 92911 - RNA, 1401 nt, Artificial Sequence; identical to SEQ ID NO: 92812
  derived and/or modified CDS sequence (opt1) from neuraminidase__InfluenzaB__AEQ39455

SEQ ID NO: 92912 - RNA, 1401 nt, Artificial Sequence
  derived and/or modified CDS sequence (opt1) from neuraminidase__InfluenzaB__AEQ39466
augcugcccagcaccauccagacccucacgcuguuccugaccuccggcggggugcuccugagccuguacgucuccgccagccucuccuaccugcuguacagcgacauccuccugaaguucuccccgaccgagaucaccgcccccacgaugccccuggacugcgcgaacgccagcaacgugcaggccgugaaccgcuccgccaccaagggcgucacccuccugcugcccgagccggaguggaccuacccccggcucagcugccccggguccacguuccagaaggcccugcugaucagcccccaccgcuucggcgagaccaaggggaacuccgcgccgcucaucauccgggagcccuucaucgccugcggccccaacgagugcaagcacuucgcccugacccacuacgccgcgcagcccggcggguacuacaacggcacccgcggggaccggaacaagcugcgccaccucaucagcgugaagcugggcaagaucccgacgguggagaacuccaucuuccacauggccgccuggagcggguccgccugccacgacggcaaggaguggaccuacaucggcgucgacgggcccgacaacaacgcccugcucaagaucaaguacggcgaggcguacaccgacaccuaccacagcuacgccaacaacauccugcggacgcaggaguccgccugcaacugcaucgggggcaacugcuaccugaugaucaccgacggcagcgccagcgggguguccgagugccgcuuccucaagauccgggagggccgcaucaucaaggagaucuuccccaccgggcgggugaagcacaccgaggagugcacgugcggcuucgccagcaacaagaccaucgagugcgcgugccgcgacaacuccuacaccgccaagcggcccuucgucaagcugaacguggagaccgacacggccgagauccgccugaugugcaccgacaccuaccucgacaccccgcggcccgacgacgggagcaucacgggccccugcgaguccaacggcgacaaggggagcggcgggaucaagggcggguucgugcaccagcgcauggccuccaaggucggccggugguacagccgcaccauguccaagaccgagcggaugggcauggggcuguacgugaaguacgacggcgaccccugggccgacagcgacgcgcuggccuucuccggggugauggucagcaugaaggagccgggcugguacuccuucggguucgagaucaaggacaagaagugcgacgugcccugcaucggcaucgagauggugcacgacggcgggaaggagaccuggcacagcgccgccacggccaucuacugccucaugggcuccgggcagcugcugugggacaccgucaccggcguggacauggcgcucuga

SEQ ID NO: 92913 - RNA, 1401 nt, Artificial Sequence; identical to SEQ ID NO: 92899
  derived and/or modified CDS sequence (opt1) from neuraminidase__InfluenzaB__AEQ39477

SEQ ID NO: 92914 - RNA, 1401 nt, Artificial Sequence
  derived and/or modified CDS sequence (opt1) from neuraminidase__InfluenzaB__AEQ39488
augcugcccagcaccauccagacccucacgcuguuccugaccuccggcggggugcuccugagccuguacgucuccgccagccucuccuaccugcuguacagcgacauccuccugaaguucuccccgaccgagaucaccgcccccacgaugccccuggacugcgcgaacgccagcaacgugcaggccgugaaccgcuccgccaccaagggcgucacccuccugcugcccgagccggaguggaccuacccccggcucagcugccccggguccacguuccagaaggcccugcugaucagcccccaccgcuucggcgagaccaaggggaacuccgcgccgcucaucauccgggagcccuucaucgccugcggccccaacgagugcaagcacuucgcccugacccacuacgccgcgcagcccggcggguacuacaacggcacccgcggggaccggaacaagcugcgccaccucaucagcgugaagcugggcaagaucccgacgguggagaacuccaucuuccacauggccgccuggagcggguccgccugccacgacggcaaggaguggaccuacaucggcgucgacgggcccgacaacaacgcccugcucaaggugaaguacggcgaggcguacaccgacaccuaccacagcuacgccaacaagauccugcggacgcaggaguccgccugcaacugcaucgggggcaacugcuaccugaugaucaccgacggcagcgccagcgggguguccgagugccgcuuccucaagauccgggagggccgcaucaucaaggagaucuuccccaccgggcgggucaagcacaccgaggagugcacgugcggcuucgccagcaacaagaccaucgagugcgcgugccgcgacaacuccuacaccgccaagcggcccuucgugaagcugaacguggagaccgacacggccgagauccgccugaugugcaccgacaccuaccucgacaccccgcggcccaacgacgggagcaucacgggccccugcgaguccaacggcgacaaggggagcggcgggaucaagggcggguucguccaccagcgcauggagucccggaucggccgcugguacagccggaccauguccaagaccgagcgcaugggcauggggcuguacgugaaguacgacggcgaccccuggaccgacagcgacgcccuggccuucuccggggugauggucagcaugaaggagccgggcugguacuccuucggguucgagaucaaggacaagaagugcgacgugcccugcaucggcaucgagauggugcacgacggcgggaaggagacguggcacagcgcggccaccgccaucuacugccucaugggcuccgggcagcugcugugggacaccgucaccggcguggacauggcccucuga

SEQ ID NO: 92915 - RNA, 1401 nt, Artificial Sequence; identical to SEQ ID NO: 92865
  derived and/or modified CDS sequence (opt1) from neuraminidase__InfluenzaB__AEQ39499

SEQ ID NO: 92916 - RNA, 1401 nt, Artificial Sequence; identical to SEQ ID NO: 92711
  derived and/or modified CDS sequence (opt1) from neuraminidase__InfluenzaB__AEQ39510

SEQ ID NO: 92917 - RNA, 1401 nt, Artificial Sequence
  derived and/or modified CDS sequence (opt1) from neuraminidase__InfluenzaB__AEQ49685
augcugcccagcaccauccagacccucacgcuguuccugaccuccggcggggugcuccugagccuguacgucuccgccagccucuccuaccugcuguacagcgacauccuccugaaguucuccccgaccgagaucaccgcccccacgaugccccuggacugcgcgaacgccagcaacgugcaggccgugaaccgcuccgccaccaagggcgucacccuccugcugcccgagccggaguggaccuacccccggcucagcugccccggguccacguuccagaaggcccugcugaucagcccccaccgcuucggcgagaccaaggggaacuccgcgccgcucaucauccgggagcccuucaucgccugcggccccaacgagugcaagcacuucgcccugacccacuacgccgcgcagcccggcggguacuacaacggcacccgcggggaccggaacaagcugcgccaccucaucagcgugaagcugggcaagaucccgacgguggagaacuccaucuuccacauggccgccuggagcggguccgccugccacgacggcaaggaguggaccuacaucggcgucgacgggcccgacaacaacgcccugcucaaggugaaguacggcgaggcguacaccgacaccuaccacagcuacgccaacaagauccugcggacgcaggaguccgccugcaacugcaucgggggcaacugcuaccugaugaucaccgacggcagcgccagcgggguguccgagugccgcuuccucaagauccgggagggccgcaucaucaaggagaucuuccccaccgggcgggucaagcacaccgaggagugcacgugcggcuucgccagcaacaagaccaucgagugcgcgugccgcgacaacuccuacaccgccaagcggcccuucgugaagcugaacguggagaccgacacggccgagauccgccugaugugcaccgacaccuaccucgacaccccgcggcccaacgacgggagcaucacgggccccugcgaguccgacggcgacaaggggagcggcgggaucaagggcggguucguccaccagcgcauggaguccaagaucggccggugguacagccgcaccauguccaagaccgagcggaugggcauggggcuguacgugaaguacgacggcgaccccugggccgacagcgacgcccuggcguucuccggggugauggucagcaugaaggagccgggcugguacuccuucggguucgagaucaaggacaagaagugcgacgugcccugcaucggcaucgagauggugcacgacggcgggaaggagaccuggcacagcgccgccacggccaucuacugccucaugggcuccgggcagcugcugugggacaccgucaccggcguggacauggaccucuga

SEQ ID NO: 92918 - RNA, 1401 nt, Artificial Sequence
  derived and/or modified CDS sequence (opt1) from neuraminidase__InfluenzaB__AEQ49686
augcugcccagcaccauccagacccucacgcuguuccugaccuccggcggggugcuccugagccuguacgucuccgccagccucuccuaccugcuguacagcgacauccuccugaaguucuccccgaccgagaucaccgcccccacgaugccccuggacugcgcgaacgccagcaacgugcaggccgugaaccgcuccgccaccaagggcgucacccuccugcugcccgagccggaguggaccuacccccggcucagcugccccggguccacguuccagaaggcccugcugaucagcccccaccgcuucggcgagaccaaggggaacuccgcgccgcucaucauccgggagcccuucaucgccugcggccccaacgagugcaagcacuucgcccugacccacuacgccgcgcagcccggcggguacuacaacggcacccgcggggaccggaacaagcugcgccaccucaucagcgugaagcugggcaagaucccgacgguggagaacuccaucuuccacauggccgccuggagcggguccgccugccacgacggcaaggaguggaccuacaucggcgucgacgggcccgacaacgacgcccugcucaaggugaaguacggcgaggcguacaccgacaccuaccacagcuacgccaacaagauccugcggacgcaggaguccgccugcaacugcaucgggggcaacugcuaccugaugaucaccgacggcagcgccagcgggguguccgagugccgcuuccucaagauccgggagggccgcaucaucaaggagaucuuccccaccgggcgggucaagcacaccgaggagugcacgugcggcuucgccagcaacaagaccaucgagugcgcgugccgcgacaacuccuacaccgccaagcggcccuucgugaagcugaacguggagaccgacacggccgagauccgccugaugugcaccgacaccuaccucgacaccccgcggcccgacgacgggagcaucacgggccccugcgaguccaacggcgacaaggggagcggcgggaucaagggcggguucguccaccagcgcauggaguccaagaucggccggugguacagccgcaccauguccaagaccgagcggaugggcauggggcuguacgugaaguacgacggcgaccccugggccgacagcgacgcccuggcguucuccggggugauggucagcaugaaggagccgggcugguacuccuucggguucgagaucaaggacaagaagugcgacgugcccugcaucggcaucgagauggugcacgacggcgggaaggagaccuggcacagcgccgccacggccaucuacugccucaugggcuccgggcagcugcugugggacaccgucaccggcguggacauggcccucuga

SEQ ID NO: 92919 - RNA, 1401 nt, Artificial Sequence
  derived and/or modified CDS sequence (opt1) from neuraminidase__InfluenzaB__AEQ49687
augcugcccagcaccauccagacccucacgcuguuccugaccuccggcggggugcuccugagccuguacgucuccgcccuccugagcuaccugcucuacuccgacauccugcugaaguucagcccgaccgagaucaccgcccccacgaugucccucgacugcgcgaacgccagcaacgugcaggccgugaaccgcuccgccaccaagggcgucaccuuccugcugcccgagcccgaguggaccuacccgcggcucagcugccccggguccacguuccagaaggcccugcugaucagcccccaccgcuucggcgagaccaaggggaacuccgcgccccucaucauccgggagccguucaucgccugcggccccaacgagugcaagcacuucgcccugacccacuacgccgcgcagcccggcggguacuacaacggcacccgcggggaccggaacaagcugcgccaccucaucagcgugaagcugggcaagauccccacgguggagaacuccaucuuccacauggccgccuggagcggguccgccugccacgacggcaaggaguggaccuacaucggcgucgacgggccggacaacgacgcccugcucaaggugaaguacggcgaggcguacaccgacaccuaccacagcuacgccaacaagauccugcggacgcaggaguccgccugcaacugcaucgggggcaacugcuaccugaugaucaccgacggcagcgccagcgggguguccgagugccgcuuccucaagauccgggagggccgcaucaucaaggagaucuuccccaccgggcgggucaagcacaccgaggagugcacgugcggcuucgccagcaacaagaccaucgagugcgcgugccgcgacaacuccuacaccgccaagcggcccuucgugaagcugaacguggagaccgacacggccgagauccgccugaugugcaccgacaccuaccucgacacgccccggccggacgacgggagcaucaccggccccugcgaguccaacggcgacaaggggagcggcgggaucaagggcggguucguccaccagcgcauggaguccaagaucggccggugguacagccgcaccauguccaagaccgagcggaugggcauggggcuguacgugaaguacgacggcgaccccugggccgacagcgacgcccuggcguucuccggggugauggucagcaugaaggagcccggcugguacuccuucggguucgagaucaaggacaagaagugcgacgugccgugcaucggcaucgagauggugcacgacggcgggaaggagaccuggcacagcgccgccacggccaucuacugccucaugggcuccgggcagcugcugugggacaccgucaccggcguggacauggcccucuga

SEQ ID NO: 92920 - RNA, 1401 nt, Artificial Sequence
  derived and/or modified CDS sequence (opt1) from neuraminidase__InfluenzaB__AEQ49688
augcugcccagcaccauccagacccucacgcuguuccugaccuccggcggggugcuccugagccuguacgucuccgccagccucuccuaccugcuguacagcgacauccuccugaaguucucccgcaccgagaucaccgccccgaucaugccccugggcugcgcgaacgccagcaacgugcaggccgugaaccgguccgccacgaagggggucacccuccugcugcccgagcccgaguggaccuacccgcgccucagcugccccggcuccaccuuccagaaggcccugcugaucagcccccaccgguucggggagacgaagggcaacuccgcgccccucaucauccgcgagccguucaucgccugcggccccaaggagugcaagcacuucgcccugacccacuacgccgcgcagcccgggggcuacuacaacgggacccgggaggaccgcaacaagcugcggcaccucaucagcgugaagcugggcaagauccccaccguggagaacuccaucuuccacauggccgccuggagcggguccgccugccacgacggccgcgaguggacguacaucggcgucgacgggccggacagcaacgcccugcucaagaucaaguacggcgaggcguacaccgacaccuaccacuccuacgccaagaacauccugcggacccaggagagcgccugcaacugcaucgggggcgacugcuaccugaugaucacggacggccccgccagcgggaucuccgagugccgcuuccucaagauccgggagggccgcaucaucaaggagaucuuccccaccgggcgggugaagcacaccgaggagugcacgugcggcuucgccagcaacaagaccaucgagugcgcgugccgcgacaacuccuacaccgccaagcggcccuucgugaagcugaacgucgagaccgacaccgccgagauccgccugaugugcacggagaccuaccucgacaccccgcggcccaacgacgggagcaucaccggccccugcgaguccaacggcgacaaggggagcggcgggaucaagggcggguucgugcaccagcgcauggccuccaagaucggccggugguacagccgcacgauguccaagaccaagcggaugggcauggggcuguacgugaaguacgacggcgaccccuggaccgacagcgaggcccuggcgcucuccggggucauggugagcauggaggagccgggcugguacuccuucggguucgagaucaaggacaagaagugcgacgugcccugcaucggcaucgagaugguccacgacggcgggaagaccacguggcacagcgccgccaccgccaucuacugccugaugggcuccgggcagcugcucugggacaccgugaccggcgugaacaugacgcuguga

SEQ ID NO: 92921 - RNA, 1401 nt, Artificial Sequence
  derived and/or modified CDS sequence (opt1) from neuraminidase__InfluenzaB__AEQ49691
augcugcccagcaccauccagacccucacgcuguuccugaccuccggcggggugcuccugagccuguacgucuccgcccuccugagcuaccugcucuacuccgacauccugcugaaguucagcccgaccgagaucaccgcccccacgaugucccucgacugcgcgaacgccagcaacgugcaggccgugaaccgcuccgccaccaagggcgucaccuuccugcugcccgagcccgaguggaccuacccgcggcucagcugccccggguccacguuccagaaggcccugcugaucagcccccaccgcuucggcgagaccaaggggaacuccgcgccccucaucauccgggagccguucaucgccugcggccccaacgagugcaagcacuucgcccugacccacuacgccgcgcagcccggcggguacuacaacggcacccgcggggaccggaacaagcugcgccaccucaucagcgugaagcugggcaagauccccacgguggagaacuccaucuuccacauggccgccuggagcggguccgccugccacgacggcaaggaguggaccuacaucggcgucgacgggccggacaacgacgcccugcucaaggugaaguacggcgaggcguacaccgacaccuaccacagcuacgccaacaagauccugcggacgcaggaguccgccugcaacugcaucgggggcaacugcuaccugaugaucaccgacggcagcgccagcgggguguccgagugccgcuuccucaagauccgggagggccgcaucaucaaggagaucuuccccaccgggcgggucaagcacaccgaggagugcacgugcggcuucgccagcaacaagaccaucgagugcgcgugccgcgacaacuccuacaccgccaagcggcccuucgugaagcugaacguggagaccgacacggccgagauccgccugaugugcaccgacaccuaccucgacacgccccggccggacgacgggagcaucaccggccccugcgaguccaacggcgaccgcgggagcggcgggaucaagggcggguucguccaccagcggauggaguccaagaucggccgcugguacagccggaccauguccaagaccgagcgcaugggcauggggcuguacgugaaguacgacggcgaccccugggccgacagcgacgcccuggcguucuccggggugauggucagcaugaaggagcccggcugguacuccuucggguucgagaucaaggacaagaagugcgacgugccgugcaucggcaucgagauggugcacgacggcgggaaggagaccuggcacagcgccgccacggccaucuacugccucaugggcuccgggcagcugcugugggacaccgucaccggcguggacauggcccucuga

SEQ ID NO: 92922 - RNA, 1401 nt, Artificial Sequence
  derived and/or modified CDS sequence (opt1) from neuraminidase__InfluenzaB__AEQ49692
augcugcccagcaccauccagacccucacgcuguuccugaccuccggcggggugcuccugagccuguacgucuccgccagccucuccuaccugcuguacagcgacauccuccugaaguucuccccgaccgagaccacggcccccaccaugagccuggacugcgcgaacgccuccaacgugcaggccgugaaccgcagcgccaccaagggcgucaccuuccuccugcccgagcccgaguggacguacccgcggcuguccugccccgggagcaccuuccagaaggcccuccugaucagcccccaccgcuucggcgagaccaaggggaacuccgcgccccugaucauccgggagccguucaucgccugcggccccaacgagugcaagcacuucgcccucacccacuacgccgcgcagcccggcggguacuacaacggcacgcgcggggaccggaacaagcugcgccaccugaucuccgugaagcucggcaagauccccaccguggagaacagcaucuuccacauggccgccugguccgggagcgccugccacgacggcaaggaguggaccuacaucggcgucgacgggccggacaacgacgcccugcugaaggugaaguacggcgaggcguacaccgacacguaccacuccuacgccaacaagauccuccggacccaggagagcgccugcaacugcaucgggggcaacugcuaccugaugaucaccgacggcagcgccuccggggugagcgagugccgcuuccugaagauccgggagggccgcaucaucaaggagaucuuccccaccgggcgggucaagcacacggaggagugcacgugcggcuucgccuccaacaagaccaucgagugcgcgugccgcgacaacagcuacaccgccaagcggcccuucgugaagcucaacguggagaccgacaccgccgagauccgccugaugugcaccgacaccuaccuggacacgccccggccggacgacggguccaucaccggccccugcgagagcaacggcgacaagggguccggcgggaucaagggcggguucguccaccagcgcauggagagcaagaucggccggugguacucccgcaccaugagcaagaccgagcggaugggcauggggcucuacgugaaguacgacggcgaccccugggccgacuccgacgcccuggcguucagcggggugauggucuccaugaaggagcccggcugguacagcuucggguucgagaucaaggacaagaagugcgacgugccgugcaucggcaucgagauggugcacgacggcgggaaggagacguggcacuccgccgccaccgccaucuacugccugaugggcagcgggcagcuccugugggacaccgucaccggcguggacauggcccuguga

SEQ ID NO: 92923 - RNA, 1401 nt, Artificial Sequence
  derived and/or modified CDS sequence (opt1) from neuraminidase__InfluenzaB__AEQ49693
augcugcccagcaccauccagacccucacgcuguuccugaccuccggcggggugcuccugagccuguacgucuccgccagccucuccuaccugcuguacagcgacauccuccugaaguucuccccgaccgagaucaccgcccccacgaugccccuggacugcgcgaacgccagcaacgugcaggccgugaaccgcuccgccaccaagggcgucacccuccugcugcccgagccggaguggaccuacccccggcucagcugccccggguccacguuccagaaggcccugcugaucagcccccaccgcuucggcgagaccaaggggaacuccgcgccgcucaucauccgggagcccuucaucgccugcggccccaacgagugcaagcacuucgcccugacccacuacgccgcgcagcccggcggguacuacaacggcacccgcggggaccggaacaagcugcgccaccucaucagcgugaagcugggcaagaucccgacgguggagaacuccaucuuccacauggccgccuggagcggguccgccugccacgacggcaaggaguggaccuacaucggcgucgacgggcccgacaacaacgcccugcucaaggugaaguacggcgaggcguacaccgacaccuaccacagcuacgccaacaagauccugcggacgcaggaguccgccugcaacugcaucgggggcaacugcuaccugaugaucaccgacggcagcgccagcgggguguccgagugccgcuuccucaagauccgggagggccgcaucaucaaggagaucuuccccaccgggcgggucaagcacaccgaggagugcacgugcggcuucgccagcaaccgcaccaucgagugcgcgugccgggacaacuccuacaccgccaagcgccccuucgugaagcugaacguggagaccgacacggccgagauccggcugaugugcaccgacaccuaccucgacaccccgcgccccaacgacgggagcaucacgggccccugcgaguccgacggcgacaaggggagcggcgggaucaagggcggguucguccaccagcggauggaguccaagaucggccgcugguacagccggaccauguccaagaccgagcgcaugggcauggggcuguacgugaaguacgacggcgaccccugggccgacagcgacgcccuggcguucuccggggugauggucagcaugaaggagccgggcugguacuccuucggguucgagaucaaggacaagaagugcgacgugcccugcaucggcaucgagauggugcacgacggcgggaaggagaccuggcacagcgccgccacggccaucuacugccucaugggcuccgggcagcugcugugggacaccgucaccggcguggacauggcccucuga

SEQ ID NO: 92924 - RNA, 1401 nt, Artificial Sequence
  derived and/or modified CDS sequence (opt1) from neuraminidase__InfluenzaB__AEQ49695
augcugcccagcaccauccagacccucacgcuguuccugaccuccggcggggugcuccugagccuguacgucuccgccagccucuccuaccugcuguacagcgacauccuccugaaguucuccccgaccgagaucaccgcccccacgaugccccuggacugcgcgaacgccagcaacgugcaggccgugaaccgcuccgccaccaagggcgucacccuccugcugcccgagccggaguggaccuacccccggcucagcugccccggguccacguuccagaaggcccugcugaucagcccccaccgcuucggcgagaccaaggggaacuccgcgccgcucaucauccgggagcccuucaucgccugcggccccaacgagugcaagcacuucgcccugacccacuacgccgcgcagcccggcggguacuacaacggcacccgcggggaccggaacaagcugcgccaccucaucagcgugaagcugggcaagaucccgacgguggagaacuccaucuuccacauggccgccuggagcggguccgccugccacgacggcaaggaguggaccuacaucggcgucgacgggcccgacaacaacgcccugcucaaggugaaguacggcgaggcguacaccgacaccuaccacagcuacgccaacaagauccugcggacgcaggaguccgccugcaacugcaucgggggcaacugcuaccugaugaucaccgacggcagcgccagcgggguguccgagugccgcuuccucaagauccgggagggccgcaucaucaaggagaucuuccccaccgggcgggucaagcacaccgaggagugcacgugcggcuucgccagcaacaagaccaucgagugcgcgugccgcgacaacuccuacaccgccaagcggcccuucgugaagcugaacguggagaccgacacggccgagauccgccugaugugcaccgacaccuaccucgacaccccgcggcccaacgacgggagcaucacgggccccugcgaguccgacggcgacaaggggagcggcgggaucaagggcggguucguccaccagcgcauggaguccaagaucggccggugguacagccgcaccauguccaagaccgagcggaugggcauggggcuguacgugaaguacgacggcgaccccugggccgacagcgacgcccuggcguucuccggggugauggucagcaugaaggagccgggcugguacuccuucggguucgagaucaaggacaagaagugcgacgugcccugcaucggcaucgagauggugcacgacggcgggaaggagaccuggcacagcgccgccacggccaucuacugccucaugggcuccgggcagcugcugugggacaccgucaccggcguggacauggcccucuga

SEQ ID NO: 92925 - RNA, 1401 nt, Artificial Sequence
  derived and/or modified CDS sequence (opt1) from neuraminidase__InfluenzaB__AEQ49697
augcugcccagcaccauccagacccucacgcuguuccugaccuccggcggggugcuccugagccuguacgucuccgccagccucuccuaccugcuguacagcgacauccuccugaaguucuccccgaccgagaucaccgcccccacgaugagccuggacugcgcgaacgccuccaacgugcaggccgugaaccgcagcgccaccaagggcgucaccuuccuccugcccgagcccgaguggaccuacccgcggcuguccugccccgggagcacguuccagaaggcccuccugaucagcccccaccgcuucggcgagaccaaggggaacuccgcgccccugaucauccgggagccguucaucgccugcggccccaacgagugcaagcacuucgcccucacccacuacgccgcgcagcccggcggguacuacaacggcacccgcggggaccggaacaagcugcgccaccugaucuccgugaagcucggcaagauccccacgguggagaacagcaucuuccacauggccgccugguccgggagcgccugccacgacggcaaggaguggaccuacaucggcgucgacgggccggacaacgacgcccugcugaaggugaaguacggcgaggcguacaccgacaccuaccacuccuacgccaacaagauccuccggacgcaggagagcgccugcaacugcaucgggggcaacugcuaccugaugaucaccgacggcagcgccuccggggugagcgagugccgcuuccugaagauccgggagggccgcaucaucaaggagaucuuccccaccgggcgggucaagcacaccgaggagugcacgugcggcuucgccuccaacaagaccaucgagugcgcgugccgcgacaacagcuacaccgccaagcggcccuucgugaagcucaacguggagaccgacacggccgagauccgccugaugugcaccgacaccuaccuggacacgccccggccggacgacggguccaucaccggccccugcgagagcaacggcgacaagggguccggcgggaucaagggcggguucguccaccagcgcauggagagcaagaucggccggugguacucccgcaccaugagcaagaccgagcggaugggcauggggcucuacgugaaguacgacggcgaccccugggccgacuccgacgcccuggcguucagcggggugauggucuccaugaaggagcccggcugguacagcuucggguucgagaucaaggacaagaagugcgacgugccgugcaucggcaucgagauggugcacgacggcgggaaggagaccuggcacuccgccgccacggccaucuacugccugaugggcagcgggcagcuccugugggacaccgucaccggcguggacauggcccuguga

SEQ ID NO: 92926 - RNA, 1401 nt, Artificial Sequence; identical to SEQ ID NO: 92925
  derived and/or modified CDS sequence (opt1) from neuraminidase__InfluenzaB__AEQ49698

SEQ ID NO: 92927 - RNA, 1401 nt, Artificial Sequence; identical to SEQ ID NO: 92925
  derived and/or modified CDS sequence (opt1) from neuraminidase__InfluenzaB__AEQ49699

SEQ ID NO: 92928 - RNA, 1401 nt, Artificial Sequence; identical to SEQ ID NO: 92925
  derived and/or modified CDS sequence (opt1) from neuraminidase__InfluenzaB__AEQ49700

SEQ ID NO: 92929 - RNA, 1401 nt, Artificial Sequence; identical to SEQ ID NO: 92922
  derived and/or modified CDS sequence (opt1) from neuraminidase__InfluenzaB__AEQ49701

SEQ ID NO: 92930 - RNA, 1401 nt, Artificial Sequence; identical to SEQ ID NO: 92925
  derived and/or modified CDS sequence (opt1) from neuraminidase__InfluenzaB__AEQ49702

SEQ ID NO: 92931 - RNA, 1401 nt, Artificial Sequence; identical to SEQ ID NO: 92922
  derived and/or modified CDS sequence (opt1) from neuraminidase__InfluenzaB__AEQ49703

SEQ ID NO: 92932 - RNA, 1401 nt, Artificial Sequence; identical to SEQ ID NO: 92925
  derived and/or modified CDS sequence (opt1) from neuraminidase__InfluenzaB__AEQ49705

SEQ ID NO: 92933 - RNA, 1401 nt, Artificial Sequence
  derived and/or modified CDS sequence (opt1) from neuraminidase__InfluenzaB__AEQ49706
augcugcccagcaccauccagaugcucacccuguuccugacgcucggcggggugcugcugucccucuacgucagcgccucccugagcuaccugcucuaccuggacauccugcucaaguucccgcccaccgagaucaccgcccccaccaugccccuggacugcgcgaacgccuccaacgugcaggccgugaaccgcagcgccacgaagggcgucaccuuccugcucccggagcccgaguggaccuacccccggcuguccugccccgggagcaccuuccagaaggcccugcucaucuccccgcaccgcuucggcgagacgaaggggaacagcgcgccccugaucauccgggagcccuucaucgccugcggccccaaggagugcaagcacuucgcccugacccacuacgccgcgcagccgggcggguacuacaacggcacccgcggggaccggaacaagcuccgccaccugaucuccgugaagcugggcaagauccccaccguggagaacagcaucuuccacauggccgccugguccgggagcgccugccacgacggcaaggaguggacguacaucggcgucgacgggcccgacaacaacgcccuccugaagaucaaguacggcgaggcguucaccgacaccuaccacuccuacgccaacaacauccugcggacccaggagagcgccugcaacugcaucgggggcaacugcuaccucaugaucacggacggcuccgccagcgggguguccgagugccgcuuccugaagauccgggagggccgcaucaucaaggagaucuuccccaccgggcgggugaagcacaccgaggagugcacgugcggcuucgccagcaacaagaccaucgagugcgcgugccgcgacaacagcuacaccgccaagcggccguucgucaagcugaacguggagaccgacaccgccgagauccgccucaugugcacggacaccuaccuggacacgccccggcccgacgacggguccaucaccggccccugcgagagcaacggcgacaagggguccggcgggaucaagggcggguucgugcaccagcgcauggccagcaagaucggccggugguacucccgcaccaugagcaagaccgagcggaugggcauggggcuguacgucaaguacgacggcgacccgugggccgacuccgacgcgcucgccuucagcggggugaugguguccaugaaggagcccggcugguacagcuucggguucgagaucaaggacaagaagugcgacguccccugcaucggcaucgagauggugcacgacggcgggaaggagaccuggcacuccgccgccaccgccaucuacugccugaugggcagcgggcagcugcucugggacacggugaccggcgucaacauggcgcuguga

SEQ ID NO: 92934 - RNA, 1401 nt, Artificial Sequence; identical to SEQ ID NO: 92925
  derived and/or modified CDS sequence (opt1) from neuraminidase__InfluenzaB__AEQ49707

SEQ ID NO: 92935 - RNA, 1401 nt, Artificial Sequence; identical to SEQ ID NO: 92925
  derived and/or modified CDS sequence (opt1) from neuraminidase__InfluenzaB__AEQ49708

SEQ ID NO: 92936 - RNA, 1401 nt, Artificial Sequence
  derived and/or modified CDS sequence (opt1) from neuraminidase__InfluenzaB__AEQ49709
augcugcccagcaccauccagacccucacgcuguuccugaccuccggcggggugcuccugagccuguacgucuccgcccuccugagcuaccugcucuacuccgacauccugcugaaguucagcccgaccgagaucaccgcccccacgaugucccucgacugcgcgaacgccagcaacgugcaggccgugaaccgcuccgccaccaagggcgucaccuuccugcugcccgagcccgaguggaccuacccgcggcucagcugccccggguccacguuccagaaggcccugcugaucagcccccaccgcuucggcgagaccaaggggaacuccgcgccccucaucauccgggagccguucaucgccugcggccccaacgagugcaagcacuucgcccugacccacuacgccgcgcagcccggcggguacuacaacggcacccgcggggaccggaacaagcugcgccaccucaucagcgugaagcugggcaagauccccacgguggagaacuccaucuuccacauggccgccuggagcggguccgccugccacgacggcaaggaguggaccuacaucggcgucgacgggccggacaacgacgcccugcucaaggugaaguacggcgaggcguacaccgacaccuaccacagcuacgccaacaagauccugcggacgcaggaguccgccugcaacugcaucgggggcaacugcuaccugaugaucaccgacggcagcgccagcgggguguccgagugccgcuuccucaagauccgggagggccgcaucaucaaggagaucuuccccaccgggcgggucaagcacaccgaggagugcacgugcggcuucgccagcaacaagaccaucgagugcgcgugccgcgacaacuccuacaccgccaagcggcccuucgugaagcugaacguggagaccgacacggccgagauccgccugaugugcaccgacaccuaccucgacacgccccggccggacgacgggagcaucaccggccccugcgaguccaacggcgacaaggggagcggcgggaucaagggcggguucguccaccagcgcauggaguccaagaucggccggugguacagccgcaccauguccaagaccgagcggaugggcauggggcuguacgugaaguacgacggcgaccccugggccgacagcgacgcccuggcguucuccggggugauggucagcaugaaggagcccggcugguacuccuucggguucgagaucaaggacaagaagugcgacgugccgugcaucggcaucgagauggugcacgacggcgggaaggagaccuggcacagcgccgccacggccaucuacugccucaugggcuccgggcaccuccugugggacaccgucaccggcguggacauggcccuguga

SEQ ID NO: 92937 - RNA, 1401 nt, Artificial Sequence; identical to SEQ ID NO: 92899
  derived and/or modified CDS sequence (opt1) from neuraminidase__InfluenzaB__AEQ49710

SEQ ID NO: 92938 - RNA, 1401 nt, Artificial Sequence; identical to SEQ ID NO: 92896
  derived and/or modified CDS sequence (opt1) from neuraminidase__InfluenzaB__AER27042

SEQ ID NO: 92939 - RNA, 1401 nt, Artificial Sequence; identical to SEQ ID NO: 92924
  derived and/or modified CDS sequence (opt1) from neuraminidase__InfluenzaB__AER27053

SEQ ID NO: 92940 - RNA, 1401 nt, Artificial Sequence; identical to SEQ ID NO: 92896
  derived and/or modified CDS sequence (opt1) from neuraminidase__InfluenzaB__AER27064

SEQ ID NO: 92941 - RNA, 1401 nt, Artificial Sequence; identical to SEQ ID NO: 92899
  derived and/or modified CDS sequence (opt1) from neuraminidase__InfluenzaB__AET43128

SEQ ID NO: 92942 - RNA, 1401 nt, Artificial Sequence; identical to SEQ ID NO: 92899
  derived and/or modified CDS sequence (opt1) from neuraminidase__InfluenzaB__AET43139

SEQ ID NO: 92943 - RNA, 1401 nt, Artificial Sequence
  derived and/or modified CDS sequence (opt1) from neuraminidase__InfluenzaB__AET43150
augcugcccagcaccauccagacccucacgcuguuccugaccuccggcggggugcuccugagccuguacgucuccgccagccucuccuaccugcuguacagcgacauccuccugaaguucuccccgaaggagaucaccgcccccaccaugccccuggacugcgcgaacgccagcaacgugcaggccgugaaccacuccgccacgaagggcgucacccuccugcugcccgagccggaguggaccuacccccgccucagcugccccggguccaccuuccagaaggcccugcugaucagcccccaccgguucggcgagacgaaggggaacuccgcgccgcucaucauccgcgagcccuucaucgccugcggccccaacgagugcaagcacuucgcccugacccacuacgccgcgcagcccggcggguacuacaacggcacccgcggggaccggaacaagcugcggcaccucaucagcgugaagcugggcaagaucccgaccguggagaacuccaucuuccacauggccgccuggagcggguccgccugccacgacggcaaggaguggacguacaucggcgucgacgggcccgacaacaacgcccugcucaaggugaaguacggcgaggcguacaccgacaccuaccacagcuacgccaacaagauccugcgcacccaggaguccgccugcaacugcaucgggggcaacugcuaccugaugaucacggacggcagcgccagcgggguguccgagugccgguuccucaagauccgcgagggccggaucaucaaggagaucuuccccaccgggcgcgucaagcacaccgaggagugcacgugcggcuucgccagcaacaagaccaucgagugcgcgugccgggacaacuccuacaccgccaagcgccccuucgugaagcugaacguggagaccgacaccgccgagauccggcugaugugcacggacaccuaccucgacaccccgcgccccgacgacgggagcaucaccggccccugcgaguccaacggcgacaaggggagcggcgggaucaagggcggguucguccaccagcggauggaguccaagaucggccgcugguacagccggacgauguccaagaccgagcgcaugggcauggggcuguacgugaaguacgacggcgaccccugggccgacagcgacgcccugaccuucuccggggugauggucagcaugaaggagccgggcugguacuccuucggguucgagaucaaggacaagaagugcgacgugcccugcaucggcaucgagauggugcacgacggcgggaaggagaccuggcacagcgcggccacggccaucuacugccucaugggcuccgggcagcugcugugggacaccgucaccggcguggacauggcccucuga

SEQ ID NO: 92944 - RNA, 1401 nt, Artificial Sequence; identical to SEQ ID NO: 92899
  derived and/or modified CDS sequence (opt1) from neuraminidase__InfluenzaB__AET43161

SEQ ID NO: 92945 - RNA, 1401 nt, Artificial Sequence; identical to SEQ ID NO: 92899
  derived and/or modified CDS sequence (opt1) from neuraminidase__InfluenzaB__AET43172

SEQ ID NO: 92946 - RNA, 1401 nt, Artificial Sequence; identical to SEQ ID NO: 92899
  derived and/or modified CDS sequence (opt1) from neuraminidase__InfluenzaB__AET43183

SEQ ID NO: 92947 - RNA, 1401 nt, Artificial Sequence; identical to SEQ ID NO: 92899
  derived and/or modified CDS sequence (opt1) from neuraminidase__InfluenzaB__AET43194

SEQ ID NO: 92948 - RNA, 1401 nt, Artificial Sequence; identical to SEQ ID NO: 92899
  derived and/or modified CDS sequence (opt1) from neuraminidase__InfluenzaB__AET43216

SEQ ID NO: 92949 - RNA, 1401 nt, Artificial Sequence; identical to SEQ ID NO: 92899
  derived and/or modified CDS sequence (opt1) from neuraminidase__InfluenzaB__AET43227

SEQ ID NO: 92950 - RNA, 1401 nt, Artificial Sequence
  derived and/or modified CDS sequence (opt1) from neuraminidase__InfluenzaB__AET50947
augcugcccagcaccauccagacccucacgcuguuccugaccuccggcggggugcuccugagccuguacgucuccgccagccucuccuaccugcuguacagcgacauccuccugaaguucuccccgaaggagaucaccgcccccaccaugccccuggacugcgcgaacgccagcaacgugcaggccgugaaccacuccgccacgaagggcgucacccuccugcugcccgagccggaguggaccuacccccgccucagcugccccggguccaccuuccagaaggcccugcugaucagcccccaccgguucggcgagacgaaggggaacuccgcgccgcucaucauccgcgagcccuucaucgccugcggccccaacgagugcaagcacuucgcccugacccacuacgccgcgcagcccggcggguacuacaacggcacccgcggggaccggaacaagcugcggcaccucaucagcgugaagcugggcaagaucccgaccguggagaacuccaucuuccacauggccgccuggagcggguccgccugccacgacggcaaggaguggacguacaucggcgucgacgggcccgacaacaacgcccugcucaaggugaaguacggcgaggcguacaccgacaccuaccacagcuacgccaacaagauccugcgcacccaggaguccgccugcaacugcaucgggggcaacugcuaccugaugaucacggacggcagcgccagcgggguguccgagugccgguuccucaagauccgcgagggccggaucaucaaggagaucuuccccaccgggcgcgucaagcacaccgaggagugcacgugcggcuucgccagcaacaagaccaucgagugcgcgugccgggacaacuccuacaccgccaagcgccccuucgugaagcugaacguggagaccgacaccgccgagauccggcugaugugcacggacaccuaccucgacaccccgcgccccgacgacgggagcaucaccggccccugcgaguccaacggcgacaaggggagcggcgggaucaagggcggguucguccaccagcggauggaguccaagaucggccgcugguacagccggacgauguccaagaccgagcgcaugggcauggggcuguacgugaaguacgacggcgaccccugggccgacagcgacgcccuggcguucuccggggugaugaucagcaugaaggagccgggcugguacuccuucggguucgagaucaaggacaagaagugcgacguccccugcaucggcaucgagauggugcacgacggcgggaaggagaccuggcacagcgccgccaccgccaucuacugccucaugggcuccgggcagcugcugugggacacggugaccggcgucgacauggcccucuga

SEQ ID NO: 92951 - RNA, 1401 nt, Artificial Sequence
  derived and/or modified CDS sequence (opt1) from neuraminidase__InfluenzaB__AET50958
augcugcccagcaccauccagacccucacgcuguuccugaccuccggcggggugcuccugagccuguacgucuccgccagccucuccuaccugcuguacagcgacauccuccugaaguucuccccgaaggagaucaccgcccccaccaugccccuggacugcgcgaacgccagcaacgugcaggccgugaaccacuccgccacgaagggcgucacccuccugcugcccgagcucgaguggaccuacccgcgccugagcugccccggguccaccuuccagaaggcccugcucaucagcccccaccgguucggcgagacgaaggggaacuccgcgccccugaucauccgcgagccguucaucgccugcggccccaacgagugcaagcacuucgcccugacccacuacgccgcgcagcccggcggguacuacaacggcacccgcggggaccggaacaagcuccggcaccugaucagcgugaagcugggcaagauccccaccguggagaacuccaucuuccacauggccgccuggagcggguccgccugccacgacggcaaggaguggacguacaucggcgucgacgggccggacaacaacgcccuccugaaggugaaguacggcgaggcguacaccgacaccuaccacagcuacgccaacaagauccugcgcacccaggaguccgccugcaacugcaucgggggcaacugcuaccucaugaucacggacggcagcgccagcgggguguccgagugccgguuccugaagauccgcgagggccggaucaucaaggagaucuuccccaccgggcgcgucaagcacaccgaggagugcacgugcggcuucgccagcaacaagaccaucgagugcgcgugccgggacaacuccuacaccgccaagcgccccuucgugaagcugaacguggagaccgacaccgccgagauccggcucaugugcacggacaccuaccuggacacgccccgcccggacgacgggagcaucaccggccccugcgaguccaacggcgacaaggggagcggcgggaucaagggcggguucguccaccagcggauggaguccaagaucggccgcugguacagccggaccauguccaagaccgagcgcaugggcauggggcuguacgugaaguacgacggcgaccccugggccgacagcgacgcccucgcguucuccggggugauggucagcaugaaggagcccggcugguacuccuucggguucgagaucaaggacaagaagugcgacgugccgugcaucggcaucgagauggugcacgacggcgggaaggagaccuggcacagcgccgccaccgccaucuacugccugaugggcuccgggcagcugcucugggacacggucaccggcguggacauggcccuguga

SEQ ID NO: 92952 - RNA, 1401 nt, Artificial Sequence; identical to SEQ ID NO: 92899
  derived and/or modified CDS sequence (opt1) from neuraminidase__InfluenzaB__AET50969

SEQ ID NO: 92953 - RNA, 1401 nt, Artificial Sequence; identical to SEQ ID NO: 92899
  derived and/or modified CDS sequence (opt1) from neuraminidase__InfluenzaB__AET50980

SEQ ID NO: 92954 - RNA, 1401 nt, Artificial Sequence; identical to SEQ ID NO: 92899
  derived and/or modified CDS sequence (opt1) from neuraminidase__InfluenzaB__AET74259

SEQ ID NO: 92955 - RNA, 1401 nt, Artificial Sequence; identical to SEQ ID NO: 92899
  derived and/or modified CDS sequence (opt1) from neuraminidase__InfluenzaB__AET74270

SEQ ID NO: 92956 - RNA, 1401 nt, Artificial Sequence; identical to SEQ ID NO: 92950
  derived and/or modified CDS sequence (opt1) from neuraminidase__InfluenzaB__AET74281

SEQ ID NO: 92957 - RNA, 1401 nt, Artificial Sequence; identical to SEQ ID NO: 92899
  derived and/or modified CDS sequence (opt1) from neuraminidase__InfluenzaB__AET74292

SEQ ID NO: 92958 - RNA, 1401 nt, Artificial Sequence; identical to SEQ ID NO: 92899
  derived and/or modified CDS sequence (opt1) from neuraminidase__InfluenzaB__AET74303

SEQ ID NO: 92959 - RNA, 1401 nt, Artificial Sequence; identical to SEQ ID NO: 92899
  derived and/or modified CDS sequence (opt1) from neuraminidase__InfluenzaB__AET74314

SEQ ID NO: 92960 - RNA, 1401 nt, Artificial Sequence; identical to SEQ ID NO: 92899
  derived and/or modified CDS sequence (opt1) from neuraminidase__InfluenzaB__AET74333

SEQ ID NO: 92961 - RNA, 1401 nt, Artificial Sequence
  derived and/or modified CDS sequence (opt1) from neuraminidase__InfluenzaB__AET74344
augcugcccagcaccauccagacccucacgcuguuccugaccuccggcggggugcuccugagccuguacgucuccgccagccucuccuaccugcuguacagcgacauccuccugaaguucuccccgaaggagaucaccgcccccaccaugccccuggacugcgcgaacgccagcaacgugcaggccgugaaccacuccgccacgaagggcgucacccuccugcugcccgagccggaguggaccuacccccgccucagcugccccggguccaccuuccagaaggcccugcugaucagcccccaccgguucggcgagacgaaggggaacuccgcgccgcucaucauccgcgagcccuucaucgccugcggccccaacgagugcaagcacuucgcccugacccacuacgccgcgcagcccggcggguacuacaacggcacccgcggggaccggaacaagcugcggcaccucaucagcgugaagcugggcaagaucccgaccguggagaacuccaucuuccacauggccgccuggagcggguccgccugccacgacggcaaggaguggacguacaucggcgucgacgggcccgacaacaacgcccugcucaaggugaaguacggcgaggcguacaccgacaccuaccacagcuacgccaacaagauccugcgcacccaggaguccgccugcaacugcaucgggggcaacugcuaccugaugaucacggacggcagcgccagcgggguguccgagugccgguuccucaagauccgcgagggccggaucaucaaggagaucuuccccaccgggcgcgucaagcacaccgaggagugcacgugcggcuucgccagcaacaagaccaucgagugcgcgugccgggacaacuccuacaccgccaagcgccccuucgugaagcugaacguggaggccgacaccgccgagauccggcugaugugcaccgacacguaccucgacaccccgcgccccgacgacgggagcaucaccggccccugcgaguccaacggcgacaaggggagcggcgggaucaagggcggguucguccaccagcggauggaguccaagaucggccgcugguacagccggaccauguccaagacggagcgcaugggcauggggcuguacgugaaguacgacggcgaccccugggccgacagcgacgcgcuggccuucuccggggugauggucagcaugaaggagccgggcugguacuccuucggguucgagaucaaggacaagaagugcgacgugcccugcaucggcaucgagauggugcacgacggcgggaaggagaccuggcacagcgccgccaccgccaucuacugccucaugggcuccgggcagcugcugugggacaccgucacgggcguggacauggcgcucuga

SEQ ID NO: 92962 - RNA, 1401 nt, Artificial Sequence; identical to SEQ ID NO: 92899
  derived and/or modified CDS sequence (opt1) from neuraminidase__InfluenzaB__AET74355

SEQ ID NO: 92963 - RNA, 1404 nt, Artificial Sequence
  derived and/or modified CDS sequence (opt1) from neuraminidase__InfluenzaB__AEY75594
augcugcccagcaccauccagaugcucacccuguuccugacguccggcggggugcuccugagccuguacgucuccgccagccucuccuaccugcuguacagcgacauccuccugaaguucuccccgaccgagaucaccgcccccaccaugccccuggacugcgcgaacgccagcaacgugcacgccgugaaccgcuccgccacgaagggcgucaccuuccuccugcugcccgagccggaguggaccuacccccggcucagcugccccggguccaccuuccagaaggcccugcugaucagcccccaccgcuucggcgagacgaaggggaacuccgcgccgcucaucauccgggagcccuucaucgccugcggccccaacgagugcaagcacuucgcccugacccacuacgccgcgcagcccggcggguacuacaacggcacccgcggggaccggaacaagcugcgccaccucaucagcgugaagcugggcaagaucccgaccguggagaacuccaucuuccacauggccgccuggagcggguccgccugccacgacggcaaggaguggacguacaucggcgucgacgggcccgacaacaacgcccugcucaagaucaaguacggcgaggcguacaccgacaccuaccacagcuacgccaacaacauccugcggacccaggaguccgccugcaacugcaucgggggcaacugcuaccugaugaucacggacggcagcgccagcgggguguccgagugccgcuuccucaagauccgggagggccgcaucaucaaggagaucuuccccaccgggcgggugaagcacaccgaggagugcacgugcggcuucgccagcaacaagaccaucgagugcgcgugccgcgacaacuccuacaccgccaagcggcccuucgucaagcugaacguggagaccgacaccgccgagauccgccugaugugcacggacaccuaccucgacaccccgcggcccgacgacgggagcaucaccggccccugcgaguccaacggcgacaaggggagcggcgggacgaagggcggguucgugcaccagcgcauggccuccaagaucggccggugguacagccgcaccauguccaagaccgagcggaagggcauggggcuguacgucaaguacgacggcgaccccuggaccgacagcgacgcccuggcguuccgcggggugaugguguccaugaaggagccgggcugguacagcuucggguucgagaucaaggacaagaagugcgacguccccugcaucggcaucgagauggugcacgacggcgggaaggagacguggcacuccgccgccaccgccaucuacugccucaugggcagcgggcagcugcugugggacaccgugaccggcgucgacauggcccucuga

SEQ ID NO: 92964 - RNA, 1401 nt, Artificial Sequence
  derived and/or modified CDS sequence (opt1) from neuraminidase__InfluenzaB__AFA45223
augcugcccagcaccauccagacccucacgcuguuccugaccuccggcggggugcuccugagccuguacgucuccgcccuccugagcuaccugcucuacuccgacauccugccgaaguucagccccaccgagaucaccgcccccacgaugucccuggacugcgcgaacgccagcaacgugcaggccgugaaccgcuccgccaccaagggcgucaccuuccuccugagcgagcccgaguggaccuacccgcggcuguccugccccgggagcacguuccagaaggcccuccugaucagcccccaccgcuucggcgagaccaaggggaacuccgcgccccugaucauccgggagccguucaucgccugcggccccaacgagugcaagcacuucgcccucacccacuacgccgcgcagcccggcggguacuacaacggcacccgcggggaccggaacaagcugcgccaccugaucuccgugaagcucggcaagauccccacgguggagaacagcaucuuccacauggccgccugguccgggagcgccugccacgacggcaaggaguggaccuacaucggcgucgacgggccggacaacgacgcccugcugaaggugaaguacggcgaggcguacaccgacaccuaccacuccuacgccaacaagauccuccggacgcaggagagcgccugcaacugcaucgggggcaacugcuaccugaugaucaccgacggcagcgccuccggggugagcgagugccgcuuccugaagauccgggagggccgcaucaucaaggagaucuuccccaccgggcgggucaagcacaccgaggagugcacgugcggcuucgccuccaacaagaccaucgagugcgcgugccgcgacaacagcuacaccgccaagcggcccuucgugaagcucaacguggagaccgacacggccgagauccgccugaugugcaccgacaccuaccuggacacgccccggccggacgacggguccaucaccggccccugcgagagcaacggcgacaagggguccggcgggaucaagggcggguucguccaccagcgcauggagagcaagaucggccggugguacucccgcaccaugagcaagaccgagcggaugggcauggggcucuacgugaaguacgacggcgaccccugggccgacuccgacgcccuggcguucagcggggugauggucuccaugaaggagcccggcugguacagcuucggguucgagaucaaggacaagaagugcgacgugccgugcaucggcaucgagauggugcacgacggcgggaaggagaccuggcacuccgccgccacggccaucuacugccugaugggcagcgggcagcuccugugggacaccgucaccggcguggacauggcccuguga

SEQ ID NO: 92965 - RNA, 1401 nt, Artificial Sequence
  derived and/or modified CDS sequence (opt1) from neuraminidase__InfluenzaB__AFA45226
augcugcccagcaccauccagacccucacgcuguuccugaccuccggcggggugcuccugagccuguacgucuccgccagccucuccuaccugcuguacagcgacauccuccugaaguucuccccgaccgagaccacggcccccaccaugagccuggacugcgcgaacgccuccaacgugcaggccgugaaccgcagcgccaccaagggcgucaccuuccuccugcccgagcccgaguggacguacccgcggcuguccugccccgggagcaccuuccagaaggcccuccugaucagcccccaccgcuucggcgagaccaaggggaacuccgcgccccugaucauccgggagccguucaucgccugcggccccaacgagugcaagcacuucgcccucacccacuacgccgcgcagcccggcggguacuacaacggcacgcgcggggaccggaacaagcugcgccaccugaucuccgugaagcucggcaaggugcccaccgucgagaacagcaucuuccacauggccgccugguccgggagcgccugccacgacggcaaggaguggaccuacaucggcguggacgggccggacaacgacgcccugcugaaggugaaguacggcgaggcguacaccgacacguaccacuccuacgccaacaagauccuccggacccaggagagcgccugcaacugcaucgggggcaacugcuaccugaugaucaccgacggcagcgccuccggggucagcgagugccgcuuccugaagauccgggagggccgcaucaucaaggagaucuuccccaccgggcgggugaagcacacggaggagugcacgugcggcuucgccuccaacaagaccaucgagugcgcgugccgcgacaacagcuacaccgccaagcggcccuucgugaagcucaacgucgagaccgacaccgccgagauccgccugaugugcaccgacaccuaccuggacacgccccggccggacgacggguccaucaccggccccugcgagagcaacggcgacaagggguccggcgggaucaagggcggguucgugcaccagcgcauggagagcaagaucggccggugguacucccgcaccaugagcaagaccgagcggaugggcauggggcucuacgugaaguacgacggcgaccccugggccgacuccgacgcccuggcguucagcggggucaugguguccaugaaggagcccggcugguacagcuucggguucgagaucaaggacaagaagugcgacgugccgugcaucggcaucgagaugguccacgacggcgggaagggcacguggcacuccgccgccaccgccaucuacugccugauggggagcggccagcuccugugggacaccgugaccggcguggacauggcccuguga

SEQ ID NO: 92966 - RNA, 1401 nt, Artificial Sequence
  derived and/or modified CDS sequence (opt1) from neuraminidase__InfluenzaB__AFA45229
augcugcccagcaccauccagacccucacgcuguuccugaccuccggcggggugcuccugagccuguacgucuccgcccuccugagcuaccugcucuacuccgacauccugcugaaguucagcccgaccgagaucaccgcccccacgaugccccucgacugcgcgaacgccuccaacgugcaggccgugaaccgcagcgccaccaagggcgucaccuuccugcugcccgagccggaguggaccuacccccggcucuccugccccgggagcacguuccagaaggcccugcugaucagcccccaccgcuucggcgagaccaaggggaacuccgcgccgcucaucauccgggagcccuucaucgccugcggccccaacgagugcaagcacuucgcccugacccacuacgccgcgcagcccggcggguacuacaacggcacccgcggggaccggaacaagcugcgccaccucaucuccgugaagcugggcaagaucccgacgguggagaacagcaucuuccacauggccgccugguccgggagcgccugccacgacggcaaggaguggaccuacaucggcgucgacgggcccgacaacgacgcccugcucaaggugaaguacggcgaggcguacaccgacaccuaccacuccuacgccaacaagauccugcggacgcaggagagcgccugcaacugcaucgggggcaacugcuaccugaugaucaccgacggcuccgccagcggggugagcgagugccgcuuccucaagauccgggagggccgcaucaucaaggagaucuuccccaccgggcgggucaagcacaccgaggagugcacgugcggcuucgccuccaacaagaccaucgagugcgcgugccgcgacaacagcuacaccgccaagcggcccuucgugaagcugaacguggagaccgacacggccgagauccgccugaugugcaccgacaccuaccucgacaccccgcggcccgacgacggguccaucacgggccccugcgagagcaacggcgacaagggguccggcgggaucaagggcggguucguccaccagcgcauggagagcaagaucggccggugguacucccgcaccaugagcaagaccgagcggaugggcauggggcuguacgugaaguacgacggcgaccccugggccgacuccgacgcccuggcguucagcggggugauggucuccaugaaggagccgggcugguacagcuucggguucgagaucaaggacaagaagugcgacgugcccugcaucggcaucgagauggugcacgacggcgggaaggagaccuggcacuccgccgccacggccaucuacugccucaugggcagcgggcagcugcugugggacaccgucaccggcguggacauggcccucuga

SEQ ID NO: 92967 - RNA, 1401 nt, Artificial Sequence; identical to SEQ ID NO: 92919
  derived and/or modified CDS sequence (opt1) from neuraminidase__InfluenzaB__AFA45235

SEQ ID NO: 92968 - RNA, 1401 nt, Artificial Sequence
  derived and/or modified CDS sequence (opt1) from neuraminidase__InfluenzaB__AFA45238
augcugcccagcaccauccagacccucacgcuguuccugaccuccggcggggugcuccugagccuguacgucuccgccagccucuccuaccugcuguacagcgacauccuccugaaguucuccccgaccaagaccacggcccccaccaugagccuggacugcgcgaacgccuccaacgugcaggccgugaaccgcagcgccaccaagggcgucaccuuccuccugcccgagcccgaguggacguacccgcggcuguccugccccgggagcaccuuccagaaggcccuccugaucagcccccaccgcuucggcgagaccaaggggaacuccgcgccccugaucauccgggagccguucaucgccugcggccccaacgagugcaagcacuucgcccucacccacuacgccgcgcagcccggcggguacuacaacggcacgcgcggggaccggaacaagcugcgccaccugaucuccgugaagcucggcaagauccccaccguggagaacagcaucuuccacauggccgccugguccgggagcgccugccacgacggcaaggaguggaccuacaucggcgucgacgggccggacaacgacgcccugcugaaggugaaguacggcgaggcguacaccgacacguaccacuccuacgccaacaagauccuccggacccaggagagcgccugcaacugcaucgggggcaacugcuaccugaugaucaccgacggcagcgccuccggggugagcgagugccgcuuccugaagauccgggagggccgcaucaucaaggagaucuuccccaccgggcgggucaagcacacggaggagugcacgugcggcuucgccuccaacaagaccaucgagugcgcgugccgcgacaacagcuacaccgccaagcggcccuucgugaagcucaacguggagaccgacaccgccgagauccgccugaugugcaccgacaccuaccuggacacgccccggccggacgacggguccaucaccggccccugcgagagcaacggcgacaagggguccggcgggaucaagggcggguucguccaccagcgcauggagagcaagaucggccggugguacucccgcaccaugagcaagaccgagcggaugggcauggggcucuacgugaaguacgacggcgaccccugggccgacuccgacgcccuggcguucagcggggugauggucuccaugaaggagcccggcugguacagcuucggguucgagaucaaggacaagaagugcgacgugccgugcaucggcaucgagauggugcacgacggcgggaaggagacguggcacuccgccgccaccgccaucuacugccugaugggcagcgggcagcuccugugggacaccgucaccggcguggacauggcccuguga

SEQ ID NO: 92969 - RNA, 1401 nt, Artificial Sequence
  derived and/or modified CDS sequence (opt1) from neuraminidase__InfluenzaB__AFA45241
augcugcccagcaccauccagacccucacgcuguuccugaccuccggcggggugcuccugagccuguacgucuccgccagccucuccuaccugcuguacagcgacauccuccugaaguucuccccgaccgagaucaccgcccccacgaugccccuggacugcgcgaacgccagcaacgugcaggccgugaaccgcuccgccaccaagggcgucaucuuccuccugcccgagccggaguggaccuacccccggcugagcugccccggguccaccuuccagaaggcccuccugaucagcccccaccgcuucggcgagacgaaggggaacuccgcgccgcugaucauccgggagcccuucaucgccugcggccccaacgagugcaagcacuucgcccucacccacuacgccgcgcagcccggcggguacuacaacggcacccgcggggaccggaacaagcugcgccaccugaucagcgugaagcucggcaagaucccgaccguggagaacuccaucuuccacauggccgccuggagcggguccgccugccacgacggcaaggaguggacguacaucggcgucgacgggcccgacaacaacgcccugcugaaggugaaguacggcgaggcguacaccgacaccuaccacagcuacgccaacaagauccuccggacccaggaguccgccugcaacugcaucgggggcaacugcuaccugaugaucacggacggcagcgccagcgggguguccgagugccgcuuccugaagauccgggagggccgcaucaucaaggagaucuuccccaccgggcgggucaagcacaccgaggagugcacgugcggcuucgccagcaacaagaccaucgagugcgcgugccgcgacaacuccuacaccgccaagcggcccuucgugaagcucaacguggagaccgacaccgccgagauccgccugaugugcacggacaccuaccuggacaccccgcggcccgacgacgggagcaucaccggccccugcgaguccaacggcgacaaggggagcggcgggaucaagggcggguucguccaccagcgcauggaguccaagaucggccggugguacagccgcacgauguccaagaccgagcggaugggcauggggcucuacgugaaguacgacggcgaccccugggccgacagcgacgcccugaccuucuccggggugauggucagcaugaaggagccgggcugguacuccuucggguucgagaucaaggacaagaagugcgacgugcccugcaucggcaucgagauggugcacgacggcgggaaggagaccuggcacagcgcggccacggccaucuacugccugaugggcuccgggcagcuccugugggacaccgucaccggcguggacauggcccuguga

SEQ ID NO: 92970 - RNA, 1401 nt, Artificial Sequence
  derived and/or modified CDS sequence (opt1) from neuraminidase__InfluenzaB__AFA45244
augcugcccagcaccauccagacccucacgcuguuccugaccuccggcggggugcuccugagccuguacgucuccgccagccucuccuaccugcuguacagcgacauccuccugaaguucuccccgaccgagaccacggcccccaccaugagccuggacugcgcgaacgccuccaacgugcaggccgugaaccgcagcgccaccaagggcgucaccuuccuccugcccgagcccgaguggacguacccgcggcuguccugccccgggagcaccuuccagaaggcccuccugaucagcccccaccgcuucggcgagaccaaggggaacuccgcgccccugaucauccgggagccguucaucgccugcggccccaacgagugcaagcacuucgcccucacccacuacgccgcgcagcccggcggguacuacaacggcacgcgcggggaccggaacaagcugcgccaccugaucuccgugaagcucggcaagauccccaccguggagaacagcaucuuccacauggccgccugguccgggagcgccugccacgacggcaaggaguggaccuacaucggcgucgacgggccggacaacgacgcccugcugaaggugaaguacggcgaggcguacaccgacacguaccacuccuacgccaacaagauccuccggacccaggagagcgccugcaacugcaucgggggcaacugcuaccugaugaucaccgacggcagcgccuccggggugagcgagugccgcuuccugaagauccgggagggccgcaucaucaaggagaucuuccccaccgggcgggucaagcacacggaggagugcacgugcggcuucgccuccaacaagaccaucgagugcgcgugccgcgacaacagcuacaccgccaagcggcccuucgugaagcucaacguggagaccgacaccgccgagauccgccugaugugcaccgacaccuaccuggacacgccccggccggacgacggguccaucaccggccccugcgagagcaacggcgacaagggguccggcgggaucaagggcggguucguccaccagcgcauggagagcaagaucggccggugguacucccgcaccaugagcaagaccgagcggaugggcauggggcucuacgugaaguacgacggcgaccccugggccgacuccgacgcccuggcguucagcggggugauggucuccaugaaggagcccggcugguacagcuucggguucgagaucaaggacaagaagugcgacgugccgugcaucggcaucgagauggugcacgacggcgggaagaagacguggcacuccgccgccaccgccaucuacugccugaugggcagcgggcagcuccugugggacaccgucaccggcguggacauggcccuguga

SEQ ID NO: 92971 - RNA, 1401 nt, Artificial Sequence
  derived and/or modified CDS sequence (opt1) from neuraminidase__InfluenzaB__AFA45247
augcugcccagcaccauccagacccucacgcuguuccugaccuccggcggggugcuccugagccuguacgucuccgccagccucuccuaccugcuguacagcgacauccuccugaaguucuccaccaccgagaucacggccccgaccaugccccuggacugcgcgaacgccagcaacgugcaggccgugaaccgcuccgccaccaagggcgucacccuccugcugcccgagcccgaguggacguacccgcggcucagcugccccggguccaccuuccagaaggcccugcugaucagcccccaccgcuucggcgagaccaaggggaacuccgcgccccucaucauccgggagccguucaucgccugcggccccaacgagugcaagcacuucgcccugacccacuacgccgcgcagcccggcggguacuacaacggcacgcgcggggaccggaacaagcugcgccaccucaucagcgugaagcugggcaagauccccaccguggagaacuccaucuuccacauggccgccuggagcggguccgccugccacgacggcaaggaguggaccuacaucggcgucgacgggccggacaacaacgcccugcucaaggugaaguacggcgaggcguacaccgacacguaccacagcuacgccaacaagauccugcggacccaggaguccgccugcaacugcaucgggggcaacugcuaccugauggugaccgacggcagcgccagcggggucuccgagugccgcuuccucaagauccgggagggccgcaucaucaaggagaucuuccccaccgggcgggugaagcacacggaggagugcacgugcggcuucgccagcaacaagaccaucgagugcgcgugccgcgacaacuccuacaccgccaagcggcccuucgugaagcugaacgucgagaccgacaccgccgagauccgccugaugugcaccgacaccuaccucgacacgccccggccggacgacgggagcaucaccggccccugcgaguccaacggcgacaaggggagcggcgggaucaagggcggguucgugcaccagcgcauggaguccaagaucggccggugguacagccgcaccauguccaagaccgagcggaugggcauggggcuguacgugaaguacgacggcgaccccugggccgacagcgacgcccuggucuucuccggggugauggugagcaugaaggagcccggcugguacuccuucggguucgagaucaaggacaagaagugcgacgucccgugcaucggcaucgagauggugcacgacggcgggaaggagacguggcacagcgcggccaccgccaucuacugccucaugggcuccgggcagcugcugugggacaccgugaccggcgucgacauggcccucuga

SEQ ID NO: 92972 - RNA, 1401 nt, Artificial Sequence; identical to SEQ ID NO: 92922
  derived and/or modified CDS sequence (opt1) from neuraminidase__InfluenzaB__AFA45250

SEQ ID NO: 92973 - RNA, 1401 nt, Artificial Sequence
  derived and/or modified CDS sequence (opt1) from neuraminidase__InfluenzaB__AFA45253
augcugcccagcaccauccagacccucacgcuguuccugaccuccggcggggugcuccugagccuguacgucuccgcccuccugagcuaccugcucuacuccgacauccugcugaaguucagcccgaccgagaucaccgcccccacgaugucccucgacugcgcgaacgccagcaacgugcaggccgugaaccgcuccgccaccaagggcgucaccuuccugcugcccgagcccgaguggaccuacccgcggcucagcugccccggguccacguuccagaaggcccugcugaucagcccccaccgcuucggcgagaccaaggggaacuccgcgccccucaucauccgggagccguucaucgccugcggccccaacgagugcaagcacuucgcccugacccacuacgccgcgcagcccggcggguacuacaacggcacccgcggggaccggaacaagcugcgccaccucaucagcgugaagcugggcaagauccccacgguggagaacuccaucuuccacauggccgccuggagcggguccgccugccacgacggcaaggaguggaccuacaucggcgucgacgggccggacaacgacgcccugcucaaggugaaguacggcgaggcguacaccgacaccuaccacagcuacgccaacaagauccugcggacgcaggaguccgccugcaacugcaucgggggcaacugcuaccugaugaucaccgacggcagcgccagcgggguguccgagugccgcuuccucaagauccgggagggccgcaucaucaaggagaucuuccccaccgggcgggucaagcacaccgaggagugcacgugcggcuucgccagcaacaagaccaucgagugcgugugccgcgacaacuccuacaccgcgaagcggcccuucgugaagcugaacgucgagaccgacacggccgagauccgccugaugugcaccgacaccuaccucgacacgccccggccggacgacgggagcaucaccggccccugcgaguccaacggcgacaaggggagcggcgggaucaagggcggguucgugcaccagcgcauggaguccaagaucggccggugguacagccgcaccauguccaagaccgagcggaugggcauggggcuguacgugaaguacgacggcgaccccugggccgacagcgacgcccuggccuucuccggggucauggugagcaugaaggagcccggcugguacuccuucggguucgagaucaaggacaagaagugcgacgugccgugcaucggcaucgagaugguccacgacggcgggaaggagaccuggcacagcgcggccacggccaucuacugccucaugggcuccgggcagcugcugugggacaccgugaccggcguggacauggcccucuga

SEQ ID NO: 92974 - RNA, 1401 nt, Artificial Sequence
  derived and/or modified CDS sequence (opt1) from neuraminidase__InfluenzaB__AFB77645
augcugcccagcaccauccagacccucacgcuguuccugaccuccggcggggugcuccugagccuguacgucuccgccagccucuccuaccugcuguacagcgacauccuccugaaguucuccccgaccgagaucaccgcccccgcgaugccccuggacugcgccaacgccagcaacgugcaggccgugaaccgcuccgccacgaagggcgucacccuccugcugcccgagccggaguggaccuacccccggcucagcugccccggguccaccuuccagaaggcgcugcugaucagcccccaccgcuucggcgagacgaaggggaacuccgccccgcucaucauccgggagcccuucaucgccugcggccccaacgagugcaagcacuucgcccugacccacuacgcggcccagcccggcggguacuacaacggcacccgcggggaccggaacaagcugcgccaccucaucagcgugaagcugggcaagaucccgaccguggagaacuccaucuuccacauggccgccuggagcggguccgccugccacgacggcaaggaguggacguacaucggcgucgacgggcccgacaacaacgcgcugcucaaggugaaguacggcgaggccuacaccgacaccuaccacagcuacgccaacaagauccugcggacccaggaguccgccugcaacugcaucgggggcaacugcuaccugaugaucacggacggcagcgccagcgggguguccgagugccgcuuccucaagauccgggagggccgcaucaucaaggagaucuuccccaccgggcgggucaagcacaccgaggagugcacgugcggcuucgcgagcaacaagaccaucgagugcgccugccgcgacaacuccuacaccgccaagcggcccuucgugaagcugaacguggagaccgacaccgccgagauccgccugaugugcacggacaccuaccucgacaccccgcggcccaacgacgggagcaucaccggccccugcgaguccgacggcgacaaggggagcggcgggaucaagggcggguucguccaccagcgcauggaguccaagaucggccggugguacagccgcacgauguccaagaccgagcggaugggcauggggcuguacgugaaguacgacggcgaccccugggccgacagcgacgcgcugguguucuccggggucauggugagcaugaaggagccgggcugguacuccuucggguucgagaucaaggacaagaagugcgacgugcccugcaucggcaucgagaugguccacgacggcgggaaggagaccuggcacagcgccgccaccgccaucuacugccucaugggcuccgggcagcugcugugggacacggugaccggcguggacauggcccucuga

SEQ ID NO: 92975 - RNA, 1401 nt, Artificial Sequence
  derived and/or modified CDS sequence (opt1) from neuraminidase__InfluenzaB__AFB77647
augcugcccagcaccauccagacccucacgcuguuccugaccuccggcggggugcuccugagccuguacgucuccgccagccucuccuaccugcuguacagcgacauccuccugaaguucuccccgaccgagaucaccgcccccgcgaucccccuggacugcgccaacgccagcaacgugcaggccgugaaccgcuccgccacgaagggcgucacccuccugcugcccgagccggaguggaccuacccccggcucagcugccccggguccaccuuccagaaggcgcugcugaucagcccccaccgcuucggcgagacgaaggggaacuccgccccgcucaucauccgggagcccuucaucgccugcggccccaacgagugcaagcacuucgcccugacccacuacgcggcccagcccggcggguacuacaacggcacccgcggggaccggaacaagcugcgccaccucaucagcgugaagcugggcaagaucccgaccguggagaacuccaucuuccacauggccgccuggagcggguccgccugccacgacggcaaggaguggacguacaucggcgucgacgggcccgacaacaacgcgcugcucaaggugaaguacggcgaggccuacaccgacaccuaccacagcuacgccaacaagauccugcggacccaggaguccgccugcaacugcaucgggggcaacugcuaccugaugaucacggacggcagcgccagcgggguguccgagugccgcuuccucaagauccgggagggccgcaucaucaaggagaucuuccccaccgggcgggucaagcacaccgaggagugcacgugcggcuucgcgagcaacaagaccaucgagugcgccugccgcgacaacuccuacaccgccaagcggcccuucgugaagcugaacguggagaccgacaccgccgagauccgccugaugugcacggacaccuaccucgacaccccgcggcccaacgacgggagcaucaccggccccugcgaguccgacggcgacaaggggagcggcgggaucaagggcggguucguccaccagcgcauggaguccaagaucggccggugguacagccgcacgauguccaagaccgagcggaugggcauggggcuguacgugaaguacgacggcgaccccugggccgacagcgacgcgcuggccuucuccggggugauggucagcaugaaggagccgggcugguacuccuucggguucgagaucaaggacaagaagugcgacgugcccugcaucggcaucgagauggugcacgacggcgggaaggagaccuggcacagcgccgccaccgccaucuacugccucaugggcuccgggcagcugcugugggacacggucaccggcguggacauggcgcucuga

SEQ ID NO: 92976 - RNA, 1401 nt, Artificial Sequence
  derived and/or modified CDS sequence (opt1) from neuraminidase__InfluenzaB__AFB77649
augcugcccagcaccauccagacccucacgcuguuccugaccuccggcggggugcuccugagccuguacgucuccgccagccucuccuaccugcuguacagcgacauccuccugaaguucuccccgaccgagaucaccgcccccgcgaugccccuggacugcgccaacgccagcaacgugcaggccgugaaccgcuccgccacgaagggcgucacccuccugcugcccgagccggaguggaccuacccccggcucagcugccccggguccaccuuccagaaggcgcugcugaucagcccccaccgcuucggcgagacgaaggggaacuccgccccgcucaucauccgggagcccuucaucgccugcggccccaacgagugcaagcacuucgcccugacccacuacgcggcccagcccggcggguacuacaacggcacccgcggggaccggaacaagcugcgccaccucaucagcgugaagcugggcaagaucccgaccguggagaacuccaucuuccacauggccgccuggagcggguccgccugccacgacggcaaggaguggacguacaucggcgucgacgggcccgacaacaacgcgcugcucaaggugaaguacggcgaggccuacaccgacaccuaccacagcuacgccaacaagauccugcggacccaggaguccgccugcaacugcaucgggggcaacugcuaccugaugaucacggacggcagcgccagcgggguguccgagugccgcuuccucaagauccgggagggccgcaucaucaaggagaucuuccccaccgggcggaucaagcacaccgaggagugcacgugcggcuucgcgagcaacaagaccaucgagugcgccugccgcgacaacuccuacaccgccaagcggcccuucgucaagcugaacguggagaccgacaccgccgagauccgccugaugugcacggacaccuaccucgacaccccgcggcccaacgacgggagcaucaccggccccugcgaguccgacggcgacaaggggagcggcgggaucaagggcggguucgugcaccagcgcauggaguccaagaucggccggugguacagccgcacgauguccaagaccgagcggaugggcauggggcuguacgucaaguacgacggcgaccccugggccgacagcgacgcgcuggccuucuccggggugauggugagcaugaaggagccgggcugguacuccuucggguucgagaucaaggacaagaagugcgacguccccugcaucggcaucgagauggugcacgacggcgggaaggagaccuggcacagcgccgccaccgccaucuacugccucaugggcuccgggcagcugcugugggacacggugaccggcgucgacauggcgcucuga

SEQ ID NO: 92977 - RNA, 1401 nt, Artificial Sequence
  derived and/or modified CDS sequence (opt1) from neuraminidase__InfluenzaB__AFB77651
augcugcccagcaccauccagacccucacgcuguuccugaccuccggcggggugcuccugagccuguacgucuccgccagccucuccuaccugcuguacagcgacauccuccugaaguucuccccgaccgagaucaccgcccccgcgaugccccuggacugcgccaacgccagcaacgugcaggccgugaaccgcuccgccacgaagggcgucacccuccugcugcccgagccggaguggaccuacccccggcucagcugccccggguccaccuuccagaaggcgcugcugaucagcccccaccgcuucggcgagacgaaggggaacuccgccccgcucaucauccgggagcccuucaucgccugcggccccaacgagugcaagcacuucgcccugacccacuacgcggcccagcccggcggguacuacaacggcacccgcggggaccggaacaagcugcgccaccucaccagcgugaagcugggcaagaucccgacgguggagaacuccaucuuccacauggccgccuggagcggguccgccugccacgacggcaaggaguggaccuacaucggcgucgacgggcccgacaacaacgcgcugcucaaggugaaguacggcgaggccuacaccgacaccuaccacagcuacgccaacaagauccugcggacgcaggaguccgccugcaacugcaucgggggcaacugcuaccugaugaucaccgacggcagcgccagcgggguguccgagugccgcuuccucaagauccgggagggccgcaucaucaaggagaucuuccccaccgggcgggucaagcacaccgaggagugcacgugcggcuucgcgagcaacaagaccaucgagugcgccugccgcgacaacuccuacaccgccaagcggcccuucgugaagcugaacguggagaccgacacggccgagauccgccugaugugcaccgacaccuaccucgacaccccgcggcccaacgacgggagcaucacgggccccugcgaguccgacggcgacaaggggagcggcgggaucaagggcggguucguccaccagcgcauggaguccaagaucggccggugguacagccgcaccauguccaagaccgagcggaugggcauggggcuguacgugaaguacgacggcgaccccugggccgacagcgacgcgcuggccuucuccggggugauggucagcaugaaggagccgggcugguacuccuucggguucgagaucaaggacaagaagugcgacgugcccugcaucggcaucgagauggugcacgacggcgggaaggagaccuggcacagcgccgccacggccaucuacugccucaugggcuccgggcagcugcugugggacaccgucaccggcguggacauggcgcucuga

SEQ ID NO: 92978 - RNA, 1401 nt, Artificial Sequence
  derived and/or modified CDS sequence (opt1) from neuraminidase__InfluenzaB__AFE00364
augcugcccagcaccauccagaugcucacccuguuccugacguccggcggggugcuccugagccuguacgucuccgccagccucuccuaccugcuguacagcgacauccuccugaaguucuccccgaccgagaucaccgcccccaccaugccccuggacugcgcgaacgccagcaacgugcacgccgugaaccgguccgccacgaagggcgucaccuuccuccugcccgagccggaguggaccuacccccggcugagcugccccggguccaccuuccagaaggcccuccugaucagcccccaccgcuucggcgagacgaaggggaacuccgcgccgcugaucauccgggagcccuucaucgccugcggccccaacgagugcaagcacuucgcccucacccacuacgccgcgcagcccggcggguacuacaacggcacccgcggggaccggaaccgccugcggcaccugaucagcgugaagcucggcaagaucccgaccguggagaacuccaucuuccacauggccgccuggagcggguccgccugccacgacggcaaggaguggacguacaucggcgucgacgggcccgacaacaacgcccugcugaagaucaaguacggcgaggcguacaccgacaccuaccacagcuacgccaacaacauccuccgcacccaggaguccgccugcaacugcaucgggggcaacugcuaccugaugaucacggacggcagcgccagcgggguguccgagugccgguuccugaagauccgcgagggccggaucaucaaggagaucuuccccaccgggcgcgugaagcacaccgaggagugcacgugcggcuucgccagcaacaagaccaucgagugcgcgugccgggacaacuccuacaccgccaagcgccccuucgucaagcucaacguggagaccgacaccgccgagauccggcugaugugcacggacaccuaccuggacaccccgcgccccgacgacgggagcaucaccggccccugcgaguccaacggcgacaaggggagcggcgggaucaagggcggguucgugcaccagcggauggccuccaagaucggccgcugguacagccggacgauguccaagaccgagcgcaagggcauggggcucuacgucaaguacgacggcgaccccuggaccgacagcgacgcccuggcguuccgcggggugaugguguccaugaaggagccgggcugguacagcuucggguucgagaucaaggacaagaagugcgacguccccugcaucggcaucgagauggugcacgacggcgggaaggagaccuggcacuccgccgccacggccaucuacugccugaugggcagcgggcagcuccugugggacaccgugaccggcgucgacauggcccuguga

SEQ ID NO: 92979 - RNA, 1401 nt, Artificial Sequence
  derived and/or modified CDS sequence (opt1) from neuraminidase__InfluenzaB__AFF18536
augcugcccagcaccauccagaugcucacccuguuccugacguccggcggggugcuccugagccuguacgucuccgccagccucuccuaccugcuguacagcgacauccuccugaaguucuccccgaccgagaucaccgcccccaccaugccccuggacugcgcgaacgccagcaacgugcacgccgugaaccgcuccgccacgaagggcgucaccuuccuccugcccgagccggaguggaccuacccccggcugagcugccccggguccaccuuccagaaggcccuccugaucagcccccaccgcuucggcgagacgaaggggaacuccgcgccgcugaucauccgggagcccuucaucgccugcggccccaacgagugccgccacuucgcccucacccacuacgccgcgcagcccggcggguacuacaacggcacccgcggggaccggaacaagcugcggcaccugaucagcgugaagcucggcaagaucccgaccguggagaacuccaucuuccacauggccgccuggagcggguccgccugccacgacggcaaggaguggacguacaucggcgucgacgggcccgacaacaacgcccugcugaagaucaaguacggcgaggcguacaccgacaccuaccacagcuacgccaacaacauccuccgcacccaggaguccgccugcaacugcauccgggggaacugcuaccugaugaucacggacggcagcgccagcggcguguccgagugccgcuuccugaagauccgggaggggcgcaucaucaaggagaucuuccccaccggccgggugaagcacaccgaggagugcacgugcggguucgccagcaacaagaccaucgagugcgcgugccgcgacaacuccuacaccgccaagcggcccuucgucaagcucaacguggagaccgacaccgccgagauccgccugaugugcacggacaccuaccuggacaccccgcggcccgacgacggcagcaucaccgggcccugcgaguccaacggcgacaagggcagcgggggcaucaagggcggguucgugcaccagcgcauggccuccaagaucgggcggugguacagccgcacgauguccaagaccgagcggaagggcaugggccucuacgucaaguacgacggggaccccuggaccgacagcgacgcccuggcguuccgcggcgugaugguguccaugaaggagccggggugguacagcuucggcuucgagaucaaggacaagaagugcgacguccccugcaucgggaucgagauggugcacgacggcggcaaggagaccuggcacuccgccgccacggccaucuacugccugauggggagcggccagcuccugugggacaccgugaccggggucgacauggcccuguga

SEQ ID NO: 92980 - RNA, 1401 nt, Artificial Sequence
  derived and/or modified CDS sequence (opt1) from neuraminidase__InfluenzaB__AFF18545
augcugcccagcaccauccagaugcucacccuguuccugacguccggcggggugcuccugagccuguacgucuccgccagccucuccuaccugcuguacagcgacauccuccugaaguucuccccgaccgagaucaccgcccccaccaugccccuggacugcgcgaacgccagcaacgugcacgccgugaaccgcuccgccacgaagggcgucaccuuccuccugcccgagccggaguggaccuacccccggcugagcugccccggguccaccuuccagaaggcccuccugaucagcccccaccgcuucggcgagacgaaggggaacuccgcgccgcugaucauccgggagcccuucaucgccugcggccccaacgagugcaagcacuucgcccucacccacuacgccgcgcagcccggcggguacuacaacggcacccgcggggaccggaacaagcugcgccaccugaucagcgugaagcucggcaagaucccgaccguggagaacuccaucuuccacauggccgccuggagcggguccgccugccacgacggcaaggaguggacguacaucggcgucgacgggcccgacaacaacgcccugcugaagaucaaguacggcgaggcguacaccgacaccuaccacagcuacgccaacaacauccuccggacccaggaguccgccugcaacugcaucgggggcaacugcuaccugaugaucacggacggcagcgccagcgggguguccgagugccgcuuccugaagauccgggagggccgcaucaucaaggagaucuuccccaccgggcgggugaagcacaccgaggagugcacgugcggcuucgccagcaacaagaccaucgagugcgcgugccgcgacaacuccuacaccgccaagcggcccuucgucaagcucaacguggagaccgacaccgccgagauccgccugaugugcacggacaccuaccuggacaccccgcggcccgacgacgggagcaucaccggccccugcgaguccaacggcgacaaggggagcggcgggaucaagggcggguucgugcaccagcgcauggccuccaagaucggccggugguacagccgcacgauguccaagaccgagcggaagggcauggggcucuacgucaaguacgacggcgaccccuggaccgacagcgacgcccuggcguuccgcggggugaugguguccaugaaggagccgggcugguacagcuucggguucgagaucaaggacaagaagugcgacguccccugcaucggcaucgagauggugcacgacggcgggaaggagaccuggcacuccgccgccacggccaucuacugccugaugggcagcgggcagcuccugugggacaccgugaccggcgucgacauggcccuguga

SEQ ID NO: 92981 - RNA, 1401 nt, Artificial Sequence; identical to SEQ ID NO: 92841
  derived and/or modified CDS sequence (opt1) from neuraminidase__InfluenzaB__AFH34933

SEQ ID NO: 92982 - RNA, 1401 nt, Artificial Sequence; identical to SEQ ID NO: 92841
  derived and/or modified CDS sequence (opt1) from neuraminidase__InfluenzaB__AFH34939

SEQ ID NO: 92983 - RNA, 1401 nt, Artificial Sequence; identical to SEQ ID NO: 92779
  derived and/or modified CDS sequence (opt1) from neuraminidase__InfluenzaB__AFH57869

SEQ ID NO: 92984 - RNA, 1401 nt, Artificial Sequence
  derived and/or modified CDS sequence (opt1) from neuraminidase__InfluenzaB__AFH57891
augcugcccagcaccauccagacccucacgcuguuccugaccuccggcggggugcuccugagccuguacgucuccgccagccucuccuaccugcuguacagcgacauccuccugaaguucucccagaccgagaucaccgccccgaucaugccccuggacuacgcgaacgccagcaacgugcaggccgugaaccacuccgccgccaagggcgucacgcuccugcugcccgagcccgaguggaccuacccgcgccucagcugccccggguccaccuuccagaaggcgcugcugaucagcccccaccgguucggcgagaccaaggggaacuccgcgccccucaucauccgcgagccguucaucgccugcggccccacggagugcaagcacuucgcccugacccacuacgccgcccagcccggcggguacuacaacggcacccgggaggaccgcaacaagcugcggcaccucaucagcgugaagcuggggaagauccccaccguggagaacuccaucuuccacauggccgccuggagcggcuccgccugccacgacgggaaggaguggacguacaucggcgucgacggcccggacagcaacgcgcugcucaagaucaaguacggggaggccuacaccgacaccuaccacuccuacgccaagaacauccugcgcacccaggagagcgccugcaacugcaucggcggggacugcuaccugaugaucacggacggccccgccagcggcaucuccgagugccgguuccucaagauccgcgaggggcggaucaucaaggagaucuuccccaccggccgcgugaagcacaccgaggagugcacgugcggguucgcgagcaacaagaccaucgagugcgccugccgggacaacuccuacaccgccaagcgccccuucgugaagcugaacgucgagaccgacaccgccgagauccggcugaugugcacggagaccuaccucgacaccccgcgccccaacgacggcagcaucaccgggcccugcgaguccgacggcgacaagggcagcgggggcaucaagggcggguucgugcaccagcggauggccuccaagaucgggcgcugguacagccggacgauguccaagaccaagcgcaugggcaugggccuguacgugaaguacgacggggaccccuggaccgacagcgaggcgcuggcccucuccggcgucauggugagcauggaggagccggggugguacuccuucggcuucgagaucaaggacaagaagugcgacgugcccugcaucgggaucgagaugguccacgacggcggcaagaccacguggcacagcgccgccaccgccaucuacugccugaugggguccggccagcugcucugggacaccgugaccgggguggacauggcgcuguga

SEQ ID NO: 92985 - RNA, 1401 nt, Artificial Sequence
  derived and/or modified CDS sequence (opt1) from neuraminidase__InfluenzaB__AFH57913
augcugcccagcaccauccagacccucacgcuguuccugaccuccggcggggugcuccugagccuguacgucuccgccagccucuccuaccugcuguacagcgacauccuccugaaguucuccccgaccgagaucaccgcccccacgaugccccuggacugcgcgaacgccagcaacgugcaggccgugaaccgcuccgccaccaagggcgucacccuccugcugcccgagccggaguggaccuacccccggcucagcugccccggguccacguuccagaaggcccugcugaucagcccccaccgcuucggcgagaccaaggggaacuccgcgccgcucaucauccgggagcccuucaucgccugcggccccaacgagugcaagcacuucgcccugacccacuacgccgcgcagcccggcggguacuacaacggcacccgcggggaccggaacaagcugcgccaccucaucagcgugaagcugggcaagaucccgacgguggagaacuccaucuuccacauggccgccuggagcggguccgccugccacgacggcaaggaguggaccuacaucggcgucgacgggcccgacaacaacgcccugcucaaggugaaguacggcgaggcguacaccgacaccuaccacagcuacgccaacaagauccugcggacgcaggaguccgccugcaacugcaucgggggcaacugcuaccugaugaucaccgacggcagcgccagcgggguguccgagugccgcuuccucaagauccgggagggccgcaucaucaaggagaucuuccccaccgggcgggucaagcacaccgaggagugcacgugcggcuucgccagcaacaagaccaucgagugcgcgugccgcgacaacuccuacaccgccaagcggcccuucgugaagcugaacguggagaccgacacggccgagauccgccugaugugcaccgacaccuaccucgacaccccgcggcccaacgacgggagcaucacgggccccugcgaguccaacggcgacaaggggagcggcgggaucaagggcggguucguccaccagcgcauggaguccaagaucggccggugguacagccgcaccauguccaagaccgagcggaugggcauggggcuguacgugaaguacgacggcgaccccugggccgacagcgacgcccuggcguucuccggggugauggucagcaugaaggagccgggcugguacuccuucggguucgagaucaaggacaagaagugcgacgugcccugcaucggcaucgagauggugcacgacggcgggaaggagaccuggcacagcgccgccacggccaucuacugccucaugggcuccgggcagcugcugugggacaccgucaccggcguggacauggcccucuga

SEQ ID NO: 92986 - RNA, 1401 nt, Artificial Sequence; identical to SEQ ID NO: 92841
  derived and/or modified CDS sequence (opt1) from neuraminidase__InfluenzaB__AFH57935

SEQ ID NO: 92987 - RNA, 1401 nt, Artificial Sequence; identical to SEQ ID NO: 92841
  derived and/or modified CDS sequence (opt1) from neuraminidase__InfluenzaB__AFH57946

SEQ ID NO: 92988 - RNA, 1401 nt, Artificial Sequence; identical to SEQ ID NO: 92841
  derived and/or modified CDS sequence (opt1) from neuraminidase__InfluenzaB__AFH57957

SEQ ID NO: 92989 - RNA, 1401 nt, Artificial Sequence; identical to SEQ ID NO: 92919
  derived and/or modified CDS sequence (opt1) from neuraminidase__InfluenzaB__AFH57968

SEQ ID NO: 92990 - RNA, 1401 nt, Artificial Sequence
  derived and/or modified CDS sequence (opt1) from neuraminidase__InfluenzaB__AFH57979
augcugcccagcaccauccagacccucacgcuguuccugaccuccggcggggugcuccugagccuguacgucuccgcccuccugagcuaccugcucuacuccgacauccugcugaaguucagcccgaccgagaucaccgcccccacgaugucccucgacugcgcgaacgccagcaacgugcaggccgugaaccgcuccgccaccaagggcgucaucuuccugcugcccgagcccgaguggaccuacccgcggcucagcugccccggguccaccuuccagaaggcccugcugaucagcccccaccgcuucggcgagacgaaggggaacuccgcgccccucaucauccgggagccguucaucgccugcggccccaacgagugcaagcacuucgcccugacccacuacgccgcgcagcccggcggguacuacaacggcacccgcggggaccggaacaagcugcgccaccucaucagcgugaagcugggcaagauccccaccguggagaacuccaucuuccacauggccgccuggagcggguccgccugccacgacggcaaggaguggacguacaucggcgucgacgggccggacaacgacgcccugcucaaggugaaguacggcgaggcguacaccgacaccuaccacagcuacgccaacaagauccugcggacccaggaguccgccugcaacugcaucgggggcaacugcuaccugaugaucacggacggcagcgccagcgggguguccgagugccgcuuccucaagauccgggagggccgcaucaucaaggagaucuuccccaccgggcgggucaagcacaccgaggagugcacgugcggcuucgccagcaacaagaccaucgagugcgcgugccgcgacaacuccuacaccgccaagcggcccuucgugaagcugaacguggagaccgacaccgccgagauccgccugaugugcacggacaccuaccucgacacgccccggccggacgacgggagcaucaccggccccugcgaguccaacggcgacaaggggagcggcgggaucaagggcggguucguccaccagcgcauggaguccaagaucggccggugguacagccgcaccauguccaagaccgagcggaugggcauggggcuguacgugaaguacgacggcgaccccugggccgacagcgacgcccuggcguucuccggggugauggucagcaugaaggagcccggcugguacuccuucggguucgagaucaaggacaagaagugcgacgugccgugcaucggcaucgagauggugcacgacggcgggaaggagaccuggcacagcgccgccaccgccaucuacugccucaugggcuccgggcagcugcugugggacacggucaccggcguggacauggcccucuga

SEQ ID NO: 92991 - RNA, 1401 nt, Artificial Sequence; identical to SEQ ID NO: 92608
  derived and/or modified CDS sequence (opt1) from neuraminidase__InfluenzaB__AFH58253

SEQ ID NO: 92992 - RNA, 1401 nt, Artificial Sequence; identical to SEQ ID NO: 92671
  derived and/or modified CDS sequence (opt1) from neuraminidase__InfluenzaB__AFH58264

SEQ ID NO: 92993 - RNA, 1401 nt, Artificial Sequence; identical to SEQ ID NO: 92812
  derived and/or modified CDS sequence (opt1) from neuraminidase__InfluenzaB__AFH58275

SEQ ID NO: 92994 - RNA, 1401 nt, Artificial Sequence; identical to SEQ ID NO: 92812
  derived and/or modified CDS sequence (opt1) from neuraminidase__InfluenzaB__AFH58286

SEQ ID NO: 92995 - RNA, 1401 nt, Artificial Sequence; identical to SEQ ID NO: 92985
  derived and/or modified CDS sequence (opt1) from neuraminidase__InfluenzaB__AFH58297

SEQ ID NO: 92996 - RNA, 1401 nt, Artificial Sequence
  derived and/or modified CDS sequence (opt1) from neuraminidase__InfluenzaB__AFH58308
augcugcccagcaccauccagacccucacgcuguuccugaccuccggcggggugcuccugagccuguacgucuccgccagccucuccuaccugcuguacagcgacauccuccugaaguucucccgcaccgagaccacggccccgaucaugccccuggacugcgcgaacgccagcaacgugcaggccgugaaccgguccgccaccaagggcgucacccuccugcugcccgagcccgaguggaccuacccgcgccucagcugccccggguccacguuccagaaggcccugcugaucagcccccaccgguucggcgagaccaaggggaacuccgcgccccucaucauccgcgagccguucaucgccugcggccccaaggagugcaagcacuucgcccugacccacuacgccgcgcagcccggcggguacuacaacggcacccgggaggaccgcaacaagcugcggcaccucaucagcgugaagcuggggaagauccccacgguggagaacuccaucuuccacauggccgccuggagcggcuccgccugccacgacgggcgcgaguggaccuacaucggcgucgacggcccggacagcaacgcccugcucaagaucaaguacggggaggcguacaccgacaccuaccacuccuacgccaagaacauccugcggacgcaggagagcgccugcaacugcaucggcggggacugcuaccugaugaucaccgacggccccgccagcggcaucuccgagugccgcuuccucaagauccgggaggggcgcaucaucaaggagaucuuccccaccggccgggugaagcacaccgaggagugcacgugcggguucgccagcaacaagaccaucgagugcgcgugccgcgacaacuccuacaccgccaagcggcccuucgugaagcugaacgucgagaccgacacggccgagauccgccugaugugcaccgagaccuaccucgacaccccgcggcccaacgacggcagcaucacggggcccugcgaguccaacggcgacaagggcagcgggggcaucaagggcggguucgugcaccagcgcauggccuccaagaucgggcggugguacagccgcaccauguccaagaccaagcggaugggcaugggccuguacgugaaguacgacggggaccccuggaccgacagcgaggcccuggcgcucuccggcgucauggugagcauggaggagccggggugguacuccuucggcuucgagaucaaggacaagaagugcgacgugcccugcaucgggaucgagaugguccacgacggcggcaagacgaccuggcacagcgccgccaccgccaucuacugccugaugggguccggccagcugcucugggacaccgugacggggguggacauggcccuguga

SEQ ID NO: 92997 - RNA, 1401 nt, Artificial Sequence; identical to SEQ ID NO: 92996
  derived and/or modified CDS sequence (opt1) from neuraminidase__InfluenzaB__AFH58319

SEQ ID NO: 92998 - RNA, 1401 nt, Artificial Sequence
  derived and/or modified CDS sequence (opt1) from neuraminidase__InfluenzaB__AFH58341
augcugcccagcaccauccagacccucacgcuguuccugaccuccggcggggugcuccugagccuguacgucuccgccagccucuccuaccugcuguacagcgacauccuccugaaguucucccgcaccgagaucaccgccccgaucaugccccuggacugcgcgaacgccagcaacgugcaggccgugaaccgguccgccacgaagggcgucacccuccugcugcccgagcccgaguggaccuacccgcgccucagcugccccggguccaccuuccagaaggcccugcugaucagcccccaccgguucggcgagacgaaggggaacuccgcgccccucaucauccgcgagccguucaucgccugcggccccaaggagugcaagcacuucgcccugacccacuacgccgcgcagcccggcggguacuacaacggcacccgggaggaccgcaacaagcugcggcaccucaucagcgugcgccuggggaagauccccaccguggagaacuccaucuuccacauggccgccuggagcggcuccgccugccacgacgggcgggaguggacguacaucggcgucgacggcccggacagcaacgcccugcucaagaucaaguacggggaggcguacaccgacaccuaccacuccuacgccaagaacauccugcgcacccaggagagcgccugcaacugcaucggcggggacugcuaccugaugaucacggacggccccgccagcggcaucuccgagugccgguuccucaagauccgcgaggggcggaucaucaaggagaucuuccccaccggccgcgugaagcacaccgaggagugcacgugcggguucgccagcaacaagaccaucgagugcgcgugccgggacaacuccuacaccgccaagcgccccuucgugaagcugaacgucgagaccgacaccgccgagauccggcugaugugcacggagaccuaccucgacaccccgcgccccaacgacggcagcaucaccgggcccugcgaguccaacggcgacaagggcagcgggggcaucaagggcggguucgugcaccagcggauggccuccaagaucgggcgcugguacagccggacgauguccaagaccaagcgcaugggcaugggccuguacgugaaguacgacggggaccccuggaccgacagcgaggcccuggcgcucuccggcgucauggugagcauggaggagccggggugguacuccuucggcuucgagaucaaggacaagaagugcgacgugcccugcaucgggaucgagaugguccacgacggcggcaagaccacguggcacagcgccgccaccgccaucuacugccugaugggguccggccagcugcucugggacaccgugaccggggugaacaugacgcuguga

SEQ ID NO: 92999 - RNA, 1401 nt, Artificial Sequence
  derived and/or modified CDS sequence (opt1) from neuraminidase__InfluenzaB__AFH58363
augcugcccagcaccauccagacccucacgcuguuccugaccuccggcggggugcuccugagccuguacgucuccgccagccucuccuaccugcuguacagcgacauccuccugaaguucccguccaccgagaucaccgcccccacgaugccccuggacugcgcgaacgccagcaacgugcaggccgugaaccgcuccgccaccaagggcgucaccuuccuccugcccgagccggaguggaccuacccccggcugagcugccccggguccacguuccagaaggcccuccugaucagcccccaccgcuucggcgagaccaaggggaacuccgcgccgcugaucauccgggagcccuucaucgccugcggccccaaggagugcaagcacuucgcccucacccacuacgccgcgcagcccggcggguacuacaacggcacccgcggggaccggaacaagcugcgccaccugaucagcgugaagcucggcaagaucccgacgguggagaacuccaucuuccacauggccgccuggagcggguccgccugccacgacggcaaggaguggaccuacaucggcgucgacgggcccgacaacaacgcccugcugaagaucaaguacggcgaggcguacaccgacaccuaccacagcuacgccaacaacauccuccggacgcaggaguccgccugcaacugcaucgggggcaacugcuaccugaugaucaccgacggcagcgccagcgggguguccgagugccgcuuccugaagauccgggagggccgcaucaucaaggagaucuuccccaccgggcggaucaagcacaccgaggagugcacgugcggcuucgccagcaacaagaccaucgagugcgcgugccgcgacaacuccuacaccgccaagcggcccuucgugaagcucaacgucgagaccgacacggccgagauccgccugaugugcaccgagaccuaccuggacaccccgcggcccgacgacgggagcaucacgggccccugcgaguccaacggcgggaagggcagcgggggcaucaagggcggguucgugcaccagcgcauggccuccaagaucggccggugguacagccgcaccauguccaagaccgagcggaaggggaugggccucuacgugaaguacgacggggaccccugggccgacagcgacgcgcuggccuucuccggcgucauggugagcauggaggagccggggugguacuccuucggcuucgagaucaaggacaagaagugcgacgugcccugcaucggcaucgagaugguccacgacgggggcaaggagaccuggcacagcgccgccacggccaucuacugccugaugggguccggccagcuccugugggacaccgugaccggcgugaacauggcgcuguga

SEQ ID NO: 93000 - RNA, 1401 nt, Artificial Sequence; identical to SEQ ID NO: 92999
  derived and/or modified CDS sequence (opt1) from neuraminidase__InfluenzaB__AFH58374

SEQ ID NO: 93001 - RNA, 1401 nt, Artificial Sequence; identical to SEQ ID NO: 92985
  derived and/or modified CDS sequence (opt1) from neuraminidase__InfluenzaB__AFH58385

SEQ ID NO: 93002 - RNA, 1401 nt, Artificial Sequence; identical to SEQ ID NO: 92985
  derived and/or modified CDS sequence (opt1) from neuraminidase__InfluenzaB__AFH58396

SEQ ID NO: 93003 - RNA, 1401 nt, Artificial Sequence; identical to SEQ ID NO: 92985
  derived and/or modified CDS sequence (opt1) from neuraminidase__InfluenzaB__AFH58407

SEQ ID NO: 93004 - RNA, 1401 nt, Artificial Sequence; identical to SEQ ID NO: 92985
  derived and/or modified CDS sequence (opt1) from neuraminidase__InfluenzaB__AFH58418

SEQ ID NO: 93005 - RNA, 1401 nt, Artificial Sequence
  derived and/or modified CDS sequence (opt1) from neuraminidase__InfluenzaB__AFH58429
augcugcccagcaccauccagacccucacgcuguuccugaccuccggcggggugcuccugagccuguacgucuccgccagccucuccuaccugcuguacagcgacauccuccugaaguucuccccgaccgagaucaccgcccccacgaugccccuggacugcgcgaacgccagcaacgugcaggccgugaaccgcuccgccaccaagggcgucacccuccugcugcccgagccggaguggaccuacccccggcucagcugccccggguccacguuccagaaggcccugcugaucagcccccaccgcuucggcgagaccaaggggaacuccgcgccgcucaucauccgggagcccuucaucgccugcggccccaacgagugcaagcacuucgcccugacccacuacgccgcgcagcccggcggguacuacaacggcacccgcggggaccggaacaagcugcgccaccucaucagcgugaagcugggcaagaucccgacgguggagaacuccaucuuccacauggccgccuggagcggguccgccugccacgacggcaaggaguggaccuacaucggcgucgacgggcccgacaacaacgcccugcucaaggugaaguacggcgaggcguacaccgacaccuaccacagcuacgccaacaagauccugcggacgcaggaguccgccugcaacugcaucgggggcaacugcuaccugaugaucaccgacggcagcgccagcgggguguccgagugccgcuuccucaagauccgggagggccgcaucaucaaggagaucuuccccaccgggcgggucaagcacaccgaggagugcacgugcggcuucgccagcaacgagaccaucgagugcgcgugccgcgacaacuccuacaccgccaagcggcccuucgugaagcugaacguggagaccgacacggccgagauccgccugaugugcaccgacaccuaccucgacaccccgcggcccaacgacgggagcaucacgggccccugcgaguccaacggcgacaaggggagcggcgggaucaagggcggguucguccaccagcgcauggaguccaagaucggccggugguacagccgcaccauguccaagaccgagcggaugggcauggggcuguacgugaaguacgacggcgaccccugggccgacagcgacgcccuggcguucuccggggugauggucagcaugaaggagccgggcugguacuccuucggguucgagaucaaggacaagaagugcgacgugcccugcaucggcaucgagauggugcacgacggcgggaaggagaccuggcacagcgccgccacggccaucuacugccucaugggcuccgggcagcugcugugggacaccgucaccggcguggacauggcccucuga

SEQ ID NO: 93006 - RNA, 1401 nt, Artificial Sequence
  derived and/or modified CDS sequence (opt1) from neuraminidase__InfluenzaB__AFH58440
augcugcccagcaccauccagacccucacgcuguuccugaccuccggcggggugcuccugagccuguacgucuccgccagccucuccuaccugcuguacagcgacauccuccugaaguucuccccgaccgagaucaccgcccccacgaugccccuggacugcgcgaacgccagcaacgugcaggccgugaaccgcuccgccaccaagggcgucacccuccugcugcccgagccggaguggaccuacccccggcucagcugccccggguccacguuccagaaggcccugcugaucagcccccaccgcuucggcgagaccaaggggaacuccgcgccgcucaucauccgggagcccuucaucgccugcggccccaacgagugcaagcacuucgcccugacccacuacgccgcgcagcccggcggguacuacaacggcacccgcggggaccggaacaagcugcgccaccucaucagcgugaagcugggcaagaucccgacgguggagaacuccaucuuccacauggccgccuggagcggguccgccugccacgacggcaaggaguggaccuacaucggcgucgacgggcccgacaacaacgcccugcucaaggugaaguacggcgaggcguacaccgacaccuaccacagcuacgccaacaagauccugcggacgcaggaguccgccugcaacugcaucgggggcaacugcuaccugaugaucaccgacggcagcgccagcgggguguccgagugccgcuuccucaagauccaggagggccggaucaucaaggagaucuuccccaccgggcgcgucaagcacaccgaggagugcacgugcggcuucgccagcaacaagaccaucgagugcgcgugccgggacaacuccuacaccgccaagcgccccuucgugaagcugaacguggagaccgacacggccgagauccggcugaugugcaccgacaccuaccucgacaccccgcgccccaacgacgggagcaucacgggccccugcgaguccaacggcgacaaggggagcggcgggaucaagggcggguucguccaccagcggauggaguccaagaucggccgcugguacagccggaccauguccaagaccgagcgcaugggcauggggcuguacgugaaguacgacggcgaccccugggccgacagcgacgcccuggcguucuccggggugauggucagcaugaaggagccgggcugguacuccuucggguucgagaucaaggacaagaagugcgacgugcccugcaucggcaucgagauggugcacgacggcgggaaggagaccuggcacagcgccgccacggccaucuacugccucaugggcuccgggcagcugcugugggacaccgucaccggcguggacauggcccucuga

SEQ ID NO: 93007 - RNA, 1401 nt, Artificial Sequence
  derived and/or modified CDS sequence (opt1) from neuraminidase__InfluenzaB__AFH58462
augcugcccagcaccauccagacccucacgcuguuccugaccuccggcggggugcuccugagccuguacgucuccgccagccucuccuaccugcuguacagcgacauccuccugaaguucuccccgaccgagaucaccgcccccacgaugccccuggacugcgcgaacgccagcaacgugcaggccgugaaccgcuccgccaccaagggcgucaccuuccuccugcccgagccggaguggaccuacccccggcugagcugccccggguccacguuccagaaggcccuccugaucagcccccaccgcuucggcgagaccaaggggaacuccgcgccgcugaucauccgggagcccuucaucgccugcggccccaacgagugcaagcacuucgcccucacccacuacgccgcgcagcccggcggguacuacaacggcacccgcggggaccggaacaagcugcgccaccugaucagcgugaagcucggcaagaucccgacgguggagaacuccaucuuccacauggccgccuggagcggguccgccugccacgacggcaaggaguggaccuacaucggcgucgacgggcccgacaacaacgcccugcugaaggugaaguacggcgaggcguacaccgacaccuaccacagcuacgccaacaagauccuccggacgcaggaguccgccugcaacugcaucgggggcaacugcuaccugaugaucaccgacggcagcgccagcgggguguccgagugccgcuuccugaagauccgggagggccgcaucaucaaggagaucuuccccaccgggcgggucaagcacaccgaggagugcacgugcggcuucgccagcaacaagaccaucgagugcgcgugccgcgacaacuccuacaccgccaagcggcccuucgugaagcucaacguggagaccgacacggccgagauccgccugaugugcaccgacaccuaccuggacaccccgcggcccgacgacgggagcaucacgggccccugcgaguccaacggcgacgaggggagcggcgggaucaagggcggguucguccaccagcgcauggaguccaagaucggccggugguacagccgcaccauguccaagaccgagcggaugggcauggggcucuacgugaaguacgacggcgaccccugggccgacagcgacgcccuggcguucuccggggugauggucagcaugaaggagccgggcugguacuccuucggguucgagaucaaggacaagaagugcgacgugcccugcaucggcaucgagauggugcacgacggcgggaaggagaccuggcacagcgccgccacggccaucuacugccugaugggcuccgggcagcuccugugggacaccgucaccggcguggacaugacccuguga

SEQ ID NO: 93008 - RNA, 1401 nt, Artificial Sequence; identical to SEQ ID NO: 93007
  derived and/or modified CDS sequence (opt1) from neuraminidase__InfluenzaB__AFH58473

SEQ ID NO: 93009 - RNA, 1401 nt, Artificial Sequence; identical to SEQ ID NO: 92841
  derived and/or modified CDS sequence (opt1) from neuraminidase__InfluenzaB__AFH58484

SEQ ID NO: 93010 - RNA, 1401 nt, Artificial Sequence; identical to SEQ ID NO: 92841
  derived and/or modified CDS sequence (opt1) from neuraminidase__InfluenzaB__AFH58495

SEQ ID NO: 93011 - RNA, 1401 nt, Artificial Sequence; identical to SEQ ID NO: 92841
  derived and/or modified CDS sequence (opt1) from neuraminidase__InfluenzaB__AFH58506

SEQ ID NO: 93012 - RNA, 1401 nt, Artificial Sequence
  derived and/or modified CDS sequence (opt1) from neuraminidase__InfluenzaB__AFH58517
augcugcccagcaccauccagacccucacgcuguuccugaccuccggcggggugcuccugagccuguacgucuccgcccuccugagcuaccugcucuacuccgacauccugcugaaguucagcccgaccgagaucaccgcccccacgaugucccucgacugcgcgaacgccagcaacgugcaggccgugaaccgcuccgccaccaagggcgucaccuuccugcugcccgagcccgaguggaccuacccgcggcucagcugccccggguccacguuccagaaggcccugcugaucagcccccaccgcuucggcgagaccaaggggaacuccgcgccccucaucauccgggagccguucaucgccugcggccccaacgagugcaagcacuucgcccugacccacuacgccgcgcagcccggcggguacuacaacggcacccgcggggaccggaacaagcugcgccaccucaucagcgugaagcugggcaagauccccacgguggagaacuccaucuuccacauggccgccuggagcggguccgccugccacgacggcaaggaguggaccuacaucggcgucgacgggccggacaacgacgcccugcucaaggugaaguacggcgaggcguacaccgacaccuaccacagcuacgccaacaagauccugcggacgcaggaguccgccugcaacugcaucgggggcaacugcuaccugaugaucaccgacggcagcgccagcgggguguccgagugccgcuuccucaagauccgggagggccgcaucaucaaggagaucuuccccaccgggcgggucaagcacaccgaggagugcacgugcggcuucgccagcaacaagaccaucgagugcgcgugccgcgacaacuccuacaccgccaagcggcccuucgugaagcugaacguggagaccgacacggccgagauccgccugaugugcaccgacaccuaccucgacacgccccggccggacgacgggagcaucaccggccccugcgaguccaacggcgacaaggggagcggcgggaucaagggcggguucguccaccagcgcauggaguccaagaucggccggugguacagccgcaccauguccaagaccgagcggaugggcauggggcuguacgugaaguacgacggcgaccccugggccgacagcgacgcccuggcguucuccggggugauggucagcaugaaggagcccggcugguacuccuucggguucgagaucaaggacaagaagugcgacgugccgugcaucggcaucgagauggugcacgacggcgggaaggagaccuggcacagcgccgccacggccaucuacugccucaugggcuccgggcgccugcugugggacaccgucaccggcguggacauggcccucuga

SEQ ID NO: 93013 - RNA, 1401 nt, Artificial Sequence; identical to SEQ ID NO: 92919
  derived and/or modified CDS sequence (opt1) from neuraminidase__InfluenzaB__AFH58528

SEQ ID NO: 93014 - RNA, 1401 nt, Artificial Sequence
  derived and/or modified CDS sequence (opt1) from neuraminidase__InfluenzaB__AFH58539
augcugcccagcaccgugcagacccucacgcugcugcucaccuccggcgggguccugcugagccucuacguguccgccagccuguccuaccugcucuacagcgacgugcugcugaaguucuccagcaccaagaccacggccccgaccaugucccucgagugcaccaacgcgagcaacgcccagaccgucaaccacuccgccacgaaggagaugaccuucccgccgcccgagcccgaguggaccuacccccgccugagcugccagggcuccaccuuccagaaggcccugcucaucagcccccaccgguucggggagaucaagggcaacuccgcgccccugaucauccgcgagcccuucguggccugcgggcccaaggagugccggcacuucgcccugacgcacuacgccgcccagcccggcggcuacuacaacgggacccgcaaggaccggaacaagcuccgccaccuggugagcgucaagcugggcaagauccccaccguggagaacuccaucuuccacauggcggccuggagcggguccgccugccacgacggccgggaguggaccuacaucgggguggacggcccggacaacgacgcccucgucaagaucaaguacggcgaggccuacacggacaccuaccacagcuacgcgcacaacauccugcgcacccaggagagcgccugcaacugcaucgggggcgacugcuaccugaugaucaccgacggguccgccagcggcaucuccaagugccgguuccucaagauccgcgagggccggaucaucaaggagauccugcccacggggcgcguggagcacaccgaggagugcacgugcggcuucgccagcaacaagaccaucgagugcgccugccgggacaacuccuacaccgcgaagcgccccuucgugaagcugaacgucgagaccgacaccgccgagauccggcucaugugcaccaagacguaccuggacacgccccgcccggacgacgggagcaucgccggccccugcgaguccaacggggacaaguggcugggcggcaucaagggcggguucgugcaccagcggauggccagcaagaucgggcgcugguacucccggaccaugagcaagaccaaccgcaugggcauggagcucuacgugaaguacgacggggaccccuggaccgacuccgacgcccugacccugagcggcgucaugguguccaucgaggagcccggcugguacagcuucggguucgagaucaaggacaagaagugcgacgugccgugcaucggcaucgagaugguccacgacgggggcaaggacaccuggcacuccgcggccaccgccaucuacugccucauggggagcggccagcugcugugggacacggccaccggcguggacauggcccucuga

SEQ ID NO: 93015 - RNA, 1401 nt, Artificial Sequence
  derived and/or modified CDS sequence (opt1) from neuraminidase__InfluenzaB__AFH58550
augcugcccagcaccauccagacccucacgcuguuccugaccuccggcggggugcuccugagccuguacgucuccgccagccucuccuaccugcuguacagcgacauccuccugaaguucuccccgaccgagaucaccgcccccacgaugccccuggacugcgcgaacgccagcaacgugcaggccgugaaccgcuccgccaccaaggagaugacccuccugcugcccgagccggaguggaccuacccccggcucagcugccccggcuccacguuccagaaggcccugcugaucagcccccaccgcuucggggagacccggggcaacuccgcgccgcucaccauccgcgagcccuucaucgccugcgggcccaaggagugcaagcacuucgcccugacccacuacgccgcgcagcccggcggcuacuacaacgggacgcgggaggaccgcaacaagcugcggcaccucaucagcgucaagcugggcaagaucccgaccguggagaacuccaucuuccacauggccgccuggagcggguccgccugccacgacggccgcgaguggaccuacaucgggguggacggccccgacagcaacgcccugaucaagaucaaguacggcgaggcguacaccgacacguaccacuccuacgccaacaacauccuccggacccaggagagcgccugcaacugcaucgggggcgacugcuaccugaugaucaccgacgggagcgccuccggcaucagcaagugccgcuuccugaagauccgggagggccgcaucaucaaggagaucuuccccaccgggcgggucgagcacacggaggagugcacgugcggcuucgccuccaacaagaccaucgagugcgcgugccgcgacaacagcuacaccgccaagcggcccuucgugaagcucaacguggagaccgacaccgccgagauccgccugaugugcaccgagaccuaccuggacacgccgcggcccgacgacggguccaucaccggccccugcgagagcaacggggacaagggccgcggcgggaucaagggcggguucguccaccagcggauggccuccaagaucggccgcugguacagccggaccauguccaagaccgagcgcauggggauggagcucuacgugaaguacgacggcgaccccuggacggacagcgaggcccuggcgccguccggcgugauggucagcauggaggagcccgggugguacuccuucggcuucgagaucaaggacaagaagugcgacgugcccugcaucgggaucgagauggugcacgacggcgggaagaagaccuggcacagcgccgccaccgccaucuacugccugaugggcuccggccagcuccugugggacaccgucacggggguggacauggcccuguga

SEQ ID NO: 93016 - RNA, 1401 nt, Artificial Sequence; identical to SEQ ID NO: 93015
  derived and/or modified CDS sequence (opt1) from neuraminidase__InfluenzaB__AFH58561

SEQ ID NO: 93017 - RNA, 1401 nt, Artificial Sequence
  derived and/or modified CDS sequence (opt1) from neuraminidase__InfluenzaB__AFJ69969
augcugcccagcaccauccagacccucacgcuguuccugaccuccggcggggugcuccugagccuguacgucuccgccagccucuccuaccugcuguacagcgacauccuccugaaguucuccccgaccgagaucaccgcccccacgaugccccuggacugcgcgaacgccagcaacgugcaggccgugaaccgcuccgccaccaagggcgucacccuccugcugcccgagccggaguggaccuacccccggcucagcugccccggguccacguuccagaaggcccugcugaucagcccccaccgcuucggcgagaccaaggggaacuccgcgccgcucaucauccgggagcccuucaucgccugcggccccaacgagugcaagcacuucgcccugacccacuacgccgcgcagcccggcggguacuacaacggcacccgcggggaccggaacaagcugcgccaccucaucagcgugaagcugggcaagaucccgacgguggagaacuccaucuuccacauggccgccuggagcggguccgccugccacgacggcaaggaguggaccuacaucggcgucgacgggcccgacaacaacgcccugcucaaggugaaguacggcgaggcguacaccgacaccuaccacagcuacgccaacaagauccugcggacgcaggaguccgccugcaacugcaucgggggcaacugcuaccugaugaucaccgacggcagcgccagcgggguguccgagugccgcuuccucaagauccgggagggccgcaucaucaaggagaucuuccccaccgggcgggucaagcacaccgaggagugcacgugcggcuucgccagcaacaagaccaucgagugcgcgugccgcgacaacuccuacaccgccaagcggcccuucgugaagcugaacguggagaccgacacggccgagauccgccugaugugcaccgacaccuaccucgacaccccgcggcccaacgacgggagcaucacgggccccugcgaguccaacggcgacaaggggagcggcgggaucaagggcggguucguccaccagcgcauggaguccaagaucggccggugguacagccgcaccauguccaagaccgagcggaugggcauggggcuguacgugaaguacgacggcgaccccuggaccgacagcgacgcccuggccuucuccggggugauggucagcaugaaggagccgggcugguacuccuucggguucgagaucaaggacaagaagugcgacgugcccugcaucggcaucgagauggugcacgacggcgggaaggagacguggcacagcgcggccaccgccaucuacugccucaugggcuccgggcagcugcugugggacaccgucaccggcguggacauggcccucuga

SEQ ID NO: 93018 - RNA, 1401 nt, Artificial Sequence; identical to SEQ ID NO: 92980
  derived and/or modified CDS sequence (opt1) from neuraminidase__InfluenzaB__AFJ69971

SEQ ID NO: 93019 - RNA, 1401 nt, Artificial Sequence
  derived and/or modified CDS sequence (opt1) from neuraminidase__InfluenzaB__AFJ69973
augcugcccagcaccauccagaugcucacccuguuccugacguccggcggggugcuccugagccuguacgucuccgccagccucuccuaccugcuguacagcgacauccuccugaaguucuccccgaccgagaucaccgcccccaccaugccccuggacugcgcgaacgccagcaacgugcacgccgugaaccgcuccgccacgaagggcgucaccuuccuccugcccgagccggaguggaccuacccccggcugagcugccccggguccaccuuccagaaggcccuccugaucagcccccaccgcuucggcgagacgaaggggaacuccgcgccgcugaucauccgggagcccuucaucgccugcggccccaacgagugcaagcacuucgcccucacccacuacgccgcgcagcccggcggguacuacaacggcacccgcggggaccggaacaagcugcgccaccugaucagcgugaagcucggcaagaucccgaccguggagaacuccaucuuccacauggccgccuggagcggguccgccugccacgacggcaaggaguggacguacaucggcgucgacgggcccgacaacaacgcccugcugaagaucaaguacggcgaggcguacaccgacaccuaccacagcuacgccaacaacauccuccggacccaggaguccgccugcaacugcaucgggggcaacugcuaccugaugaucacggacggcagcgccagcgggguguccgccugccgcuuccugaagauccgggagggccgcaucaucaaggagaucuuccccaccgggcgggugaagcacaccgaggagugcacgugcggcuucgcgagcaacaagaccaucgagugcgccugccgcgacaacuccuacaccgccaagcggcccuucgucaagcucaacguggagaccgacaccgccgagauccgccugaugugcacggacaccuaccuggacaccccgcggcccgacgacgggagcaucaccggccccugcgaguccaacggcgacaaggggagcggcgggaucaagggcggguucgugcaccagcgcauggccuccaagaucggccggugguacagccgcacgauguccaagaccgagcggaagggcauggggcucuacgucaaguacgacggcgaccccuggaccgacagcgacgcgcuggccuuccgcggggugaugguguccaugaaggagccgggcugguacagcuucggguucgagaucaaggacaagaagugcgacguccccugcaucggcaucgagauggugcacgacggcgggaaggagaccuggcacuccgccgccacggccaucuacugccugaugggcagcgggcagcuccugugggacaccgugaccggcgucgacauggcgcuguga

SEQ ID NO: 93020 - RNA, 1401 nt, Artificial Sequence; identical to SEQ ID NO: 92841
  derived and/or modified CDS sequence (opt1) from neuraminidase__InfluenzaB__AFJ69975

SEQ ID NO: 93021 - RNA, 1401 nt, Artificial Sequence
  derived and/or modified CDS sequence (opt1) from neuraminidase__InfluenzaB__AFJ69979
augcugcccagcaccauccagacccucacgcuguuccugaccuccggcggggugcuccugagccuguacgucuccgccagccucuccuaccugcuguacagcgacauccuccugaaguucuccccgaccgagaucaccgcccccacgaugccccuggacugcgcgaacaccagcaacgugcaggccgugaaccacuccgccaccaagggcgucacccuccugcugcccgagccggaguggacguacccccgccucagcugccccggguccaccuuccagaaggcccugcugaucagcccccaccgguucggcgagaccaaggggaacuccgccccgcucaucauccgcgagcccuucaucgcgugcggccccaacgagugcaagcacuucgcccugacccacuacgccgcccagcccggcggguacuacaacggcacgcgcggggaccggaacaagcugcggcaccucaucagcgugaagcugggcaagaucccgaccguggagaacuccaucuuccacauggcggccuggagcggguccgccugccacgacggcaaggaguggaccuacaucggcgucgacgggcccgacaacaacgcccugcucaaggugaaguacggcgaggccuacaccgacacguaccacagcuacgcgaacaagauccugcgcacccaggaguccgccugcaacugcaucgggggcaacugcuaccugaugaucaccgacggcagcgccagcgggguguccgagugccgguuccucaagauccgcgagggccggaucaucaaggagaucuuccccaccgggcgcgucaagcacacggaggagugcacgugcggcuucgccagcaacaagaccaucgagugcgccugccgggacaacuccuacaccgcgaagcgccccuucgugaagcugaacguggagaccgacaccgccgagauccggcugaugugcaccgacaccuaccucgacacgccgcgccccgacgacgggagcaucaccggccccugcgaguccaacggcgacaaggggagcggcgggaucaagggcggguucguccaccagcggauggaguccaagaucggccgcugguacagccggaccauguccaagaccgagcgcaugggcauggggcuguacgugaaguacgacggcgaccccugggccgacagcgacgcccuggccuucuccggggugauggucagcaugaaggagccgggcugguacuccuucggguucgagaucaaggacaagaagugcgacgugcccugcaucggcaucgagauggugcacgacggcgggaaggagacguggcacagcgcggccaccgccaucuacugccucaugggcuccgggcagcugcugugggacaccgucaccggcguggacauggcccucuga

SEQ ID NO: 93022 - RNA, 1401 nt, Artificial Sequence; identical to SEQ ID NO: 92980
  derived and/or modified CDS sequence (opt1) from neuraminidase__InfluenzaB__AFJ69981

SEQ ID NO: 93023 - RNA, 1401 nt, Artificial Sequence
  derived and/or modified CDS sequence (opt1) from neuraminidase__InfluenzaB__AFJ69983
augcugcccagcaccauccagaugcucacccuguuccugacguccggcggggugcuccugagccuguacgucuccgccagccucuccuaccugcuguacagcgacauccuccugaaguucuccccgaccgagaucaccgcccccaccaugccccuggacugcgcgaacgccagcaacgugcacgccgugaaccgcuccgccacgaagggcgucaccuuccuccugcccgagccggaguggaccuacccccggcugagcugccccggguccaccuuccagaaggcccuccugaucagcccccaccgcuucggcgagacgaaggggaacuccgcgccgcugaucauccgggagcccuucaucgccugcggccccaacgagugcaagcacuucgcccucacccacuacgccgcgcagcccggcggguacuacaacggcacccgcggggaccggaacaagcugcgccaccugaucagcgugaagcucggcaagaucccgaccguggagaacuccaucuuccacauggccgccuggagcggguccgccugccacgacggcaaggaguggacguacaucggcgucgacgggcccgacaacaacgcccugcugaagaucaaguacggcgaggcguacaccgacaccuaccacagcuacgccaacaacauccuccggacccaggaguccgccugcaacugcaucgggggcaacugcuaccugaugaucacggacggcagcgccagcgggguguccgagugccgcuuccugaagauccgggagggccgcaucaucaaggagauccuccccaccgggcgggugaagcacaccgaggagugcacgugcggcuucgccagcaacaagaccaucgagugcgcgugccgcgacaacuccuacaccgccaagcggcccuucgucaagcugaacguggagaccgacaccgccgagauccgccugaugugcacggacaccuaccucgacaccccgcggcccgacgacgggagcaucaccggccccugcgaguccaacggcgggaagggcagcgggggcaucaagggcggguucgugcaccagcgcauggccuccaagaucggccggugguacagccgcacgauguccaagaccgagcggaaggggaugggccuguacgucaaguacgacggggaccccuggaccgacagcgacgcccuggcguuccgcggcgugaugguguccaugaaggagccggggugguacagcuucggcuucgagaucaaggacaagaagugcgacguccccugcaucggcaucgagauggugcacgacgggggcaaggagaccuggcacuccgccgccacggccaucuacugccucauggggagcggccagcugcugugggacaccgugaccggcgucgacauggcccucuga

SEQ ID NO: 93024 - RNA, 1401 nt, Artificial Sequence
  derived and/or modified CDS sequence (opt1) from neuraminidase__InfluenzaB__AFJ69987
augcugcccagcaccauccagacccucacgcuguuccugaccuccggcggggugcuccugagccuguacgucuccgccagccucuccuaccugcuguacagcgacauccuccugaaguucuccccgaccgagaucaccgcccccacgaugccccuggacugcgcgaacgccagcaacgugcaggccgugaaccgcuccgccaccaagggcgucacccuccugcugcccgagccggaguggaccuacccccggcucagcugccccggguccacguuccagaaggcccugcugaucagcccccaccgcuucggcgagaccaaggggaacuccgcgccgcucaucauccgggagcccuucaucgccugcggccccaacgagugcaagcacuucgcccugacccacuacgccgcgcagcccggcggguacuacaacggcacccgcggggaccggaacaagcugcgccaccucaucagcgugaagcugggcaagaucccgacgguggagaacuccaucuuccacauggccgccuggagcggguccgccugccacgacggcaaggaguggaccuacaucggcgucgacgggcccgacaacaacgcccugcucaaggugaaguacggcgaggcguacaccgacaccuaccacagcuacgccaacaagauccugcggacgcaggaguccgccugcaacugcaucgggggcaacugcuaccugaugaucaccgacggcagcgccagcgggguguccgagugccgcuuccucaagauccgggagggccgcaucaucaaggagaucuuccccaccgggcgggucaagcacaccgaggagugcacgugcggcuucgccagcaacaagaccaucgagugcgcgugccgcgacaaccgguacaccgccaagcgccccuucgugaagcugaacguggagaccgacacggccgagauccggcugaugugcaccgacaccuaccucgacaccccgcgccccaacgacggguccaucacgggccccugcgagagcgacggcgacaagggguccggcgggaccaagggcggguucguccaccagcggaugaaguccaagaucggccgcugguacagccggaccaugagcaagaccgagcgcaugggcauggggcuguacgugaaguacgacggcgaccccugggccgacuccgacgcccugacguucagcggggugauggucuccaugaaggagccgggcugguacagcuucggguucgagaucaaggacaagaagugcgacgugcccugcaucggcaucgagauggugcacgacggcgggaaggagaccuggcacuccgcggccaccgccaucuacugccucaugggcagcgggcagcugcugugggacaccgucacgggcguggacauggcccucuga

SEQ ID NO: 93025 - RNA, 1401 nt, Artificial Sequence
  derived and/or modified CDS sequence (opt1) from neuraminidase__InfluenzaB__AFJ76228
augcugcccagcaccauccagacccucacgcuguuccugaccuccggcggggugcuccugagccuguacgucuccgccagccucuccuaccugcuguacagcggcauccuccugaaguucuccccgaccgagaucaccgcccccacgaugccccugaacugcgcgaacgccagcaacgugcaggccgugaaccgcuccgccaccaagggggucacccuccugcugcccgagccggaguggaccuacccccggcucagcugccccggcuccacguuccagaaggcccugcugaucagcccccaccgcuucggggagaccaagggcaacuccgcgccgcucaucauccgggagcccuucaucgccugcggccccaaggagugcaagcacuucgcccugacccacuacgccgcgcagcccgggggcuacuacaacgggacccgcgaggaccggaacaagcugcgccaccucaucagcgugaagcugggcaagaucccgacgguggagaacuccaucuuccacauggccgccuggagcggguccgccugccacgacggccgggaguggaccuacaucggcgucgacgggcccgacagcaacgcccugcucaagaucaaguacggcgaggcguacaccgacaccuaccacuccuacgccaacaacauccugcgcacgcaggagagcgccugcaacugcaucgggggcgacugcuaccugaugaucaccgacggcagcgccuccgggaucagcgagugccgguuccucaagauccgcgagggccggaucaucaaggagaucuuccccaccgggcgcguggagcacaccgaggagugcacgugcggcuucgccuccaacaagaccaucgagugcgcgugccgggacaacagcuacaccgccaagcgccccuucgugaagcugaacgucgagaccgacacggccgagauccggcugaugugcaccgagaccuaccucgacaccccgcgccccgacgacggguccaucacgggccccugcgagagcaacggcgacaagggguccggcgggaucaagggcggguucgugcaccagcggauggccagcaagaucggccgcugguacucccggaccaugagcaagaccaagcgcaugggcauggggcuguacgugaaguacgacggcgaccccuggaucgacuccgacgcccugacccucagcggggucaugguguccauggaggagccgggcugguacagcuucggguucgagaucaaggacaagaagugcgacgugcccugcaucggcaucgagaugguccacgacggcgggaagaagacguggcacuccgcggccaccgccaucuacugccugaugggcagcgggcagcugcucugggacaccgugaccggcguggacauggcccuguga

SEQ ID NO: 93026 - RNA, 1401 nt, Artificial Sequence; identical to SEQ ID NO: 92692
  derived and/or modified CDS sequence (opt1) from neuraminidase__InfluenzaB__AFJ76261

SEQ ID NO: 93027 - RNA, 1401 nt, Artificial Sequence
  derived and/or modified CDS sequence (opt1) from neuraminidase__InfluenzaB__AFJ76283
augcugcccagcaccauccagacccucacgcuguuccugaccuccggcggggugcuccugagccuguacgucuccgccagccucuccuaccugcuguacagcgacauccuccugaaguucccgcccaccgagaucaccgcccccacgaugccccuggacugcgcgaacgccuccaacgugcaggccgugaaccgcagcgccaccaagggcgucacccuccugcugccggagcccgaguggaccuacccccggcucuccugccccgggagcacguuccagaaggcccugcugaucuccccgcaccgcuucggcgagaccaaggggaacagcgcgccccucaucauccgggagcccuucaucgccugcggccccaaggagugcaagcacuucgcccugacccacuacgccgcgcagccgggcggguacuacaacggcacccgcggggaccggaacaagcugcgccaccucaucuccgugaagcugggcaagauccccacgguggagaacagcaucuuccacauggccgccugguccgggagcgccugccacgacggcaaggaguggaccuacaucggcgucgacgggcccgacaacaacgcccugcucaagaucaaguacggcgaggcguacaccgacaccuaccacuccuacgccaacaacauccugcggacgcaggagagcgccugcaacugcaucgggggcaacugcuaccugaugaucaccgacggcuccgccagcggggugagcgagugccgcuuccucaagauccgggagggccgcaucaucaaggagaucuuccccaccgggcggaucaagcacaccgaggagugcacgugcggcuucgccuccaacaagaccaucgagugcgcgugccgcgacaacagcuacaccgccaagcggccguucgugaagcugaacgucgagaccgacacggccgagauccgccugaugugcaccgagaccuaccucgacacgccccggcccgacgacggguccaucaccggccccugcgagagcaacggcgacaagggguccggcgggaucaagggcggguucgugcaccagcgcauggccagcaagaucggccggugguacucccgcaccaugagcaagaccgagcggaugggcauggggcuguacgugaaguacgacggcgacccgugggccgacuccgacgcgcugaccuucagcggggucaugguguccauggaggagcccggcugguacagcuucggguucgagaucaaggacaagaagugcgacgugcccugcaucggcaucgagaugguccacgacggcgggaaggagacguggcacuccgccgccaccgccaucuacugccucaugggcagcgggcagcugcugugggacaccgugaccggcgugaacauggcccucuga

SEQ ID NO: 93028 - RNA, 1401 nt, Artificial Sequence
  derived and/or modified CDS sequence (opt1) from neuraminidase__InfluenzaB__AFJ76305
augcugcccagcaccauccagacccucacgcuguuccugaccuccggcggggugcuccugagccuguacgucuccgccagccucuccuaccugcuguacagcgacauccuccugaaguucccguccaccgagaucaccgcccccacgaugccccuggacugcgcgaacgccagcaacgugcaggccgugaaccgcuccgccaccaagggcgucacccuccugcugcccgagccggaguggaccuacccccggcucagcugccccggguccacguuccagcgcgcccugcugaucagcccccaccgguucggcgagaccaaggggaacuccgcgccgcucaucauccgcgagcccuucaucgccugcggccccaaggagugcaagcacuucgcccugacccacuacgccgcgcagcccggcggguacuacaacggcacccgcggggaccggaacaagcugcggcaccucaucagcgugaagcugggcaagaucccgacgguggagaacuccaucuuccacauggccgccuggagcggguccgccugccacgacggcaaggaguggaccuacaucggcgucgacgggcccgacaacaacgcccugcucaagaucaaguacggcgaggcguacaccgacaccuaccacagcuacgccaacaacauccugcgcacgcaggaguccgccugcaacugcaucgggggcaacugcuaccugaugaucaccgacggcagcgccagcgggguguccgagugccgguuccucaagauccgcgagggccggaucaucaaggagaucuuccccaccgggcgcaucaagcacaccgaggagugcacgugcggcuucgccagcaacaagaccaucgagugcgcgugccgggacaacuccuacaccgccaagcgccccuucgugaagcugaacgucgagaccgacacggccgagauccggcugaugugcaccgagaccuaccucgacaccccgcgccccgacgacgggagcaucacgggccccugcgaguccaacggcgacaaggggagcggcgggaucaagggcggguucgugcaccagcggauggccuccaagaucggccgcugguacagccggaccauguccaagaccgagcgcaugggcauggggcuguacgugaaguacgacggcgaccccugggccgacagcgacgcgcugaccuucuccggggucauggugagcauggaggagccgggcugguacuccuucggguucgagaucaaggacaagaagugcgacgugcccugcaucggcaucgagaugguccacgacggcgggaaggagacguggcacagcgccgccaccgccaucuacugccucaugggcuccgggcagcugcugugggacaccgugaccggcguggacauggcccucuga

SEQ ID NO: 93029 - RNA, 1401 nt, Artificial Sequence
  derived and/or modified CDS sequence (opt1) from neuraminidase__InfluenzaB__AFJ76316
augcugcccagcaccauccagacccucacgcuguuccugaccuccggcggggugcuccugagccuguacgucuccgccagccucuccuaccugcuguacagcgacauccuccugaaguucccguccaccgagaucaccgcccccacgaugccccuggacugcgcgaacgccagcaacgugcaggccgugaaccgcuccgccaccaagggcgucacccuccugcugcccgagccggaguggaccuacccccggcucagcugccccggguccacguuccagaaggcccugcugaucagcccccaccgcuucggcgagaccaaggggaacuccgcgccgcucaucauccgggagcccuucaucgccugcggccccaaggagugcaagcacuucgcccugacccacuacgccgcgcagcccggcggguacuacaacggcacccgcggggaccggaacaagcugcgccaccucaucagcgugaagcugggcaagaucccgacgguggagaacuccaucuuccacauggccgccuggagcggguccgccugccacgacggcaaggaguggaccuacaucggcgucgacgggcccgacaacaacgcccugcucaagaucaaguacggcgaggcguacaccgacaccuaccacagcuacgccaacaacauccugcggacgcaggaguccgccugcaacugcaucgggggcaacugcuaccugaugaucaccgacggcagcgccagcgggguguccgagugccgcuuccucaagauccgggagggccgcaucaucaaggagaucuuccccaccgggcggaucaagcacaccgaggagugcacgugcggcuucgccagcaacaagaccaucgagugcgcgugccgcgacaacuccuacaccgccaagcggcccuucgugaagcugaacgucgagaccgacacggccgagauccgccugaugugcaccgagaccuaccucgacaccccgcggcccgacgacgggagcaucacgggccccugcgaguccaacggcgacaaggggagcggcgggaucaagggcggguucgugcaccagcgcauggccuccaagaucggccggugguacagccgcaccauguccaagaccgagcggaugggcauggggcuguacgugaaguacgacggcgaccccugggccgacagcgacgcgcugaccuucuccggggucauggugagcauggaggagccgggcugguacuccuucggguucgagaucaaggacaagaagugcgacgugcccugcaucggcaucgagaugguccacgacggcgggaaggagacguggcacagcgccgccaccgccaucuacugccucaugggcuccgggcagcugcugugggacaccgugaccggcgugaacauggcccucuga

SEQ ID NO: 93030 - RNA, 1401 nt, Artificial Sequence; identical to SEQ ID NO: 92692
  derived and/or modified CDS sequence (opt1) from neuraminidase__InfluenzaB__AFJ76338

SEQ ID NO: 93031 - RNA, 1401 nt, Artificial Sequence
  derived and/or modified CDS sequence (opt1) from neuraminidase__InfluenzaB__AFJ77331
augcugcccagcaccauccagacccucacgcuguuccugaccuccggcggggugcuccugagccuguacgucuccgccagccucuccuaccugcuguacagcgacauccuccugaaguucucccagaccgagaucaccgccccgaucaugccccuggacugcgcgaacgccagcaacgugcaggccgugaaccacuccgccgccaagggcgucacgcuccugcugcccgagcccgaguggaccuacccgcgccucagcugccccggguccaccuuccagaaggcgcugcugaucagcccccaccgguucggcgagaccaaggggaacuccgcgccccucaucauccgcgagccguucaucgccugcggccccacggagugcaagcacuucgcccugacccacuacgccgcccagcccggcggguacuacaacggcacccgggaggaccgcaacaagcugcggcaccucaucagcgugaagcuggggaagauccccaccguggagaacuccaucuuccacauggccgccuggagcggcuccgccugccacgacgggaaggaguggacguacaucggcgucgacggcccggacagcaacgcgcugcucaagaucaaguacggggaggccuacaccgacaccuaccacuccuacgccaagaacauccugcgcacccaggagagcgccuacaacugcaucggcggggacugcuaccugaugaucacggacggccccgccagcggcaucuccgagugccgguuccucaagauccgcgaggggcggaucaucaaggagaucuuccccaccggccgcgugaagcacaccgaggagugcacgugcggguucgcgagcaacaagaccaucgagugcgccugccgggacaacuccuacaccgccaagcgccccuucgugaagcugaacgucgagaccgacaccgccgagauccggcugaugugcacggagaccuaccucgacaccccgcgccccaacgacggcagcaucaccgggcccugcgaguccgacggcgacaagggcagcgggggcaucaagggcggguucgugcaccagcggauggccuccaagaucgggcgcugguacagccggacgauguccaagaccaagcgcaugggcaugggccuguacgugaaguacgacggggaccccuggaccgacagcgaggcgcuggcccucuccggcgucauggugagcauggaggagccggggugguacuccuucggcuucgagaucaaggacaagaagugcgacgugcccugcaucgggaucgagaugguccacgacggcggcaagaccacguggcacagcgccgccaccgccaucuacugccugaugggguccggccagcugcucugggacaccgugaccgggguggacauggcgcuguga

SEQ ID NO: 93032 - RNA, 1401 nt, Artificial Sequence; identical to SEQ ID NO: 92767
  derived and/or modified CDS sequence (opt1) from neuraminidase__InfluenzaB__AFJ77351

SEQ ID NO: 93033 - RNA, 1401 nt, Artificial Sequence; identical to SEQ ID NO: 92659
  derived and/or modified CDS sequence (opt1) from neuraminidase__InfluenzaB__AFJ77362

SEQ ID NO: 93034 - RNA, 1401 nt, Artificial Sequence; identical to SEQ ID NO: 92812
  derived and/or modified CDS sequence (opt1) from neuraminidase__InfluenzaB__AFJ77384

SEQ ID NO: 93035 - RNA, 1401 nt, Artificial Sequence; identical to SEQ ID NO: 92734
  derived and/or modified CDS sequence (opt1) from neuraminidase__InfluenzaB__AFJ80132

SEQ ID NO: 93036 - RNA, 1401 nt, Artificial Sequence
  derived and/or modified CDS sequence (opt1) from neuraminidase__InfluenzaB__AFJ80143
augcugcccagcaccauccagacccucacgcuguuccugaccuccggcggggugcuccugagccuguacgucuccgccagccucuccuaccugcuguacagcgacauccuccugaaguucuccccgaccgagaucaccgcccccacgaugccccuggacugcgcgaacgccagcaacgugcaggccgugaaccgcuccgccaccaagggcgucacccuccugcugcccgagccggaguggaccuacccccggcucagcugccccggguccacguuccagaaggcccugcugaucagcccccaccgcuucggcgagaccaaggggaacuccgcgccgcucaucauccgggagcccuucaucgccugcggccccaaggagugcaagcacuucgcccugacccacuacgccgcgcagcccggcggguacuacaacggcacccgcgaggaccggaacaagcugcgccaccucaucagcgugaagcuggggaagaucccgacgguggagaacuccaucuuccacauggccgccuggagcggcuccgccugccacgacgggcgggaguggaccuacaucggcgucgacggccccgacagcaacgcccugcucaagaucaaguacggggaggcguacaccgacaccuaccacuccuacgccaacaacauccugcgcacgcaggagagcgccugcaacugcaucggcgggaacugcuaccugaugaucaccgacggcagcgccuccggcaucagcgagugccgguuccucaagauccgcgaggggcggaucaucaaggagaucuuccccaccggccgcguggagcacaccgaggagugcacgugcggguucgccuccaacaagaccaucgagugcgcgugccgggacaacagcuacaccgccaagcgccccuucgugaagcugaacgucgagaccgacacggccgagauccggcugaugugcaccgagaccuaccucgacaccccgcgccccgacgacggcuccaucacggggcccugcgagagcaacggcgacaagggcuccgggggcaucaagggcggguucgugcaccagcggauggccagcaagaucgggcgcugguacucccggaccaugagcaagaccaagcgcaugggcaugggccuguacgugaaguacgacggggaccccuggaccgacuccgacgcccuggcgcucagcggcgucaugguguccauggaggagccggggugguacagcuucggcuucgagaucaaggacaagaagugcgacgugcccugcaucgggaucgagaugguccacgacggcggcaagaagacguggcacuccgccgccaccgccaucuacugccugauggggagcggccagcugcucugggacaccgugaccgggguggacauggcccuguga

SEQ ID NO: 93037 - RNA, 1401 nt, Artificial Sequence
  derived and/or modified CDS sequence (opt1) from neuraminidase__InfluenzaB__AFJ80154
augcugcccagcaccauccagacccucacgcuguuccugaccuccggcggggugcuccugagccuguacgucuccgccagccucuccuaccugcuguacagcgacauccuccugaaguucuccccgaccgagaucaccgcccccacgaugccccuggacugcgcgaacgccagcaacgugcaggccgugaaccgcuccgccaccaagggcgucacccuccugcugcccgagccggaguggaccuacccccggcucagcugccccggguccacguuccagaaggccauccugaucagcccccaccgcuucggcgagaccaaggggaacuccgcgccgcugaucauccgggagcccuucaucgccugcggccccaaggagugcaagcacuucgcccucacccacuacgccgcgcagcccggcggguacuacaacggcacccgcgaggaccggaacaagcugcgccaccugaucagcgugaagcucgggaagaucccgacgguggagaacuccaucuuccacauggccgccuggagcggcuccgccugccacgacgggcgggaguggaccuacaucggcgucgacggccccgacagcaacgcccugcugaagaucaaguacggggaggcguacaccgacaccuaccacuccuacgccaacaacauccuccgcacgcaggagagcgccugcaacugcaucggcgggaacugcuaccugaugaucaccgacggcagcgccuccggcaucagcgagugccgguuccugaagauccgcgaggggcggaucaucaaggagaucuuccccaccggccgcguggagcacaccgaggagugcacgugcggguucgccuccaacaagaccaucgagugcgcgugccgggacaacagcuacaccgccaagcgccccuucgugaagcucaacgucgagaccgacacggccgagauccggcugaugugcaccgagaccuaccuggacaccccgcgccccgacgacggcuccaucacggggcccugcgagagcaacggcgacaagggcuccgggggcaucaagggcggguucgugcaccagcggauggccagcaagaucgggcgcugguacucccggaccaugagcaagaccaagcgcaugggcaugggccucuacgugaaguacgacggggaccccuggaccgacuccgacgcccuggcgcugagcggcgucaugguguccauggaggagccggggugguacagcuucggcuucgagaucaaggacaagaagugcgacgugcccugcaucgggaucgagaugguccacgacggcggcaagaagacguggcacuccgccgccaccgccaucuacugccucauggggagcggccagcugcugugggacaccgugaccgggguggacauggcccucuga

SEQ ID NO: 93038 - RNA, 1401 nt, Artificial Sequence
  derived and/or modified CDS sequence (opt1) from neuraminidase__InfluenzaB__AFJ80165
augcugcccagcaccauccagacccucacgcuguuccugaccuccggcggggugcuccugagccuguacgucuccgccagccucuccuaccugcuguacagcgacauccuccugaaguucuccccgaccgagaucaccgcccccacgaucccccuggacugcgcgaacgccagcaacgugcaggccgugaaccgcuccgccaccaagggcgucacccuccugcugcccgagccggaguggaccuacccccggcucagcugccccggguccacguuccagaaggcccugcugaucagcccccaccgcuucggcgagaucaaggggaacuccgcgccgcucaucauccgggagcccuucaucgccugcggccccaaggagugcaagcacuucgcccugacccacuacgccgcgcagcccggcggguacuacaacggcacccgcgaggaccggaacaagcugcgccaccucaucagcgugaagcuggggaagaucccgaccguggagaacuccaucuuccacauggccgccuggagcggcuccgccugccacgacgggaaggaguggacguacaucggcgucgacggccccgacagcaacgcccugcucaagaucaaguacggggaggcguacaccgacaccuaccacuccuacgccaacaacauccugcggacccaggagagcgccugcaacugcaucggcgggaacugcuaccugaugaucacggacggcagcgccuccggcaucagcgagugccgcuuccucaagauccgggaggggcgcaucaucaaggagaucuuccccaccggccggguggagcacaccgaggagugcacgugcggguucgccuccaacaagaccaucgagugcgcgugccgcgacaacagcuacaccgccaagcggcccuucgugaagcugaacgucgagaccgacaccgccgagauccgccugaugugcacggagaccuaccucgacaccccgcggcccgacgacggcuccaucaccgggcccugcgagagcaacggcgacaagggcuccgggggcaucaagggcggguucgugcaccagcgcauggccagcaagaucgggcggugguacucccgcacgaugagcaagaccaagcggaugggcaugggccuguacgugaaguacgacggggaccccuggaccgacuccgacgcccuggcgcucagcggcgucaugguguccauggaggagccggggugguacagcuucggcuucgagaucaaggacaagaagugcgacauccccugcaucgggaucgagauggugcacgacggcggcaaggagaccuggcacuccgccgccacggccaucuacugccugauggggagcggccagcugcucugggacaccgucaccgggguggacauggcccuguga

SEQ ID NO: 93039 - RNA, 1401 nt, Artificial Sequence
  derived and/or modified CDS sequence (opt1) from neuraminidase__InfluenzaB__AFJ80176
augcugcccagcaccauccagacccucacgcuguuccugaccuccggcggggugcuccugagccuguacgucuccgccagccucuccuaccugcuguacagcgacauccuccugaaguucuccccgaccgagaucaccgugcccacgaugccccuggacugcgccaacgcgagcaacgugcaggccgucaaccgcuccgccaccaagggcgugacccuccugcugcccgagccggaguggaccuacccccggcucagcugccccggguccacguuccagaaggcccugcugaucagcccccaccgcuucggcgagaccaaggggaacuccgccccgcucaucauccgggagcccuucaucgcgugcggccccaaggagugcaagcacuucgcccugacccacuacgccgcccagcccggcggguacuacaacggcacccgcgaggaccggaacaagcugcgccaccucaucagcgugaagcuggggaagaucccgacggucgagaacuccaucuuccacauggcggccuggagcggcuccgccugccacgacgggcgggaguggaccuacaucggcguggacggccccgacagcaacgcccugcucaagaucaaguacggggaggccuacaccgacaccuaccacuccuacgcgaacaacauccugcgcacgcaggagagcgccugcaacugcaucggcgggaacugcuaccugaugaucaccgacggcagcgccuccggcaucagcgagugccgguuccucaagauccgcgaggggcggaucaucaaggagaucuuccccaccggccgcguggagcacaccgaggagugcacgugcggguucgccuccaacaagaccaucgagugcgccugccgggacaacagcuacaccgcgaagcgccccuucgucaagcugaacguggagaccgacacggccgagauccggcugaugugcaccgagaccuaccucgacaccccgcgccccgacgacggcuccaucacggggcccugcgagagcaacggcgacaagggcuccgggggcaucaagggcggguucgugcaccagcggauggccagcaagaucgggcgcugguacucccggaccaugagcaagaccaagcgcaugggcaugggccuguacgucaaguacgacggggaccccuggaccgacuccgacgcccuggcccucagcggcgugaugguguccauggaggagccggggugguacagcuucggcuucgagaucaaggacaagaagugcgacguccccugcaucgggaucgagauggugcacgacggcggcaagaagacguggcacuccgcggccaccgccaucuacugccugauggggagcggccagcugcucugggacaccgugaccggggucgacauggcccuguga

SEQ ID NO: 93040 - RNA, 1401 nt, Artificial Sequence
  derived and/or modified CDS sequence (opt1) from neuraminidase__InfluenzaB__AFJ80187
augcugcccagcaccauccagacccucacgcuguuccugaccuccggcggggugcuccugagccuguacgucuccgccagccucuccuaccugcuguacagcggcauccuccugaaguucuccccgaccgagaucaccgcccccacgaugccccugaacugcgcgaacgccagcaacuuccaggccgugaaccgcuccgccaccaagggggugacccuccugcugcccgagccggaguggaccuacccccggcucagcugccccggcuccacguuccagaaggcccugcugaucagcccccaccgcuucggggagaccaagggcaacuccgcgccgcucaucauccgggagcccuucaucgccugcggccccaaggagugcaagcacuucgcccugacccacuacgccgcgcagcccgggggcuacuacaacgggacccgcgaggaccggaacaagcugcgccaccucaucagcgucaagcugggcaagaucccgacgguggagaacuccaucuuccacauggccgccuggagcggguccgccugccacgacggccgggaguggaccuacaucggcguggacgggcccgacagcaacgcccugcucaagaucaaguacggcgaggcguacaccgacaccuaccacuccuacgccaacaacauccugcgcacgcaggagagcgccugcaacugcaucgggggcgacugcuaccugaugaucaccgacggcagcgccuccgggaucagcgagugccgguuccucaagauccgcgagggccggaucaucaaggagaucuuccccaccgggcgcgucgagcacaccgaggagugcacgugcggcuucgccuccaacaagaccaucgagugcgcgugccgggacaacagcuacaccgccaagcgccccuucgugaagcugaacguggagaccgacacggccgagauccggcugaugugcaccgagaccuaccucgacaccccgcgccccgacgacggguccaucacgggccccugcgagagcaacggcgacaagggguccggcgggaucaagggcggguucguccaccagcggauggccagcaagaucggccgcugguacucccggaccaugagcaagaccaagcgcaugggcauggggcuguacgugaaguacgacggcgaccccuggaucgacuccgacgcccugacccucagcggggugauggucuccauggaggagccgggcugguacagcuucggguucgagaucaaggacaagaagugcgacgugcccugcaucggcaucgagauggugcacgacggcgggaagaagacguggcacuccgcggccaccgccaucuacugccugaugggcagcgggcagcugcucugggacaccgucaccggcguggacauggcccuguga

SEQ ID NO: 93041 - RNA, 1401 nt, Artificial Sequence; identical to SEQ ID NO: 93036
  derived and/or modified CDS sequence (opt1) from neuraminidase__InfluenzaB__AFJ80198

SEQ ID NO: 93042 - RNA, 1401 nt, Artificial Sequence; identical to SEQ ID NO: 92664
  derived and/or modified CDS sequence (opt1) from neuraminidase__InfluenzaB__AFJ80220

SEQ ID NO: 93043 - RNA, 1401 nt, Artificial Sequence
  derived and/or modified CDS sequence (opt1) from neuraminidase__InfluenzaB__AFJ80231
augcugcccagcaccauccagacccucacgcuguuccugaccuccggcggggugcuccugagccuguacgucuccgccagccucuccuaccugcuguacagcggcauccuccugaaguucucccugaccgagaucaccgccccgacgaugccccucaacugcgcgaacgccagcaacgugcaggccgugaaccgcuccgccaccaagggggucacccuguuccugcccgagcccgaguggaccuacccgcggcucagcugccccggcuccacguuccagaaggcccugcugaucagcccccaccgcuucggggagaccaagggcaacuccgcgccccucaucauccgggagccguucaucgccugcggccccaaggagugcaagcacuucgcccugacccacuacgccgcgcagcccgggggcuacuacaacgggacccgcgaggaccggaacaagcugcgccaccucaucagcguggagcugggcaagauccccacgguggagaacuccaucuuccacauggccgccuggagcggguccgccugccacgacggcaaggaguggaccuacaucggcgucgacgggccggacagcaacgcccugcucaagaucaaguacggcgaggcguacaccgacaccuaccacuccuacgccaacaacauccugcggacgcaggagagcgccugcaacugcaucgggggcgacugcuaccugaugaucaccgacggcagcgccuccgggaucagcgagugccgcuuccucaagauccgggagggccgcaucaucaaggagaucuuccccaccgggcggguggagcacaccgaggagugcacgugcggcuucgccuccaacaagaccaucgagugcgcgugccgcgacaacagcuacaccgccaagcggcccuucgugaagcugaacgucgagaccgacacggccgagauccgccugaugugcaccgagaccuaccucgacacgccccggccggacgacggguccaucaccggccccugcgagagcaacggcgacaagggguccggcgggaucaagggcggguucgugcaccagcgcauggccagcaagaucggccggugguacucccgcaccaugagcaagaccaagcggaugggcauggggcuguacgugaaguacgacggcgaccccuggaucgacuccgacgcccugacccucagcggggucaugguguccauggaggagcccggcugguacagcuucggguucgagaucaaggacaagaagugcgacgugccgugcaucggcaucgagaugguccacgacggcgggaagaagacguggcacuccgcggccaccgccaucuacugccugaugggcagcgggcagcugcucugggacaccgugaccggcguggacauggcccuguga

SEQ ID NO: 93044 - RNA, 1401 nt, Artificial Sequence
  derived and/or modified CDS sequence (opt1) from neuraminidase__InfluenzaB__AFJ80242
augcugcccagcaccauccagacccucacgcuguuccugaccuccggcggggugcuccugagccuguacgucuccgcccuccugagcuaccugcucuacuccgacauccugcugaaguucagcccgaccaaggugaucgcccccaccaugucccucgacugcgcgaacgccagcaacgugcaggccgucaaccacuccgccacggaggagaugaccuuccugcugcccgagcccgaguggaccuacccgcgccucagcugccagggcuccaccuuccagaaggcccugcugaucagcccccaccgguucggggaggcgaagggcaacuccgcgccccucaucauccgcgagcccuucaucgccugcgggccgaaggagugcaagcacuucgcccugacgcacuacgccgcccagcccggcggcuacuacaacgggacccgggaggaccgcaacaagcugcggcaccucaucagcgugaaccugggcaagauccccaccguggagaacuccaucuuccacauggccgccuggagcggguccgccugccacgacggccgcgaguggaccuacaucggggucgacggccccgacagcaacgcgcugaucaagaucaaguacggcgaggccuacacggacaccuaccacuccuacgccaacaacauccuccggacccaggagagcgccugcaacugcaucgggggcgacugcuaccugaugaucaccgacgggagcgccuccggcaucagccgcugccgguuccugaagauccgcgagggccggaucaucaaggagaucuucccgacggggcgcguggagcacaccgaggagugcacgugcggcuucgcguccaacaagaccaucgagugcgccugccgggacaacagcuacaccgccaagcgccccuucgugaagcucaacgucgagaccgacaccgccgagauccggcugaugugcaccgagacguaccuggacacgccccgccccgacgacggguccaucaccggcccgugcgagagcaacggggacaagggcaacggcgggaucaagggcggguucgugcaccagcggauggccucccgcaucggccggugguacagccgcaccauguccaagaccaagcggauggggauggagcucuacgugaaguacgacggcgaccccuggaccgacagcgacgcgcuggcccccuccggcgucauggugagcauggaggagcccgggugguacuccuucggcuucgagaucaaggacaagaagugcgacgugccgugcaucgggaucgagaugguccacgacggcgggaagaccaccuggcacagcgccgccacggccaucuacugccugaugggcuccggccagcuccugugggacaccgugaccgggguggacauggcgcuguga

SEQ ID NO: 93045 - RNA, 1401 nt, Artificial Sequence
  derived and/or modified CDS sequence (opt1) from neuraminidase__InfluenzaB__AFJ80660
augcugcccagcaccauccagacccucacgcuguuccugaccuccggcggggugcuccugagccuguacgucuccgccagccucuccuaccugcuguacagcgacauccuccugaaguucuccccgaccgagaucaccgcccccacgaugccccuggacugcgcgaacgccagcaacgugcaggccgugaaccgcuccgccaccaagggcgucacccuccugcugcccgagccggaguggaccuacccccggcucagcugccccggguccacguuccagaaggcccugcugaucagcccccaccgcuucggcgagaccaaggggaacuccgcgccgcucaucauccgggagcccuucaucgccugcggccccaaggagugcaagcacuucgcccugacccacuacgccgcgcagcccggcggguacuacaacggcacccgcgaggaccggaacaagcugcgccaccucaucagcgugaagcuggggaagaucccgacgguggagaacuccaucuuccacauggccgccuggagcggcuccgccugccacgacgggcgggaguggaccuacaucggcgucgacggccccgacagcaacgcccugcucaagaucaaguacggggaggcguacaccgacaccuaccacuccuacgccaacaacauccugcgcacgcaggagagcgccugcaacugcaucggcggggacugcuaccugaugaucaccgacggcagcgccuccggcaucagcgagugccgguuccucaagauccgcgaggggcggaucaucaaggagaucuuccccaccggccgcguggagcacaccgaggagugcacgugcggguucgccuccaacaagaccaucgagugcgcgugccgggacaacagcuacaccgccaagcgccccuucgugaagcugaacgucgagaccgacacggccgagauccggcugaugugcaccgagaccuaccucgacaccccgcgccccgacgacggcuccaucacggggcccugcgagagcaacggcgacaagggcuccgggggcaucaagggcggguucgugcaccagcggaugaccagcaagaucgggcgcugguacucccggaccaugagcaagaccaagcgcaugggcaugggccuguacgugaaguacgacggggaccccuggacggacuccgacgcccuggcccucagcggcgucaugguguccauggaggagccggggugguacagcuucggcuucgagaucaaggacaagaagugcgacgugcccugcaucgggaucgagaugguccacgacggcggcaagaagaccuggcacuccgcggccaccgccaucuacugccugauggggagcggccagcugcucugggacaccgugacggggguggacauggcccuguga

SEQ ID NO: 93046 - RNA, 1401 nt, Artificial Sequence; identical to SEQ ID NO: 93043
  derived and/or modified CDS sequence (opt1) from neuraminidase__InfluenzaB__AFJ80671

SEQ ID NO: 93047 - RNA, 1401 nt, Artificial Sequence; identical to SEQ ID NO: 93043
  derived and/or modified CDS sequence (opt1) from neuraminidase__InfluenzaB__AFJ80682

SEQ ID NO: 93048 - RNA, 1401 nt, Artificial Sequence
  derived and/or modified CDS sequence (opt1) from neuraminidase__InfluenzaB__AFJ80693
augcugcccagcaccauccagacccucacgcuguuccugaccuccggcggggugcuccugagccuguacgucuccgccagccucuccuaccugcuguacagcggcauccuccugaaguucuccccgaccgagaucaccgcccccacgaugccccugaacugcgcgaacgccagcaacgugcaggccgugaaccgcuccgccaccaagggggucacccuccugcugcccgagccggaguggaccuacccccggcucagcugccccggcuccacguuccagaaggcccugcugaucagcccccaccgcuucggggagaccaagggcaacuccgcgccgcucaucauccgggagcccuucaucgccugcggccccaaggagugcaagcacuucgcccugacccacuacgccgcgcagcccgggggcuacuacaacgggacccgcgaggaccggaacaagcugcgccaccucaucagcgugaagcugggcaagaucccgacgguggagaacuccaucuuccacauggccgccuggagcggguccgccugccacgacggccgggaguggaccuacaucggcgucgacgggcccgacagcaacgcccugcucaagaucaaguacggcgaggcguacaccgacaccuaccacuccuacgccaacaacauccugcgcacgcaggagagcgccugcaacugcaucgggggcgacugcuaccugaugaucaccgacggcagcgccuccgggaucagcgagugccgguuccucaagauccgcgagggccggaucaucaaggagaucuuccccaccgggcgcguggagcacaccgaggagugcacgugcggcuucgccuccaacaagaccaucgagugcgcgugccgggacaacagcuacaccgccaagcgccccuucgugaagcugaacgucgagaccgacacggccgagauccggcugaugugcaccgagaccuaccucgacaccccgcgccccgacgacggguccaucacgggccccugcgagagccacggcgacaagggguccggcgggaucaagggcggguucgugcaccagcggauggccagcaagaucggccgcugguacucccggaccaugagcaagaccaagcgcaugggcauggggcuguacgugaaguacgacggcgaccccuggaucgacuccggggcccugacccucagcggcgucaugguguccauggaggagccggggugguacagcuucggcuucgagaucaaggacaagaagugcgacgugcccugcaucggcaucgagaugguccacgacgggggcaagaagacguggcacuccgcggccaccgccaucuacugccugauggggagcggccagcugcucugggacaccgugaccggcguggacauggcccuguga

SEQ ID NO: 93049 - RNA, 1401 nt, Artificial Sequence
  derived and/or modified CDS sequence (opt1) from neuraminidase__InfluenzaB__AFJ80726
augcugcccagcaccauccagacccucacgcuguuccugaccuccggcggggugcuccugagccuguacgucuccgccagccucuccuaccugcuguacagcgacauccuccugaaguucucccagaccgagaucaccgccccgacgaugccccuggacugcgcgaacgccagcaacgugcaggccgugaaccgcuccgccaccaagggcgucacccuccugcugcccgagcccgaguggaccuacccgcggcucagcugccccggguccacguuccagaaggcccugcugaucagcccccaccgcuucggcgagaccaaggggaacuccgcgccccucaucauccgggagccguucaucgccugcggccccaaggagugcaagcacuucgcccugacccacuacgccgcgcagcccggcggguacuacaacggcacccgcgaggaccggaacaagcugcgccaccucaucagcgugaagcuggggaagauccccacgguggagaacuccaucuuccacauggccgccuggagcggcuccgccugccacgacgggcgggaguggaccuacaucggcgucgacggcccggacagcaacgcccugcucaagaucaaguacggggaggcguacaccgacaccuaccacuccuacgccaagaacauccugcgcacgcaggagagcgccugcaacugcaucggcggggacugcuaccugaugaucaccgacggcagcgccuccggcaucagcgagugccgguuccucaagauccgcgaggggcggaucaucaaggagaucuuccccaccggccgcgugaagcacaccgaggagugcacgugcggguucgccuccaacaagaccaucgagugcgcgugccgggacaacagcuacaccgccaagcgccccuucgugaagcugaacgucgagaccgacacggccgagauccggcugaugugcaccgagaccuaccucgacacgccccgcccgaacgacggcuccaucaccgggcccugcgagagcaacggcgaccggggcgggggcgggaucaagggcggguucgugcaccagcgcauggccuccaagaucggccggugguacagccgcaccauguccaagaccaagcggaugggcauggggcuguacgugaaguacgacggcgaccccuggaccgacagcgaggcccuggcgcucuccggggucauggugcccauggaggagccgggcugguacagcuucggguucgagaucaaggacaagaagugcgacgugcccugcaucggcaucgagaugguccacgacggcgggaagacgaccuggcacuccgccgccaccgccaucuacugccugaugggcagcgggcagcugcucugggacaccgugacgggcguggacauggcccuguga

SEQ ID NO: 93050 - RNA, 1401 nt, Artificial Sequence
  derived and/or modified CDS sequence (opt1) from neuraminidase__InfluenzaB__AFJ80737
augcugcccagcaccauccagacccucacgcuguuccugaccuccggcggggugcuccugagccuguacgucuccgccagccucuccuaccugcuguacagcgacauccuccugaaguucucccagaccgagaucaccgccccgaucaugccccuggacugcgcgaacgccagcaacgugcaggccgugaaccgcuccgccacgaagggcgucacccuccugcugcccgagcccgaguggaccuacccgcggcucagcugccccggguccaccuuccagaaggcccugcugaucagcccccaccgcuucggcgagacgaaggggaacuccgcgccccucaucauccgggagccguucaucgccugcggccccaaggagugcaagcacuucgcccugacccacuacgccgcgcagcccggcggguacuacaacggcacccgcgaggaccggaacaagcugcgccaccucaucagcgugaagcuggggaagauccccaccguggagaacuccaucuuccacauggccgccuggagcggcuccgccugccacgacgggcgggaguggacguacaucggcgucgacggcccggacagcaacgcccugcucaagaucaaguacggggaggcguacaccgacaccuaccacuccuacgccaagaacauccugcgcacccaggagagcgccugcaacugcauccggggcgacugcuaccugaugaucacggacgggcccgccagcggcaucuccgagugccgcuuccucaagauccgggagggccgcaucaucaaggagaucuuccccaccgggcgggugaagcacaccgaggagugcacgugcggcuucgccagcaacaagaccaucgagugcgcgugccgcgacaacuccuacaccgccaagcggcccuucgugaagcugaacgucgagaccgacaccgccgagauccgccugaugugcacggagaccuaccucgacaccccgcggcccaacgacgggagcaucaccggccccugcgaguccaacggggacaagggcagcggcgggaucaagggcggguucgugcaccagcgcauggccuccaagaucggccggugguacagccgcacgauguccaagaccaagcggauggggaugggccuguacgugaaguacgacggcgaccccuggaccgacagcgaggcccuggcgcucuccggggucauggugagcauggaggagccgggcugguacuccuucggguucgagaucaaggacaagaagugcgacgugcccugcaucggcaucgagaugguccacgacgggggcaagaccacguggcacagcgccgccaccgccaucuacugccugaugggcuccgggcagcugcucugggacaccgugaccggcguggacauggcccuguga

SEQ ID NO: 93051 - RNA, 1401 nt, Artificial Sequence; identical to SEQ ID NO: 92692
  derived and/or modified CDS sequence (opt1) from neuraminidase__InfluenzaB__AFJ80759

SEQ ID NO: 93052 - RNA, 1401 nt, Artificial Sequence
  derived and/or modified CDS sequence (opt1) from neuraminidase__InfluenzaB__AFJ80770
augcugcccagcaccauccagacccucacgcuguuccugaccuccggcggggugcuccugagccuguacgucuccgccagccucuccuaccugcuguacagcgacauccuccugaaguucucccagaccgagaucaccgccccgacgaugccccuggacugcgcgaacgccagcaacgugcaggccgugaaccgcuccgccaccaagggcgucacccuccugcugcccgagcccgaguggaccuacccgcggcucagcugccccggguccacguuccagaaggcccugcugaucagcccccaccgcuucggcgagaccaaggggaacuccgcgccccucaucauccgggagccguucaucgccugcggccccaacgagugcaagcacuucgcccugacccacuacgccgcgcagcccggcggguacuacaacggcacccgcgaggaccggaacaagcugcgccaccucaucagcgugaagcuggggaagauccccacgguggagaacuccaucuuccacauggccgccuggagcggcuccgccugccacgacgggcgggaguggaccuacaucggcgucgacggcccggacagcaacgcccugcucaagaucaaguacggggaggcguacaccgacaccuaccacuccuacgccaagaacauccugcgcacgcaggagagcgccugcaacugcaucggcggggacugcuaccugaugaucaccgacggccccgccagcggcaucuccgagugccgguuccucaagauccgcgaggggcggaucaucaaggagaucuuccccaccggccgcgugaagcacaccgaggagugcacgugcggguucgccagcaacaagaccaucgagugcgcgugccgggacaacuccuacaccgccaagcgccccuucgugaagcuggacgucgagaccgacacggccgagauccggcugaugugcaccgagaccuaccucgacaccccgcgccccaacgacggcagcaucacggggcccugcgaguccaacggcgacaagggcagcgggggcaucaagggcggguucgugcaccagcggauggccuccaagaucgggcgcugguacagccggacccuguccaagaccaagcgcaugggcaugggccuguacgugaaguacgacggggaccccuggaccgacagcgaggcccucgcgcuguccggcgucauggugagcauggaggagccggggugguacuccuucggcuucgagaucaaggacaagaagugcgacgugcccugcaucgggaucgagaugguccacgacggcggcaagacgaccuggcacagcgccgccaccgccaucuacugccugaugggguccggccagcuccugugggacaccgugacggggguggacauggcccuguga

SEQ ID NO: 93053 - RNA, 1401 nt, Artificial Sequence; identical to SEQ ID NO: 92692
  derived and/or modified CDS sequence (opt1) from neuraminidase__InfluenzaB__AFJ80785

SEQ ID NO: 93054 - RNA, 1401 nt, Artificial Sequence; identical to SEQ ID NO: 92692
  derived and/or modified CDS sequence (opt1) from neuraminidase__InfluenzaB__AFJ80796

SEQ ID NO: 93055 - RNA, 1401 nt, Artificial Sequence
  derived and/or modified CDS sequence (opt1) from neuraminidase__InfluenzaB__AFJ80807
augcugcccagcaccauccagacccucacgcuguuccugaccuccggcggggugcuccugagccuguacgucuccgugagccucuccuaccugcuguacagcgacauccuccugaaguucccguccaccgagaucaccgcccccacgaugccccuggacugcgccaacgcgagcaacgugcaggccgucaaccgcuccgccaccaagggcgugacccuccugcugcccgagccggaguggaccuacccccggcucagcugccccggguccacguuccagaaggcccugcugaucagcccccaccgcuucggcgagaccaaggggaacuccgccccgcucaucauccgggagcccuucaucgcgugcggccccaaggagugcaagcacuucgcccugacccacuacgccgcccagcccggcggguacuacaacggcacccgcggggaccggaacaagcugcgccaccucaucagcgugaagcugggcaagaucccgacggucgagaacuccaucuuccacauggcggccuggagcggguccgccugccacgacggcaaggaguggaccuacaucggcguggacgggcccgacaacaacgcccugcucaagaucaaguacggcgaggccuacaccgacaccuaccacagcuacgcgaacaacauccugcggacgcaggaguccgccugcaacugcaucgggggcaacugcuaccugaugaucaccgacggcagcgccagcgggguguccgagugccgcuuccucaagauccgggagggccgcaucaucaaggagaucuuccccaccgggcggaucaagcacaccgaggagugcacgugcggcuucgccagcaacaagaccaucgagugcgccugccgcgacaacuccuacaccgcgaagcggcccuucgucaagcugaacguggagaccgacacggccgagauccgccugaugugcaccgagaccuaccucgacaccccgcggcccgacgacgggagcaucacgggccccugcgaguccaacggcgacaaggggagcggcgggaucaagggcggguucgugcaccagcgcauggccuccaagaucggccggugguacagccgcaccauguccaagaccaagcggaugggcauggggcuguacgucaaguacgacggcgaccccugggccgacagcgacgcccuggcguucuccggggugauggugagcauggaggagccgggcugguacuccuucggguucgagaucaaggacaagaagugcgacguccccugcaucggcaucgagauggugcacgacggcgggaaggagaccuggcacagcgccgccacggccaucuacugccucaugggcuccgggcagcugcugugggacaccgugaccggcgucaacauggcccucuga

SEQ ID NO: 93056 - RNA, 1401 nt, Artificial Sequence; identical to SEQ ID NO: 92692
  derived and/or modified CDS sequence (opt1) from neuraminidase__InfluenzaB__AFJ80818

SEQ ID NO: 93057 - RNA, 1401 nt, Artificial Sequence; identical to SEQ ID NO: 92692
  derived and/or modified CDS sequence (opt1) from neuraminidase__InfluenzaB__AFJ80829

SEQ ID NO: 93058 - RNA, 1401 nt, Artificial Sequence; identical to SEQ ID NO: 93029
  derived and/or modified CDS sequence (opt1) from neuraminidase__InfluenzaB__AFJ80840

SEQ ID NO: 93059 - RNA, 1401 nt, Artificial Sequence; identical to SEQ ID NO: 93029
  derived and/or modified CDS sequence (opt1) from neuraminidase__InfluenzaB__AFJ80851

SEQ ID NO: 93060 - RNA, 1401 nt, Artificial Sequence
  derived and/or modified CDS sequence (opt1) from neuraminidase__InfluenzaB__AFJ80862
augcugcccagcaccauccagacccucacgcuguuccugaccuccggcggggugcuccugagccuguacgucuccgccagccucuccuaccugcuguacagcgacauccuccugaaguucccguccaccgagaucaccgcccccacgaugccccuggacugcgcgaacgccagcaacgugcaggccaugaaccgcuccgccaccaagggcgugacccuccugcugcccgagaccgaguggacguacccgcggcucagcugccccggguccaccuuccagaaggcccugcugaucagcccccaccgcuucggcgagaccaaggggaacuccgcgccccucaucauccgggagccguucaucgccugcggccccaaggagugcaagcacuucgcccugacccacuacgccgcgcagcccggcggguacuacaacggcacgcgcggggaccggaacaagcugcgccaccucaucagcgucaagcugggcaagauccccaccguggagaacuccaucuuccacauggccgccuggagcggguccgccugccacgacggcaaggaguggaccuacaucggcguggacgggccggacaacaacgcccugcucaagaucaaguacggcgaggcguacaccgacacguaccacagcuacgccaacaacauccugcggacccaggaguccgccugcaacugcaucgggggcaacugcuaccugaugaucaccgacggcagcgccagcggggucuccgagugccgcuuccucaagauccgggagggccgcaucaucaaggagaucuuccccaccgggcggaucaagcacacggaggagugcacgugcggcuucgccagcaacaagaccaucgagugcgcgugccgcgacaacuccuacaccgccaagcggcccuucgugaagcugaacguggagaccgacaccgccgagauccgccugaugugcaccgagaccuaccucgacacgccccggccggacgacgggagcaucaccggccccugcgaguccaacggcgacaaggggagcggcgggaucaagggcggguucguccaccagcgcauggccuccaagaucggccggugguacagccgcaccauguccaagaccgagcggaugggcauggggcuguacgugaaguacgacggcgaccccugggccgacagcgacgcgcugacguucuccggggugauggucagcauggaggagcccggcugguacuccuucggguucgagaucaaggacaagaagugcgacgugccgugcaucggcaucgagauggugcacgacggcgggaaggagaccuggcacagcgccgccaccgccaucuacugccucaugggcuccgggcagcugcugugggacaccgucacgggcgugaacauggcccucuga

SEQ ID NO: 93061 - RNA, 1401 nt, Artificial Sequence
  derived and/or modified CDS sequence (opt1) from neuraminidase__InfluenzaB__AFJ80873
augcugcccagcaccauccagacccucacgcuguuccugaccuccggcggggugcuccugagccuguacgucuccgccagccucucccaccuccuguacagcggcauccugcugaaguucccguccaccgagaucaccgcccccacgaugccccuggacugcgcgaacgccagcaacgugcaggccgugaaccgcuccgccaccaagggggucacccuccugcccccggagcccgaguggaccuacccccggcugagcugccccggcuccacguuccagaaggcccuccugaucagcccgcaccgcuucggggagaccaagggcaacuccgcgccccugaucauccgggagcccuucaucgccugcggccccaaggagugcaagcacuucgcccucacccacuacgccgcgcagcccgggggcuacuacaacgggacccgcggcgaccggaacaagcugcgccaccugaucagcgugaagcucgggaagauccccacgguggagaacuccaucuuccacauggccgccuggagcggcuccgccugccacgacggcaaggaguggaccuacaucggggucgacggccccgacaacaacgcccugcugaagaucaaguacggggaggcguacaccgacaccuaccacagcuacgccaacaacauccuccggacgcaggaguccgccugcaacugcaucggcggcaacugcuaccugaugaucaccgacgggagcgccagcggcguguccgagugccgcuuccugaagauccgggaggggcgcaucaucaaggagaucuuccccaccggccggaucaagcacaccgaggagugcacgugcggguucgccagcaacaagaccaucgagugcgcgugccgcgacaacuccuacaccgccaagcggccguucgugaagcucaacgucgagaccgacacggccgagauccgccugaugugcaccgagaccuaccuggacaccccgcggcccgacgacggcagcaucacgggccccugcgaguccaacggggacaagggcagcgggggcaucaagggcggguucgugcaccagcgcauggccuccaagaucggccggugguacagccgcaccauguccaagaccgagcggauggggaugggccucuacgugaaguacgacggggacccgugggccgacagcgacgcgcugaccuucuccggcgucauggugagcauggaggagcccgggugguacuccuucggcuucgagaucaaggacaagaagugcgacgugcccugcaucggcaucgagaugguccacgacgggggcaaggagacguggcacagcgccgccaccgccaucuacugccugaugggguccggccagcuccugugggacaccgugaccggcgugaacauggcccuguga

SEQ ID NO: 93062 - RNA, 1401 nt, Artificial Sequence
  derived and/or modified CDS sequence (opt1) from neuraminidase__InfluenzaB__AFJ80884
augcugcccagcaccauccagacccucacgcuguuccugaccuccggcggggugcuccugagccuguacgucuccgccagccucuccuaccugcuguacagcgacauccuccugaaguucccguccaccgagaucaccgcccccacgaugccccuggacugcgcgaacgccagcaacgugcaggccgugaaccgcuccgccaccaagggcgucacccuccugcugcccgagccggaguggaccuacccccggcucagcugccccggguccacguuccagaaggcccugcugaucagcccccaccgcuucggcgagaccaaggggaacuccgcgccgcucaucauccgggagcccuucaucgccugcggccccaaggagugcaagcacuucgcccugacccacuacgccgcgcagcccggcggguacuacaacggcacccgcggggaccggaacaagcugcgccaccucaucagcgugaagcugggcaagaucccgacgguggagaacuccaucuuccacauggccgccuggagcggguccgccugccacgacggcaaggaguggaccuacaucggcgucgacgggcccgacaacaacgcccugcucaagaucaaguacggcgaggcguacaccgacaccuaccacagcuacgccaacaacauccugcggacgcaggaguccgccugcaacugcaucgggggcaacugcuaccugaugaucaccgacggcagcgccagcgggguguccaagugccgcuuccucaagauccgggagggccgcaucaucaaggagaucuuccccaccgggcggaucaagcacaccgaggagugcacgugcggcuucgccagcaacaagaccaucgagugcgcgugccgcgacaacuccuacaccgccaagcggcccuucgugaagcugaacgucgagaccgacacggccgagauccgccugaugugcaccgagaccuaccucgacaccccgcggcccgacgacgggagcaucacgggccccugcgaguccaacggcgacaaggggagcggcgggaucaagggcggguucgugcaccagcgcauggccuccaagaucggccggugguacagccgcaccauguccaagaccgagcggaugggcauggggcuguacgugaaguacgacggcgaccccugggccgacagcgacgcgcugaccuucuccggggucauggugagcauggaggagccgggcugguacuccuucggguucgagaucaaggacaagaagugcgacgugcccugcaucggcaucgagaugguccacgacggcgggaaggagacguggcacagcgccgccaccgccaucuacugccucaugggcuccgggcagcugcugugggacaccgugaccggcgugaacauggcccucuga

SEQ ID NO: 93063 - RNA, 1401 nt, Artificial Sequence; identical to SEQ ID NO: 93028
  derived and/or modified CDS sequence (opt1) from neuraminidase__InfluenzaB__AFJ80895

SEQ ID NO: 93064 - RNA, 1401 nt, Artificial Sequence
  derived and/or modified CDS sequence (opt1) from neuraminidase__InfluenzaB__AFJ80917
augcugcccagcaccauccagacccucacgcuguuccugaccuccggcggggugcuccugagccuguacgucuccgccagccucuccuaccugcuguacagcgacauccuccugaaguucccguccaccgagaucaccgcccccacgaugccccuggacugcgcgaacgccagcaacgugcaggccgugaaccgcuccgccaccaagggcgucacccuccugcugcccgagccggaguggaccuacccccggcucagcugccccggguccacguuccagaaggcccugcugaucagcccccaccgcuucggcgagaccaaggggaacuccgcgccgcucaucauccgggagcccuucaucgccugcggccccaaggagugcaagcacuucgcccugacccacuacgccgcgcagcccggcggguacuacaacggcacccgcggggaccggaacaagcugcgccaccucaucagcgugaagcugggcaagaucccgacgguggagaacuccaucuuccacauggccgccuggagcggguccgccugccacgacggcaaggaguggaccuacaucggcgucgacgggcccgacaacaacgcccugcucaagaucaaguacggcgaggcguacaccgacaccuaccacagcuacgccaacaacauccugcggacgcaggaguccgccugcaacugcaucgggggcaacugcuaccugaugaucaccgacggcagcgccagcgggguguccgagugccgcuuccucaagauccgggagggccgcaucaucaaggagaucuuccccaccgggcggaucaagcacaccgaggagugcacgugcggcuucgccagcaacaagaccaucgagugcacgugccgcgacaacuccuacaccgcgaagcggcccuucgugaagcugaacgucgagaccgacaccgccgagauccgccugaugugcaccgagaccuaccucgacacgccgcggcccgacgacgggagcaucaccggccccugcgaguccaacggcgacaaggggagcggcgggaucaagggcggguucgugcaccagcgcauggccuccaagaucggccggugguacagccgcaccauguccaagaccgagcggaugggcauggggcuguacgugaaguacgacggcgaccccugggccgacagcgacgcccugacguucuccggggucauggugagcauggaggagccgggcugguacuccuucggguucgagaucaaggacaagaagugcgacgugcccugcaucggcaucgagaugguccacgacggcgggaaggagaccuggcacagcgcggccaccgccaucuacugccucaugggcuccgggcagcugcugugggacaccgugacgggcgugaacauggcccucuga

SEQ ID NO: 93065 - RNA, 1401 nt, Artificial Sequence
  derived and/or modified CDS sequence (opt1) from neuraminidase__InfluenzaB__AFJ80928
augcugcccagcaccauccagacccucacgcuguuccugaccuccggcggggugcuccugagccuguacgucuccgccagccucuccuaccugcuguacagcgacauccuccugaaguucccguccaccgagaucaccgcccccacgaugccccuggacugcgcgaacgccagcaacgugcaggccgugaaccgcuccgccaccaagggcgucacccuccugcugcccgagccggaguggaccuacccccggcucagcugccccggguccacguuccagaaggcccugcugaucagcccccaccgcuucggcgagaccaaggggaacuccgcgccgcucaucauccgggagcccuucaucgccugcgagcccaaggagugcaagcacuucgcccugacccacuacgccgcgcagcccggcggcuacuacaacgggacccgcggcgaccggaacaagcugcgccaccucaucagcgugaagcuggggaagaucccgacgguggagaacuccaucuuccacauggccgccuggagcggcuccgccugccacgacgggaaggaguggaccuacaucggcgucgacggccccgacaacaacgcccugcucaagaucaaguacggggaggcguacaccgacaccuaccacagcuacgccaacaacauccugcggacgcaggaguccgccugcaacugcaucggcgggaacugcuaccugaugaucaccgacggcagcgccagcggcguguccgagugccgcuuccucaagauccgggaggggcgcaucaucaaggagaucuuccccaccggccggaucaagcacaccgaggagugcacgugcggguucgccagcaacaagaccaucgagugcgcgugccgcgacaacuccuacaccgccaagcggcccuucgugaagcugaacgucgagaccgacacggccgagauccgccugaugugcaccgagaccuaccucgacaccccgcggcccgacgacggcagcaucacggggcccugcgaguccaacggcgacaagggcagcgggggcaucaagggcggguucgugcaccagcgcauggccuccaagaucgggcggugguacagccgcaccauguccaagaccgagcggaugggcaugggccuguacgugaaguacgacggggaccccugggccgacagcgacgcgcugaccuucuccggcgucauggugagcauggaggagccggggugguacuccuucggcuucgagaucaaggacaagaagugcgacgugcccugcaucgggaucgagaugguccacgacggcggcaaggagacguggcacagcgccgccaccgccaucuacugccucaugggguccggccagcugcugugggacaccgugaccggggugaacauggcccucuga

SEQ ID NO: 93066 - RNA, 1401 nt, Artificial Sequence
  derived and/or modified CDS sequence (opt1) from neuraminidase__InfluenzaB__AFJ80939
augcugcccagcaccauccagacccucacgcuguuccugaccuccggcggggugcuccugagccuguacgucuccgccagccucuccuaccugcuguacagcgacauccuccugaaguucccgcccaccgaggugaccgcccccacgaugccccuggacugcgcgaacgccuccaacgugcaggccgucaaccgcagcgccaccaagggcgugacccuccugcugccggagcccgaguggaccuacccccggcucuccugccccgggagcacguuccagaaggcccugcugaucuccccgcaccgcuucggcgagaccaaggggaacagcgcgccccucaucauccgggagcccuucaucgccugcggccccaaggagugcaagcacuucgcccugacccacuacgccgcgcagccgggcggguacuacaacggcacccgcggggaccggaacaagcugcgccaccucaucuccgugaagcugggcaagauccccacggucgagaacagcaucuuccacauggccgccugguccgggagcgccugccacgacggcaaggaguggaccuacaucggcguggacgggcccgacaacaacgcccugcucaagaucaaguacggcgaggcguacaccgacaccuaccacuccuacgccaacaacauccugcggacgcaggagagcgccugcaacugcaucgggggcaacugcuaccugaugaucaccgacggcuccgccagcggggugagcgagugccgcuuccucaagauccgggagggccgcaucaucaaggagaucuuccccaccgggcggaucaagcacaccgaggagugcacgugcggcuucgccuccaacaagaccaucgagugcgcgugccgcgacaacagcuacaccgccaagcggccguucgucaagcugaacguggagaccgacacggccgagauccgccugaugugcaccgagaccuaccucgacacgccccggcccgacgacggguccaucaccggccccugcgagagcaacggcgacaagggguccggcgggaucaagggcggguucgugcaccagcgcauggccagcaagaucggccggugguacucccgcaccaugagcaagaccgagcggaugggcauggggcuguacgucaaguacgacggcgacccgugggccgacuccgacgcgcugaccuucagcggggugaugguguccauggaggagcccggcugguacagcuucggguucgagaucaaggacaagaagugcgacguccccugcaucggcaucgagauggugcacgacggcgggaaggagacguggcacuccgccgccaccgccaucuacugccucaugggcagcgggcagcugcugugggacaccgugaccggcgucaacauggcccucuga

SEQ ID NO: 93067 - RNA, 1401 nt, Artificial Sequence
  derived and/or modified CDS sequence (opt1) from neuraminidase__InfluenzaB__AFJ80950
augcugcccagcaccauccagacccucacgcuguuccugaccuccggcggggugcuccugagccuguacgucuccgccagccucuccuaccugcuguacagcgacauccuccugaaguucucccagaccgagaucaccgccccgaucaugccccuggacugcgcgaacgccagcaacgugcaggccgugaaccgcuccgccgccaagggcgucacgcuccugcugcccgagcccgaguggaccuacccgcggcucagcugccccggguccaccuuccagaaggcgcugcugaucagcccccaccgcuucggcgagaccaaggggaacuccgcgccccucaucauccgggagccguucaucgccugcggccccacggagugcaagcacuucgcccugacccacuacgccgcccagcccggcggguacuacaacggcacccgcgaggaccggaacaagcugcgccaccucaucagcgugaagcuggggaagauccccaccguggagaacuccaucuuccacauggccgccuggagcggcuccgccugccacgacgggaaggaguggacguacaucggcgucgacggcccggacagcaacgcgcugcucaagaucaaguacggggaggccuacaccgacaccuaccacuccuacgccaagaacauccugcggacccaggagagcgccugcaacugcaucggcggggacugcuaccugaugaucacggacggccccgccagcggcaucuccgagugccgcuuccucaagauccgggaggggcgcaucaucaaggagaucuuccccaccggccgggugaagcacaccgaggagugcacgugcggguucgcgagcaacaagaccaucgagugcgccugccgcgacaacuccuacaccgccaagcggcccuucgugaagcugaacgucgagaccgacaccgccgagauccgccugaugugcacggagaccuaccucgacaccccgcggcccaacgacggcagcaucaccgggcccugcgaguccgacggcgacaagggcaacgggggcaucaagggcggguucgugcaccagcgcauggccagcaagaucgggcggugguacucccgcacgaugagcaagaccaagcggaugggcaugggccuguacgugaaguacgacggggaccccuggaccgacuccgaggcgcuggcccucagcggcgucaugguguccauggaggagccggggugguacagcuucggcuucgagaucaaggacaagaagugcgacgugcccugcaucgggaucgagaugguccacgacggcggcaagaccacguggcacuccgccgccaccgccaucuacugccugauggggagcggccagcugcucugggacaccgugaccgggguggacauggcgcuguga

SEQ ID NO: 93068 - RNA, 1401 nt, Artificial Sequence; identical to SEQ ID NO: 93029
  derived and/or modified CDS sequence (opt1) from neuraminidase__InfluenzaB__AFJ80961

SEQ ID NO: 93069 - RNA, 1401 nt, Artificial Sequence; identical to SEQ ID NO: 92812
  derived and/or modified CDS sequence (opt1) from neuraminidase__InfluenzaB__AFJ80972

SEQ ID NO: 93070 - RNA, 1401 nt, Artificial Sequence; identical to SEQ ID NO: 92812
  derived and/or modified CDS sequence (opt1) from neuraminidase__InfluenzaB__AFJ80983

SEQ ID NO: 93071 - RNA, 1401 nt, Artificial Sequence; identical to SEQ ID NO: 92767
  derived and/or modified CDS sequence (opt1) from neuraminidase__InfluenzaB__AFJ80994

SEQ ID NO: 93072 - RNA, 1401 nt, Artificial Sequence; identical to SEQ ID NO: 92812
  derived and/or modified CDS sequence (opt1) from neuraminidase__InfluenzaB__AFJ81005

SEQ ID NO: 93073 - RNA, 1401 nt, Artificial Sequence; identical to SEQ ID NO: 92812
  derived and/or modified CDS sequence (opt1) from neuraminidase__InfluenzaB__AFJ84364

SEQ ID NO: 93074 - RNA, 1401 nt, Artificial Sequence
  derived and/or modified CDS sequence (opt1) from neuraminidase__InfluenzaB__AFJ90399
augcugcccagcaccauccagacccucacgcuguuccugaccuccggcggggugcuccugagccuguacgucuccgccagccucuccuaccugcuguacagcgacauccuccugaaguucccguccaccgagaucaccgccccgcccaugccccuggacugcgcgaacgccagcaacgugcaggccgugaaccgcuccgccacgaagggcgucacccuccugcugcccgagcccgaguggaccuacccccggcucagcugccccggguccaccuuccagcgcgcccugcugaucagcccgcaccgguucggcgagacgaaggggaacuccgcgccccucaucauccgcgagcccuucaucgccugcggcccccgggagugcaagcacuucgcccugacccacuacgccgcgcagccgggcggguacuacaacggcacccgcggggaccggaacaagcugcgccaccucaucagcgugaagcugggcaagauccccaccguggagaacuccaucuuccacauggccgccuggagcggguccgccugccacgacggcaaggaguggacguacaucggcgucgacgggcccgacaacaacgcccugcucaagaucaaguacggcgaggcguacaccgacaccuaccacagcuacgccaacaacauccugcggacccaggaguccgccugcaacugcaucgggggcaacugcuaccugaugaucacggacggcagcgccagcgggguguccgagugccgcuuccucaagauccgggagggccgcaucaucaaggagaucuuccccaccgggcggaucaagcacaccgaggagugcacgugcggcuucgccagcaacaagaccaucgagugcgcgugccgcgacaacuccuacaccgccaagcggccguucgugaagcugaacgucgagaccgacaccgccgagauccgccugaugugcacggagaccuaccucgacacgccccggcccgacgacgggagcaucaccggccccugcgaguccaacggcgacaaggggagcggcgggaucaagggcggguucgugcaccagcgcaugaccuccaagaucggccggugguacagccgcaccauguccaagaccgagcggaugggcauggggcuguacgugaaguacgacggcgacccgugggccgacagcgacgcccugaccuucuccggggucauggugagcauggaggagcccggcugguacuccuucggguucgagaucaaggacaagaagugcgacgugcccugcaucggcaucgagaugguccacgacggcgggaaggagacguggcacagcgcggccaccgccaucuacugccucaugggcuccgggcagcugcugugggacaccgugaccggcgugaacauggcccucuga

SEQ ID NO: 93075 - RNA, 1401 nt, Artificial Sequence
  derived and/or modified CDS sequence (opt1) from neuraminidase__InfluenzaB__AFJ90410
augcugcccagcaccauccagacccucacgcuguuccugaccuccggcggggugcuccugagccuguacgucuccgccagccucuccuaccugcuguacagcgacauccuccugaaguucucccagaccgagaucaccgccccgaucaugccccuggacugcgcgaacgccagcaacgugcaggccgugaaccgcuccgccgccaagggcgucacgcuccugcugcccaagcccgaguggaccuacccgcggcucagcugccccggguccaccuuccagaaggcgcugcugaucagcccccaccgcuucggcgagaccaaggggaacuccgcgccccucaucauccgggagccguucaucgccugcggccccacggagugcaagcacuucgcccugacccacuacgccgcccagcccggcggguacuacaacggcacccgcgaggaccggaacaaccugcgccaccucaucagcgugaagcuggggaagauccccaccguggagaacuccaucuuccacauggccgccuggagcggcuccgccugccacgacgggaaggaguggacguacaucggcgucgacggcccggacagcaacgcgcugcucaagaucaaguacggggaggccuacaccgacaccuaccacuccuacgccaagaacauccugcggacccaggagagcgccugcaacugcaucggcggggacugcuaccugaugaucacggacggccccgccagcggcaucuccgagugccgcuuccucaagauccgggaggggcgcaucaucaaggagaucuuccccaccggccgggugaagcacaccgaggagugcacgugcggguucgcgagcaacaagaccaucgagugcgccugccgcgacaacuccuacaccgccaagcggcccuucgugaagcugaacgucgagaccgacaccgccgagauccgccugaugugcacggagaccuaccucgacaccccgcggcccaacgacggcagcaucaccgggcccugcgaguccgacggcgacaagggcagcgggggcaucaagggcggguucgugcaccagcgcauggccuccaagaucgggcggugguacagccgcacgauguccaagaccaagcggaugggcaugggccuguacgugaaguacgacggggaccccuggaccgacagcgaggcgcuggcccucuccggcgucauggugagcauggaggagccggggugguacuccuucggcuucgagaucaaggacaagaagugcgacgugcccugcaucgggaucgagaugguccacgacggcggcaagaccacguggcacagcgccgccaccgccaucuacugccugaugggguccggccagcugcucugggacaccgugaccgggguggacauggcgcuguga

SEQ ID NO: 93076 - RNA, 1401 nt, Artificial Sequence
  derived and/or modified CDS sequence (opt1) from neuraminidase__InfluenzaB__AFJ90432
augcugcccagcaccauccagacccucacgcuguuccugaccuccggcggggugcuccugagccuguacgucuccaccagccucuccuaccugcuguacagcgacauccuccugaaguucucccagaccgagaucacggccccgaucaugccccuggacugcgccaacgcgagcaacgugcaggccgugaaccgcuccgccgccaagggcgucacccuccugcugcccgagcccgaguggaccuacccgcggcucagcugccccggguccaccuuccagaaggcccugcugaucagcccccaccgcuucggcgagacgaaggggaacuccgcgccccucaucauccgggagccguucaucgccugcggccccaccgagugcaagcacuucgcccugacccacuacgccgcgcagcccggcggguacuacaacggcacccgcgaggaccggaacaagcugcgccaccucaucagcgugaagcuggggaagauccccacgguggagaacuccaucuuccacauggccgccuggagcggcuccgccugccacgacgggaaggaguggaccuacaucggcgucgacggcccggacagcaacgcccugcucaagaucaaguacggggaggcguacaccgacaccuaccacuccuacgccaagaacauccugcggacgcaggagagcgccugcaacugcaucggcggggacugcuaccugaugaucaccgacggccccgccagcggcaucuccgagugccgcuuccucaagauccgggaggggcgcaucaucaaggagaucuuccccaccggccgggugaagcacaccgaggagugcacgugcggguucgccagcaacaagaccaucgagugcgcgugccgcgacaacuccuacaccgccaagcggcccuucgugaagcugaacgucgagaccgacacggccgagauccgccugaugugcaccgagaccuaccucgacaccccgcggcccaacgacggcagcaucacggggcccugcgaguccgacggcgacaagggcagcgggggcaucaagggcggguucgugcaccagcgcauggccuccaagaucgggcggugguacagccgcaccauguccaagaccaagcggaugggcaugggccuguacgugaaguacgacggggaccccuggaccgacagcgaggcccuggcgcucuccggcgucauggugagcauggaggagccggggugguacuccuucggcuucgagaucaaggacaagaagugcgacgugcccugcaucgggaucgagaugguccacgacggcggcaagacgaccuggcacagcgccgccaccgccaucuacugccugaugggguccggccagcugcucugggacaccgugacggggguggacauggcccuguga

SEQ ID NO: 93077 - RNA, 1401 nt, Artificial Sequence; identical to SEQ ID NO: 92996
  derived and/or modified CDS sequence (opt1) from neuraminidase__InfluenzaB__AFJ90443

SEQ ID NO: 93078 - RNA, 1401 nt, Artificial Sequence
  derived and/or modified CDS sequence (opt1) from neuraminidase__InfluenzaB__AFJ90454
augcugcccagcaccauccagacccucacgcuguuccugaccuccggcggggugcuccugagccuguacgucuccgccagccucuccuaccugcuguacagcgacauccuccugaaguucucccagaccgagaucaccgccccgaucgugccccuggacugcgcgaacgccagcaacgugcaggccgucaaccgcuccgccgccaagggcgugacgcuccugcugcccgagcccgaguggaccuacccgcggcucagcugccccggguccaccuuccagaaggcgcugcugaucagcccccaccgcuucggcgagaccaaggggaacuccgcgccccucaucauccgggagccguucaucgccugcggccccacggagugcaagcacuucgcccugacccacuacgccgcccagcccggcgaguacuacaacgggacccgcgaggaccggaacaagcugcgccaccucaucagcgugaagcugggcaagauccccaccgucgagaacuccaucuuccacauggccgccuggagcggguccgccugccacgacggcaaggaguggacguacaucgggguggacggcccggacagcaacgcgcugcucaagaucaaguacggcgaggccuacaccgacaccuaccacuccuacgccaagaacauccugcggacccaggagagcgccugcaacugcaucgggggcgacugcuaccugaugaucacggacgggcccgccagcggcaucuccgagugccgcuuccucaagauccgggagggccgcaucaucaaggagaucuuccccaccgggcgggugaagcacaccgaggagugcacgugcggcuucgcgagcaacaagaccaucgagugcgccugccgcgacaacuccuacaccgccaagcggcccuucgucaagcugaacguggagaccgacaccgccgagauccgccugaugugcacggagaccuaccucgacaccccgcggcccaacgacgggagcaucaccggccccugcgaguccgacggggacaagggcagcggcgggaucaagggcggguucgugcaccagcgcauggccuccaagaucggccggugguacagccgcacgauguccaagaccaagcggauggggaugggccuguacgucaaguacgacggcgaccccuggaccgacagcgaggcgcuggcccucuccggggugauggugagcauggaggagccgggcugguacuccuucggguucgagaucaaggacaagaagugcgacguccccugcaucggcaucgagauggugcacgacgggggcaagaccacguggcacagcgccgccaccgccaucuacugccugaugggcuccgggcagcugcucugggacaccgugaccggcgucgacauggcgcuguga

SEQ ID NO: 93079 - RNA, 1401 nt, Artificial Sequence
  derived and/or modified CDS sequence (opt1) from neuraminidase__InfluenzaB__AFJ91042
augcugcccagcaccauccagacccucacgcuguuccugaccuccggcggggugcuccugagccuguacgucuccgccagccucuccuaccugcuguacagcgacauccuccugaaguucucccagaccgagaucaccgccccgaucaugccccuggacugcgcgaacgccagcaacgugcaggccgugaaccgcuccgccgccaagggcgucacgcuccugauccccgagcccgaguggaccuacccgcggcugagcugccccggguccaccuuccagaaggcgcuccugaucagcccccaccgcuucggcgagaccaaggggaacuccgcgccccugaucauccgggagccguucaucgccugcggccccacggagugcaagcacuucgcccucacccacuacgccgcccagcccggcggguacuacaacggcacccgcgaggaccggaacaagcugcgccaccugaucagcgugaagcucgggaagauccccaccguggagaacuccaucuuccacauggccgccuggagcggcuccgccugccacgacgggaaggaguggacguacaucggcgucgacggcccggacagcaacgcgcugcugaagaucaaguacggggaggccuacaccgacaccuaccacuccuacgccaagaacauccuccggacccaggagagcgccugcaacugcaucggcggggacugcuaccugaugaucacggacggccccgccagcggcaucuccgagugccgcuuccugaagauccgggaggggcgcaucaucaaggagaucuuccccaccggccgggugaagcacaccgaggagugcacgugcggguucgcgagcaacaagaccaucgagugcgccugccgcgacaacuccuacaccgccaagcggcccuucgugaagcucaacgucgagaccgacaccgccgagauccgccugaugugcacggagaccuaccuggacaccccgcggcccaacgacggcagcaucgccgggcccugcgaguccgacggcgacaagggcagcgggggcaucaagggcggguucgugcaccagcgcaugaccuccaagaucgggcggugguacagccgcacgauguccaagaccaagcggaugggcaugggccucuacgugaaguacgacggggaccccuggaccgacagcgaggcgcuggcccuguccggcgucauggugagcauggaggagccggggugguacuccuucggcuucgagaucaaggacaagaagugcgacgugcccugcaucgggaucgagaugguccacgacggcggcaagaccacguggcacagcgccgccaccgccaucuacugccucaugggguccggccagcugcugugggacaccgugaccgggguggacauggcgcucuga

SEQ ID NO: 93080 - RNA, 1401 nt, Artificial Sequence
  derived and/or modified CDS sequence (opt1) from neuraminidase__InfluenzaB__AFJ91053
augcugcccagcaccauccagacccucacgcuguuccugaccuccggcggggugcuccugagccuguacgucuccgccagccucuccuaccugcuguacagcgacauccuccugaaguucucccagaccgagaucaccgccccgaucaugccccuggacugcgcgaacgccagcaacgugcaggccgugaaccgcuccgccgccaaggaggucacgcuccugcugcccgagcccgaguggaccuacccgcggcucagcugccccggcuccaccuuccagaaggcgcugcugaucagcccccaccgcuucggggagaccaagggcaacuccgcgccccucaucauccgggagccguucaucgccugcgggcccacggagugcaagcacuucgcccugacccacuacgccgcccagcccggcggcuacuacaacgggacccgcgaggaccggaacaagcugcgccaccucaucagcgugaagcugggcaagauccccaccguggagaacuccaucuuccacauggccgccuggagcggguccgccugccacgacggcaaggaguggacguacaucggggucgacggcccggacagcaacgcgcugcucaagaucaaguacggcgaggccuacaccgacaccuaccacuccuacgccaagaacauccugcggacccaggagagcgccugcaacugcaucgggggcgacugcuaccugaugaucacggacgggcccgccagcggcaucuccgagugccgcuuccucaagauccgggagggccgcaucaucaaggagaucuuccccaccgggcgggugaagcacaccgaggagugcacgugcggcuucgcgagcaacaagaccaucgagugcgccugccgcgacaacuccuacaccgccaagcggcccuucgugaagcugaacgucgagaccgacaccgccgagauccgccugaugugcacggagaccuaccucgacaccccgcggcccaacgacgggagcaucaccggccccugcgaguccgacggggacaagggcagcggcgggaucaagggcggguucgugcaccagcgcauggccuccaagaucggccggugguacagccgcacgauguccaagaccaagcggauggggaugggccuguacgugaaguacgacggcgaccccuggaccgacagcgaggcgcuggcccucuccggggucauggugagcauggaggagccgggcugguacuccuucggguucgagaucaaggacaagaagugcgacgugcccugcaucggcaucgagaugguccacgacgggggcaagaccacguggcacagcgccgccaccgccaucuacugccugaugggcuccgggcagcugcucugggacaccgugaccggcguggacauggcgcuguga

SEQ ID NO: 93081 - RNA, 1401 nt, Artificial Sequence
  derived and/or modified CDS sequence (opt1) from neuraminidase__InfluenzaB__AFJ91075
augcugcccagcaccauccagacccucacgcuguuccugaccuccggcggggugcuccugagccuguacgucuccgccagccucuccuaccugcuguacagcgacauccuccugaaguucucccagaccgagaucaccgccccgaucaugccccuggacugcgcgaacgccagcaacgugcaggccgugaaccgcuccgccgccaagggcgucacgcuccugcugcccgagcccgaguggaccuacccgcggcucagcugccccggguccaccuuccagaaggcgcugcugaucagcccccaccgcuucggcgagaccaaggggaacuccgcgccccucaucauccgggagccguucaucgccugcggccccacggagugcaagcacuucgcccugacccacuacgccgcccagcccggcggguacuacaacggcacccgcgaggaccggaacaagcugcgccaccucaucagcgugaagcuggggaagauccccaccguggagaacuccaucuuccacauggccgccuggagcggcuccgccugccacgacgggaaggaguggacguacaucggcgucgacggcccggacagcaacacccugcucaagaucaaguacggggaggcguacaccgacaccuaccacuccuacgccaagaacauccugcggacgcaggagagcgccugcaacugcaucggcggggacugcuaccugaugaucaccgacggccccgccagcggcaucuccgagugccgcuuccucaagauccgggaggggcgcaucaucaaggagaucuuccccaccggccgggugaagcacaccgaggagugcacgugcggguucgccagcaacaagaccaucgagugcgcgugccgcgacaacuccuacaccgccaagcggcccuucgugaagcugaacgucgagaccgacacggccgagauccgccugaugugcaccgagaccuaccucgacaccccgcggcccaacgacggcagcaucacggggcccugcgaguccgacggcgacaagggcagcgggggcaucaagggcggguucgugcaccagcgcauggccuccaagaucgggcggugguacagccgcaccauguccaagaccaagcggaugggcaugggccuguacgugaaguacgacggggaccccuggaccgacagcgaggcccuggcgcucuccggcgucauggugagcauggaggagccggggugguacuccuucggcuucgagaucaaggacaagaagugcgacgugcccugcaucgggaucgagaugguccacgacggcggcaagacgaccuggcacagcgccgccaccgccaucuacugccugaugggguccggccagcugcucugggacaccgugacggggguggacauggcccuguga

SEQ ID NO: 93082 - RNA, 1401 nt, Artificial Sequence; identical to SEQ ID NO: 92841
  derived and/or modified CDS sequence (opt1) from neuraminidase__InfluenzaB__AFJ91086

SEQ ID NO: 93083 - RNA, 1401 nt, Artificial Sequence; identical to SEQ ID NO: 92841
  derived and/or modified CDS sequence (opt1) from neuraminidase__InfluenzaB__AFJ91097

SEQ ID NO: 93084 - RNA, 1401 nt, Artificial Sequence; identical to SEQ ID NO: 92841
  derived and/or modified CDS sequence (opt1) from neuraminidase__InfluenzaB__AFJ91108

SEQ ID NO: 93085 - RNA, 1401 nt, Artificial Sequence; identical to SEQ ID NO: 92841
  derived and/or modified CDS sequence (opt1) from neuraminidase__InfluenzaB__AFJ91119

SEQ ID NO: 93086 - RNA, 1401 nt, Artificial Sequence; identical to SEQ ID NO: 92692
  derived and/or modified CDS sequence (opt1) from neuraminidase__InfluenzaB__AFJ91707

SEQ ID NO: 93087 - RNA, 1401 nt, Artificial Sequence
  derived and/or modified CDS sequence (opt1) from neuraminidase__InfluenzaB__AFK09801
augcugcccagcaccauccagacccucacgcuguuccugaccuccggcggggugcuccugagccuguacgucuccgccagccucuccuaccugcuguacagcgacauccuccugaaguucucccagaccgagaucaccgccccgacgaugccccuggacugcgcgaacgccagcaacgugcaggccgugaaccgcuccgccaccaagggcgucacccuccugcugcccgagcccgaguggaccuacccgcggcucagcugccccggguccacguuccagaaggcccugcugaucagcccccaccgcuucggcgagaccaaggggaacuccgcgccccucaucauccgggagccguucaucgccugcggccccaaggagugcaagcacuucgcccugacccacuacgccgcgcagcccggcggguacuacaacggcacccgcgaggaccggaacaagcugcgccaccucaucagcgugaagcuggggaagauccccacgguggagaacuccaucuuccacauggccgccuggagcggcuccgccugccacgacgggcgggaguggaccuacaucggcgucgacggcccggacagcaacgcccugcucaagaucaaguacggggaggcguacaccgacaccuaccacuccuacgccaagaacauccugcgcacgcaggagagcgccugcaacugcaucggcggggacugcuaccugaugaucaccgacggcagcgccuccggcaucagcgagugccgguuccucaagauccgcgaggggcggaucaucaaggagaucuuccccaccggccgcgugaagcacaccgaggagugcacgugcggguucgccuccaacaagaccaucgagugcgcgugccgggacaacagcuacaccgccaagcgccccuucgugaagcugaacgucgagaccgacacggccgagauccggcugaugugcaccgagaccuaccucgacacgccccgcccgaacgacggcuccaucaccgggcccugcgagagcaacggcgaccggggcuccgggggcaucaagggcggguucgugcaccagcgcauggccagcaagaucgggcggugguacucccgcaccaugagcaagaccaagcggaugggcaugggccuguacgugaaguacgacggggaccccuggaccgacuccgaggcccuggcgcucagcggcgucauggugcccauggaggagccggggugguacuccuucggcuucgagaucaaggacaagaagugcgacgugcccugcaucgggaucgagaugguccacgacggcggcaagacgaccuggcacagcgccgccaccgccaucuacugccugaugggguccggccagcugcucugggacaccgugacggggguggacauggcccuguga

SEQ ID NO: 93088 - RNA, 1401 nt, Artificial Sequence; identical to SEQ ID NO: 92816
  derived and/or modified CDS sequence (opt1) from neuraminidase__InfluenzaB__AFN54669

SEQ ID NO: 93089 - RNA, 1401 nt, Artificial Sequence; identical to SEQ ID NO: 92816
  derived and/or modified CDS sequence (opt1) from neuraminidase__InfluenzaB__AFN54680

SEQ ID NO: 93090 - RNA, 1401 nt, Artificial Sequence; identical to SEQ ID NO: 92841
  derived and/or modified CDS sequence (opt1) from neuraminidase__InfluenzaB__AFN54691

SEQ ID NO: 93091 - RNA, 1401 nt, Artificial Sequence; identical to SEQ ID NO: 92841
  derived and/or modified CDS sequence (opt1) from neuraminidase__InfluenzaB__AFN54702

SEQ ID NO: 93092 - RNA, 1401 nt, Artificial Sequence; identical to SEQ ID NO: 92841
  derived and/or modified CDS sequence (opt1) from neuraminidase__InfluenzaB__AFN54713

SEQ ID NO: 93093 - RNA, 1401 nt, Artificial Sequence; identical to SEQ ID NO: 92841
  derived and/or modified CDS sequence (opt1) from neuraminidase__InfluenzaB__AFN54724

SEQ ID NO: 93094 - RNA, 1401 nt, Artificial Sequence; identical to SEQ ID NO: 92841
  derived and/or modified CDS sequence (opt1) from neuraminidase__InfluenzaB__AFN54735

SEQ ID NO: 93095 - RNA, 1401 nt, Artificial Sequence; identical to SEQ ID NO: 92841
  derived and/or modified CDS sequence (opt1) from neuraminidase__InfluenzaB__AFN54746

SEQ ID NO: 93096 - RNA, 1401 nt, Artificial Sequence; identical to SEQ ID NO: 92841
  derived and/or modified CDS sequence (opt1) from neuraminidase__InfluenzaB__AFN54757

SEQ ID NO: 93097 - RNA, 1401 nt, Artificial Sequence; identical to SEQ ID NO: 92841
  derived and/or modified CDS sequence (opt1) from neuraminidase__InfluenzaB__AFN54768

SEQ ID NO: 93098 - RNA, 1401 nt, Artificial Sequence; identical to SEQ ID NO: 92841
  derived and/or modified CDS sequence (opt1) from neuraminidase__InfluenzaB__AFN54779

SEQ ID NO: 93099 - RNA, 1401 nt, Artificial Sequence; identical to SEQ ID NO: 92841
  derived and/or modified CDS sequence (opt1) from neuraminidase__InfluenzaB__AFN54790

SEQ ID NO: 93100 - RNA, 1401 nt, Artificial Sequence; identical to SEQ ID NO: 92841
  derived and/or modified CDS sequence (opt1) from neuraminidase__InfluenzaB__AFN54801

SEQ ID NO: 93101 - RNA, 1401 nt, Artificial Sequence; identical to SEQ ID NO: 92841
  derived and/or modified CDS sequence (opt1) from neuraminidase__InfluenzaB__AFN54812

SEQ ID NO: 93102 - RNA, 1401 nt, Artificial Sequence
  derived and/or modified CDS sequence (opt1) from neuraminidase__InfluenzaB__AFN54834
augcugcccagcaccauccagacccucacgcuguuccugaccuccggcggggugcuccugagccuguacgucuccgccagccucuccuaccugcuguacagcgacauccuccugaaguucucccgcaccgagaucaccgccccgaucaugccccuggacugcgcgaacgccagcaacgugcaggccgugaaccgguccgccacgaagggcgucacccuccugcugcccgagcccgaguggaccuacccgcgccucagcugccccggguccaccuuccagaaggcccugcugaucagcccccaccgguucggcgagacgaaggggaacuccgcgccccucaucauccgcgagccguucaucgccugcggccccaaggagugcaagcacuucgcccugacccacuacgccgcgcagcccggcggguacuacaacggcacccgggaggaccgcaacaagcugcggcaccucaucagcgugaagcuggggaagauccccaccguggagaacuccaucuuccacauggccgccuggagcggcuccgccugccacgacgggcgcgaguggaucuacaucggcgucgacggcccggacagcaacgcccugcucaagaucaaguacggggaggcguacacggacaccuaccacuccuacgccaagaacauccugcggacccaggagagcgccugcaacugcaucggcggggacugcuaccugaugaucaccgacggccccgccagcggcaucuccgagugccgcuuccucaagauccgggaggggcgcaucaucaaggagaucuuccccacgggccgggugaagcacaccgaggagugcacgugcggguucgccagcaacaagaccaucgagugcgcgugccgcgacaacuccuacaccgccaagcggcccuucgugaagcugaacgucgagaccgacaccgccgagauccgccugaugugcaccgagacguaccucgacaccccgcggcccaacgacggcagcaucaccgggcccugcgaguccaacggcgacaagggcagcgggggcaucaagggcggguucgugcaccagcgcauggccuccaagaucgggcggugguacagccgcaccauguccaagacgaagcggaugggcaugggccuguacgugaaguacgacggggaccccuggaccgacagcgaggcccuggcgcucuccggcgucauggugagcauggaggagccggggugguacuccuucggcuucgagaucaaggacaagaagugcgacgugcccugcaucgggaucgagaugguccacgacggcggcaagaccaccuggcacagcgccgccacggccaucuacugccugaugggguccggccagcugcucugggacaccgugaccggggugaacaugacccuguga

SEQ ID NO: 93103 - RNA, 1401 nt, Artificial Sequence; identical to SEQ ID NO: 92841
  derived and/or modified CDS sequence (opt1) from neuraminidase__InfluenzaB__AFN54845

SEQ ID NO: 93104 - RNA, 1401 nt, Artificial Sequence
  derived and/or modified CDS sequence (opt1) from neuraminidase__InfluenzaB__AFN54856
augcugcccagcaccauccagacccucacgcuguuccugaccuccggcggggugcuccugagccuguacgucuccgccagccucuccuaccugcuguacagcgacauccuccugaaguucucccgcaccgagaucaccgccccgaucaugccccuggacugcgcgaacgccagcaacgugcaggccgugaaccgguccgccacgaagggcgucacccuccugcugcccgagcccgaguggaccuacccgcgccucagcugccccggguccaccuuccagaaggcccugcugaucagcccccaccgguucggcgagacgaaggggaacuccgcgccccucaucauccgcgagccguucaucgccugcggccccaaggagugcaagcacuucgcccugacccacuacgccgcgcagcccggcggguacuacaacggcacccgggaggaccgcaacaagcugcggcaccucaucagcgugaagcuggggaagauccccaccguggagaacuccaucuuccacauggccgccuggagcggcuccgccugccacgacgggcgcgaguggacguacaucggcgucgacggcccggacagcaacgcccugcucaagaucaaguacggggaggcguacaccgacaccuaccacuccuacgccaagaacauccugcggacccaggagagcgccugcaacugcaucggcggggacugcuaccugaugaucacggacggccccgccagcggcguguccgagugccgcuuccucaagauccgggaggggcgcaucaucaaggagaucuuccccaccggccgggugaagcacaccgaggagugcacgugcggguucgccagcaacaagaccaucgagugcgcgugccgcgacaacuccuacaccgccaagcggcccuucgucaagcugaacguggagaccgacaccgccgagauccgccugaugugcacggagaccuaccucgacaccccgcggcccaacgacggcagcaucaccgggcccugcgaguccaacggcgacaagggcagcgggggcaucaagggcggguucgugcaccagcgcauggccuccaagaucgggcggugguacagccgcacgauguccaagaccaagcggaugggcaugggccuguacgucaaguacgacggggaccccuggaccgacagcgaggcccuggcgcucuccggcgugauggugagcauggaggagccggggugguacuccuucggcuucgagaucaaggacaagaagugcgacguccccugcaucgggaucgagauggugcacgacggcggcaagaccacguggcacagcgccgccaccgccaucuacugccugaugggguccggccagcugcucugggacaccgccaccggggugaacaugacgcuguga

SEQ ID NO: 93105 - RNA, 1401 nt, Artificial Sequence; identical to SEQ ID NO: 92841
  derived and/or modified CDS sequence (opt1) from neuraminidase__InfluenzaB__AFN54867

SEQ ID NO: 93106 - RNA, 1401 nt, Artificial Sequence
  derived and/or modified CDS sequence (opt1) from neuraminidase__InfluenzaB__AFU34598
augcugcccagcaccauccagacccucacgcuguuccugaccuccggcggggugcuccugagccuguacgucuccgccagccucuccuaccugcuguacagcgacauccuccugaaguucuccccgaccgagaucaccgcccccacgaugagccuggacugcgcgaacgccuccaacgugcaggccgugaaccgcagcgccaccaagggcgucaccuuccuccugcccgagcccgaguggaccuacccgcggcuguccugccccgggagcacguuccagaaggcccuccugaucagcccccaccgcuucggcgagaccaaggggaacuccgcgccccugaucauccgggagccguucaucgccugcggccccaacgagugcaagcacuucgcccucacccacuacgccgcgcagcccggcggguacuacaacggcacccgcggggaccggaacaagcugcgccaccugaucuccgugaagcucggcaagauccccacgguggagaacagcaucuuccacauggccgccugguccgggagcgccugccacgacggcaaggaguggaccuacaucggcgucgacgggccggacaacaacgcccugcugaaggugaaguacggcgaggcguacaccgacaccuaccacuccuacgccaacaagauccuccggacgcgcgagagcgccugcaacugcaucgggggcaacugcuaccugaugaucaccgacggcagcgccuccggggugagcgagugccgguuccugaagauccgcgucggccggaucaucaaggagaucuuccccaccgggcgcgugaagcacaccgaggagugcacgugcggcuucgccuccaacaagaccaucgagugcgcgugccgggacaacagcuacaccgccaagcgccccuucgugaagcucaacgucgagaccgacacggccgagauccggcugaugugcaccgacaccuaccuggacacgccccgcccggacgacggguccaucaccggccccugcgagagcaacggcgacaagggguccggcgggaucaagggcggguucgugcaccagcggauggagagcaagaucggccgcugguacucccggaccaugagcaagaccgagcgcaugggcauggggcucuacgugaaguacgacggcgaccccugggccgacuccgacgcccuggcguucagcggggucaugguguccaugaaggagcccggcugguacagcuucggguucgagaucaaggacaagaagugcgacgugccgugcaucggcaucgagaugguccacgacggcgggaaggagaccuggcacuccgccgccacggccaucuacugccugaugggcagcgggcagcuccugugggacaccgugaccggcguggacgucgcccuguga

SEQ ID NO: 93107 - RNA, 1401 nt, Artificial Sequence
  derived and/or modified CDS sequence (opt1) from neuraminidase__InfluenzaB__AFU34609
augcugcccagcaccauccagacccucacgcuguuccugaccuccggcggggugcuccugagccuguacgucuccgcccuccugagcuaccugcucuacuccgacauccugcugaaguucagcccgaccgagaucaccgcccccacgaugucccucgacugcgcgaacgccagcaacgugcaggccgugaaccgcuccgccacccggggcgucaccuuccugcugcccgagcccgagugggccuacccgcgccucagcugccccggguccaccuuccagaaggcgcugcugaucagcccccaccgguucggcgagacgaaggggaacuccgcgccccucaucauccgcgagccguucaucgccugcggccccaacgagugcaagcacuucgcccugacccacuacgccgcccagcccggcggguacuacaacggcacccgcggggaccggaacaagcugcggcaccucaucagcgugaagcugggcaagauccccaccguggagaacuccaucuuccacauggccgccuggagcggguccgccugccacgacggcaaggaguggacguacaucggcgucgacgggccggacaacgacgcgcugcucaaggugaaguacggcgaggccuacaccgacaccuaccacagcuacgccaacaagauccugcgcacccaggaguccgccugcaacugcaucgggggcaacugcuaccugaugaucacggacggcagcgccagcgggguguccgagugccgguuccucaagauccgcgagggccggaucaucaaggagaucuuccccaccgggcgcgucaagcacaccgaggagugcacgugcggcuucgcgagcaacaagaccaucgagugcgccugccgggacaacuccuacaccgccaagcgccccuucgugaagcugaacguggagaccgacaccgccgagauccggcugaugugcacggacaccuaccucgacacgccccgcccggacgacgggagcaucaccggccccugcgaguccaacggcgacaaggggagcggcgggaucaagggcggguucguccaccagcggauggaguccaagaucggccgcugguacagccggaccauguccaagaccgagcgcaugggcauggggcuguacgugaaguacgacggcgaccccugggccgacagcgacgcgcuggccuucuccggggugauggucagcaugaaggagcccggcugguacuccuucggguucgagaucaaggacaagaagugcgacgugccgugcaucggcaucgagauggugcacgacggcgggaaggagaccuggcacagcgccgccaccgccaucuacugccucaugggcuccgggcagcugcugugggacacggucaccggcguggacauggcgcucuga

SEQ ID NO: 93108 - RNA, 1401 nt, Artificial Sequence
  derived and/or modified CDS sequence (opt1) from neuraminidase__InfluenzaB__AFU34620
augcugcccagcaccauccagacccucacgcuguuccugaccuccggcggggugcuccugagccuguacgucuccgcccuccugagcuaccugcucuacuccgacauccugcugaaguucagcccgaccgagaucaccgcccccacgaugucccucgacugcgcgaacgccagcaacgugcaggccgugaaccgcuccgccacccggggcgucaccuuccugcugcccgagcccgaguggaccuacccgcgccucagcugccccggguccacguuccagaaggcccugcugaucagcccccaccgguucggcgagaccaaggggaacuccgcgccccucaucauccgcgagccguucaucgccugcggccccaacgagugcaagcacuucgcccugacccacuacgccgcgcagcccggcggguacuacaacggcacccgcggggaccggaacaagcugcggcaccucaucagcgugaagcugggcaagauccccacgguggagaacuccaucuuccacauggccgccuggagcggguccgccugccacgacggcaaggaguggaccuacaucggcgucgacgggccggacaacgacgcccugcucaaggugaaguacggcgaggcguacaccgacaccuaccacagcuacgccaacaagauccugcgcacgcaggaguccgccugcaacugcaucgggggcaacugcuaccugaugaucaccgacggcagcgccagcgggguguccgagugccgguuccucaagauccgcgagggccggaucaucaaggagaucuuccccaccgggcgcgucaagcacaccgaggagugcacgugcggcuucgccagcaacaagaccaucgagugcgcgugccgggacaacuccuacaccgccaagcgccccuucgugaagcugaacguggagaccgacacggccgagauccggcugaugugcaccgacaccuaccucgacacgccccgcccggacgacgggagcaucaccggccccugcgaguccaacggcgacaaggggagcggcgggaucaagggcggguucguccaccagcggauggaguccaagaucggccgcugguacagccggaccauguccaagaccgagcgcaugggcauggggcuguacgugaaguacgacggcgaccccugggccgacagcgacgcccuggcguucuccggggugauggucagcaugaaggagcccggcugguacuccuucggguucgagaucaaggacaagaagugcgacgugccgugcaucggcaucgagauggugcacgacggcgggaaggagaccuggcacagcgccgccacggccaucuacugccucaugggcuccgggcagcugcugugggacaccgucaccggcguggacauggcccucuga

SEQ ID NO: 93109 - RNA, 1401 nt, Artificial Sequence
  derived and/or modified CDS sequence (opt1) from neuraminidase__InfluenzaB__AFU34631
augcugcccagcaccauccagacccucacgcuguuccugaccuccggcggggugcuccugagccuguacgucuccgcccuccugagcuaccugcucuacuccgacauccugcugaaguucagcccgaccgagaucaccgcccccacgaugucccucgacugcgcgaacgccagcaacgugcaggccgugaaccgcuccgccacccggggcgucaccuuccugcugcccgagcccgaguggaccuacccgcgccucagcugccccggguccacguuccagaaggcccugcugaucagcccccaccgguucggcgagaccaaggggaacuccgcgccccucaucauccgcgagccguucaucgccugcggccccaacgagugcaagcacuucgcccugacccacuacgccgcgcagcccggcggguacuacaacggcacccgcggggaccggaacaagcugcggcaccucaucagcgugaagcugggcaagauccccacgguggagaacuccaucuuccacauggccgccuggagcggguccgccugccacgacggcaaggaguggaccuacaucggcgucgacgggccggacaacgacgcccugcucaaggugaaguacggcgaggcguacaccgacaccuaccacagcuacgccaacaagauccugcgcacgcaggaguccgccugcaacugcauccgggggaacugcuaccugaugaucaccgacggcagcgccagcggcguguccgagugccgcuuccucaagauccgggaggggcgcaucaucaaggagaucuuccccaccggccgggucaagcacaccgaggagugcacgugcggguucgccagcaacaagaccaucgagugcgcgugccgcgacaacuccuacaccgccaagcggcccuucgugaagcugaacguggagaccgacacggccgagauccgccugaugugcaccgacaccuaccucgacacgccccggccggacgacggcagcaucaccgggcccugcgaguccaacggcgacaagggcagcgggggcaucaagggcggguucguccaccagcgcauggaguccaagaucgggcggugguacagccgcaccauguccaagaccgagcggaugggcaugggccuguacgugaaguacgacggggaccccugggccgacagcgacgcccuggcguucuccggcgugauggucagcaugaaggagcccgggugguacuccuucggcuucgagaucaaggacaagaagugcgacgugccgugcaucgggaucgagauggugcacgacggcggcaaggagaccuggcacagcgccgccacggccaucuacugccucaugggguccggccagcugcugugggacaccgucaccgggguggacauggcccucuga

SEQ ID NO: 93110 - RNA, 1401 nt, Artificial Sequence
  derived and/or modified CDS sequence (opt1) from neuraminidase__InfluenzaB__AFU34642
augcugcccagcaccauccagacccucacgcuguuccugaccuccggcggggugcuccugagccuguacgucuccgccagccucuccuaccugcuguacagcgacauccuccugaaguucuccccgaccgagaucaccgcccccacgaugagccuggacugcgcgaacgccuccaacgugcaggccgugaaccgcagcgccaccaagggcaugaccuuccuccugcccgagcccgaguggaccuacccgcggcuguccugccccgggagcacguuccagaaggcccuccugaucagcccccaccgcuucggcgagaccaaggggaacuccgcgccccugaucauccgggagccguucaucgccugcggccccaacggcugcaagcacuucgcccucacccacuacgccgcgcagcccgggggcuacuacaacgggacccgcggcgaccggaacaagcugcgccaccugaucuccgucaagcucgggaagauccccacgguggagaacagcaucuuccacauggccgccugguccggcagcgccugccacgacggcaaggaguggaccuacaucgggguggacggcccggacaacaacgcccugcugaaggucaaguacggggaggcguacaccgacaccuaccacuccuacgccaacaagauccuccggacgcaggagagcgccugcaacugcaucggcggcaacugcuaccugaugaucaccgacgggagcgccuccggcgugagcgagugccgcuuccugaagauccgggaggggcgcaucaucaaggagaucuuccccaccggccgggugaagcacaccgaggagugcacgugcggguucgccuccaacaagaccaucgagugcgcgugccgcgacaacagcuacaccgccaagcggcccuucgucaagcucaacguggagaccgacacggccgagauccgccugaugugcaccgacaccuaccuggacacgccccggccggacgacggcuccaucaccggccccugcgagagcuacggggacaagggcuccgggggcaucaagggcggguucgugcaccagcgcauggagagcaagaucggccggugguacucccgcaccaugagcaagaccgagcggauggggaugggccucuacgucaaguacgacggggaccccugggccgacuccgacgcccuggcguucagcggcgugaugguguccaugaaggagcccgggugguacagcuucggcuucgagaucaaggacaagaagugcgacgucccgugcaucggcaucgagauggugcacgacgggggcaaggagaccuggcacuccgccgccacggccaucuacugccugauggggagcggccagcuccugugggacaccgugaccggcgucgacauggcccuguga

SEQ ID NO: 93111 - RNA, 1401 nt, Artificial Sequence
  derived and/or modified CDS sequence (opt1) from neuraminidase__InfluenzaB__AGB97261
augcugcccagcaccauccagacccucacgcuguuccugaccuccggcggggugcuccugagccuguacgucuccgccagccucuccuaccugcuguacagcgacaugcuccugaaguucucccgcaccgagaucaccgccccgaucaugccccuggacugcgcgaacgccagcaacgugcaggccgugaaccgguccgccacgaagggcgucacccuccugcugcccgagcccgaguggaccuacccgcgccucagcugccccggguccaccuuccagaaggcccugcugaucagcccccaccgguucggcgagacgaaggggaacuccgcgccccucaucauccgcgagccguucaucgccugcggccccaaggagugcaagcacuucgcccugacccacuacgccgcgcagcccggcggguacuacaacggcacccgggaggaccgcaacaagcugcggcaccucaucagcgugaagcuggggaagauccccaccguggagaacuccaucuuccacauggccgccuggagcggcuccgccugccacgacgggcgcgaguggacguacaucggcgucgacggcccggacagcaacgcccugcucaagaucaaguacggggaggcguacaccgacaccuaccacuccuacgccaagaacauccugcggacccaggagagcgccugcaacugcaucggcggggacugcuaccugaugaucacggacggccccgccagcggcaucuccgagugccgcuuccucaagauccgggaggggcgcaucaucaaggagaucuuccccaccggccgggugaagcacaccgaggagugcacgugcggguucgccagcaacaagaccaucgagugcgcgugccgcgacaacuccuacaccgccaagcggcccuucgugaagcugaacgucgagaccgacaccgccgagauccgccugaugugcacggagaccuaccucgacaccccgcggcccaacgacggcagcaucaccgggcccugcgaguccaacggcgacaagggcagcgggggcaucaagggcggguucgugcaccagcgcauggccuccaagaucgggcggugguacagccgcacgauguccaagaccaagcggaugggcaugggccuguacgugaaguacgacggggaccccuggaccgacagcgaggcccuggcgcucuccggcgucauggugagcauggaggagccggggugguacuccuucggcuucgagaucaaggacaagaagugcgacgugcccugcaucgggaucgagaugguccacgacggcggcaagaccacguggcacagcgccgccaccgccaucuacugccugaugggguccggccagcugcucugggacaccgugaccggggugaacaugacgcuguga

SEQ ID NO: 93112 - RNA, 1401 nt, Artificial Sequence
  derived and/or modified CDS sequence (opt1) from neuraminidase__InfluenzaB__AGB97267
augcugcccagcaccauccagacccucacgcuguuccugaccuccggcggggugcuccugagccuguacgucuccgccagccucuccuaccugcuguacagcgacauccuccugaaguucucccagaccgagaucaccgccccgaucaugccccuggacugcacgaacgcgagcaacgugcaggccgugaaccgcuccgccgccaagggcgucacccuccugcugcccgagcccgaguggaccuacccgcggcucagcugccccggguccaccuuccagaaggcccugcugaucagcccccaccgcuucggcgagaucaaggggaacuccgcgccccucaucauccgggagccguucaucgccugcggccccacggagugcaagcacuucgcccugacccacuacgccgcgcagcccggcggguacuacaacggcacccgcgaggaccggaacaagcugcgccaccucaucagcgugaagcuggggaagauccccaccguggagaacuccaucuuccacauggccgccuggagcggcuccgccugccacgacgggaaggaguggacguacaucggcaucgacggcccggacagcaacgcccugcucaagaucaaguacggggaggcguacaccgacaccuaccacuccuacgccaagaacauccugcggacccaggagagcgccugcaacugcaucggcggggacugcuaccugaugaucacggacggccccgccagcggcgucuccgagugccgcuuccucaagauccgggaggggcgcaucaucaaggagaucuuccccaccggccgggugaagcacaccgaggagugcacgugcggguucgccagcaacaagaccaucgagugcgcgugccgcgacaaccgguacaccgccaagcgccccuucgugaagcugaacgucgagaccgacaccgccgagauccggcugaugugcacggagaccuaccucgacaccccgcgccccaacgacggcuccaucaccgggcccugcgagagcgacggcgacaagggcuccgggggcaucaagggcggguucgugcaccagcggauggccagcaagaucgggcgcugguacucccggacgaugagcaagaccaagcgcaugggcaugggccuguacgugaaguacgacggggaccccuggaccgacuccgaggcccuggcgcucagcggcgucaugguguccauggaggagccggggugguacagcuucggcuucgagaucaaggacaagaagugcgacgugcccugcaucgggaucgagaugguccacgacggcggcaagaccacguggcacuccgccgccaccgccaucuacugccugauggggagcggccagcugcucugggacaccgugaccgggguggacauggcccuguga

SEQ ID NO: 93113 - RNA, 1401 nt, Artificial Sequence; identical to SEQ ID NO: 92841
  derived and/or modified CDS sequence (opt1) from neuraminidase__InfluenzaB__AGR54784

SEQ ID NO: 93114 - RNA, 1401 nt, Artificial Sequence; identical to SEQ ID NO: 92706
  derived and/or modified CDS sequence (opt1) from neuraminidase__InfluenzaB__AGX15491

SEQ ID NO: 93115 - RNA, 1401 nt, Artificial Sequence
  derived and/or modified CDS sequence (opt1) from neuraminidase__InfluenzaB__AGX15533
augcugcccagcaccauccagacccucacgcuguuccugaccuccggcggggugcuccugagccuguacgucuccgccagccucuccuaccugcuguacagcgacauccuccugaaguucuccccgaccgagaucaccgcccccacgaugccccuggacugcgcgaacgccagcaacgugcaggccgugaaccgcuccgccaccaagggcgucacccuccugcugcccgagccggaguggaccuacccccggcucagcugccccggguccacguuccagaaggcccugcugaucagcccccaccgcuucggcgagaccaaggggaacuccgcgccgcucaucauccgggagcccuucaucgccugcggccccaacgagugcaagcacuucgcccugacccacuacgccgcgcagcccggcggguacuacaacggcaagcgcggggaccggaacaagcugcgccaccucaucagcgugaagcugggcaagaucccgaccguggagaacuccaucuuccacauggccgccuggagcggguccgccugccacgacggcaaggaguggacguacaucggcgucgacgggcccgacaacaacgcccugcucaagaucaaguacggcgaggcguacaccgacaccuaccacagcuacgccaacaacauccugcggacccaggaguccgccugcaacugcaucgggggcaacugcuaccugaugaucacggacggcagcgccagcgggguguccgagugccgcuuccucaagauccgggagggccgcaucaucaaggagaucuuccccaccgggcgggugaagcacaccgaggagugcacgugcggcuucgccagcaacaagaccaucgagugcgcgugccgcgacaacuccuacaccgccaagcggcccuucgucaagcugaacguggagaccgacaccgccgagauccgccugaugugcacggacaccuaccucgacaccccgcggcccgacgacgggagcaucaccggccccugcgaguccaacggcgacaaggggagcggcgggaucaagggcggguucgugcaccagcgcauggccuccaaggucggccggugguacagccgcacgauguccaagaccgagcggaugggcauggggcuguacgugaaguacgacggcgaccccugggccgacagcgacgcgcuggccuucuccggggugauggucagcaugaaggagccgggcugguacuccuucggguucgagaucaaggacaagaagugcgacgugcccugcaucggcaucgagauggugcacgacggcgggaaggagaccuggcacagcgccgccaccgccaucuacugccucaugggcuccgggcagcugcugugggacacggucaccggcguggacauggcgcucuga

SEQ ID NO: 93116 - RNA, 1401 nt, Artificial Sequence; identical to SEQ ID NO: 92659
  derived and/or modified CDS sequence (opt1) from neuraminidase__InfluenzaB__AGX15545

SEQ ID NO: 93117 - RNA, 1401 nt, Artificial Sequence; identical to SEQ ID NO: 92659
  derived and/or modified CDS sequence (opt1) from neuraminidase__InfluenzaB__AGX15556

SEQ ID NO: 93118 - RNA, 1401 nt, Artificial Sequence
  derived and/or modified CDS sequence (opt1) from neuraminidase__InfluenzaB__AGX15567
augcugcccagcaccauccagacccucacgcuguuccugaccuccggcggggugcuccugagccuguacgucuccgccagccucuccuaccugcuguacagcgacauccuccugaaguucccguccaccgagaucaccgcccccacgaugccccuggacugcgcgaacgccagcaacgugcaggccgugaaccgcuccgccaccaagggcgucacccuccugcugcccgagccggaguggaccuacccccggcucagcugccccggguccacguuccagaaggcccugcugaucagcccccaccgcuucggcgagaccaaggggaacuccgcgccgcucaucauccgggagcccuucaucgccugcggccccaaggagugcaagcacuucgcccugacccacuacgccgcgcagcccggcggguacuacaacggcacccgcggggaccggaacaagcugcgccaccucaucagcgugaagcugggcaagaucccgacgguggagaacuccaucuuccacauggccgccuggagcggguccgccugccacgacggcaaggaguggaccuacaucggcgucgacgggcccgacaacaacgcccugcucaagaucaaguacggcgaggcguacaccgacaccuaccacagcuacgccaacaacauccugcggacgcaggaguccgccugcaacugcaucgggggcaacugcuaccugaugaucaccgacggcagcgccagcgggguguccgagugccgcuuccucaagauccgggagggccgcaucaucaaggagaucuuccccaccgggcggaucaagcacaccgaggagugcacgugcggcuucgccagcaacaagaccaucgagugcgcgugccgcgacaacuccuacaccgccaagcggcccuucgugaagcugaacgucgagaccgacacggccgagauccgccugaugugcaccgagaccuaccucgacaccccgcggcccgacgacgggagcaucacgggccccugcgaguccaacggcgacaaggggagcggcgggaucaagggcggguucgugcaccagcgcauggccuccaagaucggccggugguacagccgcaccauguccaagaccgagcggaugggcauggggcuguacgugaaguacgacggcgaccccugggccgacagcgacgcgcuggccuucuccggggucauggugagcauggaggagccgggcugguacuccuucggguucgagaucaaggacaagaagugcgacgugcccugcaucggcaucgagaugguccacgacggcgggaaggagaccuggcacagcgccgccacggccaucuacugccucaugggcuccgggcagcugcugugggacaccgugaccggcgugaacauggcgcucuga

SEQ ID NO: 93119 - RNA, 1401 nt, Artificial Sequence; identical to SEQ ID NO: 92659
  derived and/or modified CDS sequence (opt1) from neuraminidase__InfluenzaB__AGX15578

SEQ ID NO: 93120 - RNA, 1401 nt, Artificial Sequence; identical to SEQ ID NO: 92659
  derived and/or modified CDS sequence (opt1) from neuraminidase__InfluenzaB__AGX15589

SEQ ID NO: 93121 - RNA, 1401 nt, Artificial Sequence; identical to SEQ ID NO: 92865
  derived and/or modified CDS sequence (opt1) from neuraminidase__InfluenzaB__AGX15600

SEQ ID NO: 93122 - RNA, 1401 nt, Artificial Sequence; identical to SEQ ID NO: 92865
  derived and/or modified CDS sequence (opt1) from neuraminidase__InfluenzaB__AGX15611

SEQ ID NO: 93123 - RNA, 1401 nt, Artificial Sequence; identical to SEQ ID NO: 92985
  derived and/or modified CDS sequence (opt1) from neuraminidase__InfluenzaB__AGX15644

SEQ ID NO: 93124 - RNA, 1401 nt, Artificial Sequence; identical to SEQ ID NO: 92985
  derived and/or modified CDS sequence (opt1) from neuraminidase__InfluenzaB__AGX15655

SEQ ID NO: 93125 - RNA, 1401 nt, Artificial Sequence; identical to SEQ ID NO: 92985
  derived and/or modified CDS sequence (opt1) from neuraminidase__InfluenzaB__AGX15666

SEQ ID NO: 93126 - RNA, 1401 nt, Artificial Sequence; identical to SEQ ID NO: 92985
  derived and/or modified CDS sequence (opt1) from neuraminidase__InfluenzaB__AGX15679

SEQ ID NO: 93127 - RNA, 1401 nt, Artificial Sequence
  derived and/or modified CDS sequence (opt1) from neuraminidase__InfluenzaB__AGX15690
augcugcccagcaccauccagacccucacgcuguuccugaccuccggcggggugcuccugagccuguacgucuccgccagccucuccuaccugcuguacagcgacauccuccugaaguucuccccgaccgagaucaccgcccccacgaugccccuggacugcgcgaacgccagcaacgugcaggccgugaaccgcuccgccaccaagggcgucacccuccugcugcccgagccggaguggaccuacccccggcucagcugccccggguccacguuccagaaggcccugcugaucagcccccaccgcuucggcgagaccaaggggaacuccgcgccgcucaucauccgggagcccuucaucgccugcggccccaacgagugcaagcacuucgcccugacccacuacgccgcgcagcccggcggguacuacaacggcacccgcggggaccggaacaagcugcgccaccucaucagcgugaagcugggcaagaucccgacgguggagaacuccaucuuccacauggccgccuggagcggguccgccugccacgacggcaaggaguggaccuacaucggcgucgacgggcccgacaacaacgcccugcucaaggugaaguacggcgaggcguacaccgacaccuaccacagcuacgccaacaagauccugcggacgcaggaguccgccugcaacugcaucgggggcaacugcuaccugaugaucaccgacggcagcgccagcgggguguccgagugccgcuuccucaagauccgggagggccgcaucaucaaggagaucuuccccaccgggcgggucaagcacaccgaggagugcacgugcggcuucgccagcaacaagaccaucgagugcgcgugccgcgacaacuccuacaccgccaagcggcccuucgugaagcugaacguggagaccgacacggccgagauccgccugaugugcaccgacaccuaccucgacaccccgcggcccaacgacgggagcaucacgggccccugcgaguccaacggcgacaaggggagcggcgggaucaagggcggguucguccaccagcgcaugaaguccaagaucggccggugguacagccgcaccauguccaagaccgagcggaugggcauggggcuguacgugaaguacgacggcgaccccugggccgacagcgacgcccuggcguucuccggggugauggucagcaugaaggagccgggcugguacuccuucggguucgagaucaaggacaagaagugcgacgugcccugcaucggcaucgagauggugcacgacggcgggaaggagaccuggcacagcgccgccacggccaucuacugccucaugggcuccgggcagcugcugugggacaccgucaccggcguggacauggcccucuga

SEQ ID NO: 93128 - RNA, 1401 nt, Artificial Sequence; identical to SEQ ID NO: 92985
  derived and/or modified CDS sequence (opt1) from neuraminidase__InfluenzaB__AGX15701

SEQ ID NO: 93129 - RNA, 1401 nt, Artificial Sequence
  derived and/or modified CDS sequence (opt1) from neuraminidase__InfluenzaB__AGX15712
augcugcccagcaccauccagacccucacgcuguuccugaccuccggcggggugcuccugagccuguacgucuccgccagccucuccuaccugcuguacagcgacauccuccugaaguucuccccgaccgagaucaccgcccccacgaugccccuggacugcgcgaacgccagcaacgugcaggccgugaaccgcuccgccaccaagggcgucacccuccugcugcccgagccggaguggaccuacccccggcucagcugccccggguccacguuccagaaggcccugcugaucagcccccaccgcuucggcgagccgaaggggaacuccgcgccccucaucauccgggagcccuucaucgccugcggccccaacgagugcaagcacuucgcccugacccacuacgccgcgcagccgggcggguacuacaacggcacccgcggggaccggaacaagcugcgccaccucaucagcgugaagcugggcaagauccccaccguggagaacuccaucuuccacauggccgccuggagcggguccgccugccacgacggcaaggaguggacguacaucggcgucgacgggcccgacaacaacgcccugcucaaggugaaguacggcgaggcguacaccgacaccuaccacagcuacgccaacaagauccugcggacccaggaguccgccugcaacugcaucgggggcaacugcuaccugaugaucacggacggcagcgccagcgggguguccgagugccgcuuccucaagauccgggagggccgcaucaucaaggagaucuuccccaccgggcgggucaagcacaccgaggagugcacgugcggcuucgccagcaacaagaccaucgagugcgcgugccgcgacaacuccuacaccgccaagcggccguucgugaagcugaacguggagaccgacaccgccgagauccgccugaugugcacggacaccuaccucgacacgccccggcccaacgacgggagcaucaccggccccugcgaguccgacggcgacaaggggagcggcgggaucaagggcggguucguccaccagcgcauggaguccaagaucggccggugguacagccgcaccauguccaagaccgagcggaugggcauggggcuguacgugaaguacgacggcgacccgugggccgacagcgacgcccuggcguucuccggggugauggucagcaugaaggagcccggcugguacuccuucggguucgagaucaaggacaagaagugcgacgugcccugcaucggcaucgagauggugcacgacggcgggaaggagaccuggcacagcgccgccaccgccaucuacugccucaugggcuccgggcagcugcugugggacacggucaccggcgugaacauggcccucuga

SEQ ID NO: 93130 - RNA, 1401 nt, Artificial Sequence; identical to SEQ ID NO: 92985
  derived and/or modified CDS sequence (opt1) from neuraminidase__InfluenzaB__AGX15723

SEQ ID NO: 93131 - RNA, 1401 nt, Artificial Sequence; identical to SEQ ID NO: 92985
  derived and/or modified CDS sequence (opt1) from neuraminidase__InfluenzaB__AGX15745

SEQ ID NO: 93132 - RNA, 1401 nt, Artificial Sequence; identical to SEQ ID NO: 92985
  derived and/or modified CDS sequence (opt1) from neuraminidase__InfluenzaB__AGX15757

SEQ ID NO: 93133 - RNA, 1401 nt, Artificial Sequence
  derived and/or modified CDS sequence (opt1) from neuraminidase__InfluenzaB__AGX15768
augcugcccagcaccauccagacccucacgcuguuccugaccuccggcggggugcuccugagccuguacgucuccgccagccucuccuaccugcuguacagcgacauccuccugaaguucuccccgaccgagaucaccgcccccacgaugccccuggacugcgcgaacgccagcaacgugcaggccgugaaccgcuccgccaccaagggcgucacccuccugcugcccgagccggaguggaccuacccccggcucagcugccccggguccacguuccagaaggcccugcugaucagcccccaccgcuucggcgagaccaaggggaacuccgcgccgcucaucauccgggagcccuucaucgccugcggccccaacgagugcaagcacuucgcccugacccacuacgccgcgcagcccggcggguacuacaacggcacccgcggggaccggaacaagcugcgccaccucaucagcgugaagcugggcaagaucccgacgguggagaacuccaucuuccacauggccgccuggagcggguccgccugccacgacggcaaggaguggaccuacaucggcgucgacgggcccgacaacaacgcccugcucaaggugaaguacggcgaggcguacaccgacaccuaccacagcuacgccaacaagauccugcggacgcaggaguccgccugcaacugcaucgggggcaacugcuaccugaugaucaccgacggcagcgccagcgggguguccgagugccgcuuccucaagauccgggagggccgcaucaucaaggagaucuuccccaccgggcgggucaagcacaccgaggagugcacgugcggcuucgccagcaacaagaccaucgagugcgcgugccgcgacaacuccuacaccgccaagcggcccuucgugaagcugaacguggagaccgacacggccgagauccgccugaugugcaccgacaccuaccucgacaccccgcggcccaacgacgggagcaucacgggccccugcgaguccaacggcgacaaggggagcggcgggaucaagggcggguucguccaccagcgcauggaguccaagaucggccggugguacagccgcaccauguccaagaccgagcggaugggcauggggcuguacgugaaguacgacggcgaccccugggccgacagcgacgcccuggcguucuccggggugaugaucagcaugaaggagccgggcugguacuccuucggguucgagaucaaggacaagaagugcgacguccccugcaucggcaucgagauggugcacgacggcgggaaggagaccuggcacagcgccgccacggccaucuacugccucaugggcuccgggcagcugcugugggacaccgugaccggcgucgacauggcccucuga

SEQ ID NO: 93134 - RNA, 1401 nt, Artificial Sequence
  derived and/or modified CDS sequence (opt1) from neuraminidase__InfluenzaB__AGX15801
augcugcccagcaccauccagacccucacgcuguuccugaccuccggcggggugcuccugagccuguacgucuccgccagccucuccuaccugcuguacagcgacauccuccugaaguucuccccgaccgagaucaccgcccccacgaugagccuggacugcgugaacgcguccaacgugcaggccgucaaccgcagcgccaccaagggcgugacccuccugcugcccgagcccgaguggaccuacccgcggcucuccugccccgggagcacguuccagaaggcccugcugaucagcccccaccgcuucggcgagaccaaggggaacuccgcgccccucaucauccgggagccguucaucgccugcggccccaacgagugcaagcacuucgcccugacccacuacgccgcccagcccggcggguacuacaacggcacccgcggggaccggaacaagcugcgccaccucaucuccgugaagcugggcaagauccccacggucgagaacagcaucuuccacauggcggccugguccgggagcgccugccacgacggcaaggaguggaccuacaucggcguggacgggccggacaacaacgcccugcucaaggugaaguacggcgaggccuacaccgacaccuaccacuccuacgcgaacaagauccugcggacgcaggagagcgccugcaacugcaucgggggcaacugcuaccugaugaucaccgacggcagcgccuccggggucagcgagugccgcuuccucaagauccgggagggccgcaucaucaaggagaucuuccccaccgggcgggugaagcacaccgaggagugcacgugcggcuucgccuccaacaagaccaucgagugcgccugccgcgacaacagcuacaccgcgaagcggcccuucgugaagcugaacgucgagaccgacacggccgagauccgccugaugugcaccgacaccuaccucgacacgccccggccgaacgacggguccaucaccggccccugcgagagcaacggcgacaagggguccggcgggaucaagggcggguucgugcaccagcgcauggagagcaagaucggccggugguacucccgcaccaugagcaagaccgagcggaugggcauggggcuguacgugaaguacgacggcgaccccugggccgacuccgacgcccuggccuucagcggggucaugguguccaugaaggagcccggcugguacagcuucggguucgagaucaaggacaagaagugcgacgugccgugcaucggcaucgagaugguccacgacggcgggaaggagaccuggcacuccgcggccacggccaucuacugccucaugggcagcgggcagcugcugugggacaccgugaccggcguggacauggcccucuga

SEQ ID NO: 93135 - RNA, 1401 nt, Artificial Sequence; identical to SEQ ID NO: 92985
  derived and/or modified CDS sequence (opt1) from neuraminidase__InfluenzaB__AGX15812

SEQ ID NO: 93136 - RNA, 1401 nt, Artificial Sequence; identical to SEQ ID NO: 92985
  derived and/or modified CDS sequence (opt1) from neuraminidase__InfluenzaB__AGX15823

SEQ ID NO: 93137 - RNA, 1401 nt, Artificial Sequence; identical to SEQ ID NO: 92919
  derived and/or modified CDS sequence (opt1) from neuraminidase__InfluenzaB__AGX15845

SEQ ID NO: 93138 - RNA, 1401 nt, Artificial Sequence; identical to SEQ ID NO: 92896
  derived and/or modified CDS sequence (opt1) from neuraminidase__InfluenzaB__AGX15856

SEQ ID NO: 93139 - RNA, 1401 nt, Artificial Sequence; identical to SEQ ID NO: 92919
  derived and/or modified CDS sequence (opt1) from neuraminidase__InfluenzaB__AGX15867

SEQ ID NO: 93140 - RNA, 1401 nt, Artificial Sequence; identical to SEQ ID NO: 92919
  derived and/or modified CDS sequence (opt1) from neuraminidase__InfluenzaB__AGX15889

SEQ ID NO: 93141 - RNA, 1401 nt, Artificial Sequence
  derived and/or modified CDS sequence (opt1) from neuraminidase__InfluenzaB__AGX15900
augcugcccagcaccauccagacccucacgcuguuccugaccuccggcggggugcuccugagccuguacgucuccgcccuccugagcuaccugcucuacuccgacauccugcugaaguucagcccgaccgagaucaccgcccccacgaugucccucgacugcgcgaacaccagcaacgugcaggccgugaaccgcuccgccaccaagggcgucaccuuccugcugcccgagcccgaguggacguacccgcggcucagcugccccggguccaccuuccagaaggcccugcugaucagcccccaccgcuucggcgagaccaaggggaacuccgcgccccucaucauccgggagccguucaucgccugcggccccaacgagugcaagcacuucgcccugacccacuacgccgcccagcccggcggguacuacaacggcacgcgcggggaccggaacaagcugcgccaccucaucagcgugaagcugggcaagauccccaccguggagaacuccaucuuccacauggcggccuggagcggguccgccugccacgacggcaaggaguggaccuacaucggcgucgacgggccggacaacgacgcccugcucaaggugaaguacggcgaggccuacaccgacacguaccacagcuacgcgaacaagauccugcggacccaggaguccgccugcaacugcaucgggggcaacugcuaccugaugaucaccgacggcagcgccagcgggguguccgagugccgcuuccucaagauccgggagggccgcaucaucaaggagaucuuccccaccgggcgggucaagcacacggaggagugcacgugcggcuucgccagcaacaagaccaucgagugcgccugccgcgacaacuccuacaccgcgaagcggcccuucgugaagcugaacguggagaccgacaccgccgagauccgccugaugugcaccgacaccuaccucgacacgccccggccggacgacgggagcaucaccggccccugcgaguccaacggcgacaaggggagcggcgggaucaagggcggguucguccaccagcgcauggaguccaagaucggccggugguacagccgcaccauguccaagaccgagcggcgcggcauggggcuguacgugaaguacgacggcgaccccugggccgacagcgacgcccuggccuucuccggggugauggucagcaugaaggagcccggcugguacuccuucggguucgagaucaaggacaagaagugcgacgugccgugcaucggcaucgagauggugcacgacggcgggaaggagacguggcacagcgcggccaccgccaucuacugccucaugggcuccgggcagcugcugugggacaccgucaccggcguggacauggcccucuga

SEQ ID NO: 93142 - RNA, 1401 nt, Artificial Sequence; identical to SEQ ID NO: 92919
  derived and/or modified CDS sequence (opt1) from neuraminidase__InfluenzaB__AGX15911

SEQ ID NO: 93143 - RNA, 1401 nt, Artificial Sequence
  derived and/or modified CDS sequence (opt1) from neuraminidase__InfluenzaB__AGX15933
augcugcccagcaccauccagacccucacgcuguuccugaccuccggcggggugcuccugagccuguacgucuccgccagccucuccuaccugcuguacagcgacauccuccugaaguucuccccgaccgagaucaccgcccccgcgaugccccuggacugcgccaacgccagcaacgugcaggccgugaaccgcuccgccacgaagggcgucacccuccugcugcccgagccggaguggaccuacccccggcucagcugccccggguccaccuuccagaaggcgcugcugaucagcccccaccgcuucggcgagacgaaggggaacuccgccccgcucaucauccgggagcccuucaucgccugcggccccaacgagugcaagcacuucgcccugacccacuacgcggcccagcccggcggguacuacaacggcacccgcggggaccggaacaagcugcgccaccucaucagcgugaagcugggcaagaucccgaccguggagaacuccaucuuccacauggccgccuggagcggguccgccugccacgacggcaaggaguggacguacaucggcgucgacgggcccgacaacaacgcgcugcucaaggugaaguacggcgaggccuacaccgacaccuaccacagcuacgccaacaagauccugcggacccaggaguccgccugcaacugcaucgggggcaacugcuaccugaugaucacggacggcagcgccagcgggguguccgagugccgcuuccucaagauccgggagggccgcaucaucaaggagaucuuccccaccgggcgggucaagcacaccgaggagugcacgugcggcuucgcgagcaacaagaccaucgagugcgccugccgcgacaacuccuacaccgccaagcggcccuucgugaagcugaacguggagaccgacaccgccgagauccgccugaugugcacggacaccuaccucgacaccccgcggcccaacgacgggagcaucaccggccccugcgaguccgacggcgacaaggggagcggcgggaucaagggcggguucguccaccagcgcauggaguccaagaucggccggugguacagccgcacgauguccaagaccgagcggaugggcauggggcuguacgugaaguacgacggcgaccccugggccgacagcgacgcgcuggccuucuccggggugauggucagcaugaaggagccgggcugguacuccuucggguucgagaucaaggacaagaagugcgacgugcccugcaucggcaucgagauggugcacgacggcgggaaggagaccuggcacagcgccgccaccgccaucuacugccucaugggcuccgggcagcugcugugggacacggucaccggcguggacauggcgcucuga

SEQ ID NO: 93144 - RNA, 1401 nt, Artificial Sequence; identical to SEQ ID NO: 92919
  derived and/or modified CDS sequence (opt1) from neuraminidase__InfluenzaB__AGX15944

SEQ ID NO: 93145 - RNA, 1401 nt, Artificial Sequence; identical to SEQ ID NO: 92980
  derived and/or modified CDS sequence (opt1) from neuraminidase__InfluenzaB__AGX15966

SEQ ID NO: 93146 - RNA, 1401 nt, Artificial Sequence
  derived and/or modified CDS sequence (opt1) from neuraminidase__InfluenzaB__AGX15988
augcugcccagcaccauccagacccucacgcuguuccugaccuccggcggggugcuccugagccuguacgucuccgccagccucuccuaccugcuguacagcgacauccuccugaaguucuccccgaccgagaucaccgcccccacgaugccccuggacugcgcgaacgccagcaacgugcaggccgugaaccgcuccgccaccaagggcgucacccuccugcugcccgagccggaguggaccuacccccggcucagcugccccggguccacguuccagaaggcccugcugaucagcccccaccgcuucggcgagaccaaggggaacuccgcgccgcucaucauccgggagcccuucaucgccugcggccccaacgagugcaagcacuucgcccugacccacuacgccgcgcagcccggcggguacuacaacggcacccgcggggaccggaacaagcugcgccaccucaucagcgugaagcugggcaagaucccgacgguggagaacuccaucuuccacauggccgccuggagcggguccgccugccacgacggcaaggaguggaccuacaucggcgucgacgggcccgacaacaacgcccugcucaaggugaaguacggcgaggcguacaccgacaccuaccacagcuacgccaacaagauccugcggacgcaggaguccgccugcaacugcaucgggggcaacugcuaccugaugaucaccgacggcagcgccagcgggguguccgagugccgcuuccucaagauccgggagggccgcaucaucaaggagaucuuccccaccgggcgggucaagcacaccgaggagugcacgugcggcuucgccagcaacaagaccaucgagugcgcgugccgcgacaacuccuacaccgccaagcggcccuucgugaagcugaacguggagaccgacacggccgagguccgccugaugugcaccgacaccuaccucgacaccccgcggcccaacgacgggagcaucacgggccccugcgaguccgacggcgacaaggggagcggcgggaucaagggcggguucgugcaccagcgcauggaguccaagaucggccggugguacagccgcaccauguccaagaccgagcggaugggcauggggcuguacgugaaguacgacggcgaccccugggccgacagcgacgcccugaccuucuccggggucauggugagcaugaaggagccgggcugguacuccuucggguucgagaucaaggacaagaagugcgacgugcccugcaucggcaucgagaugguccacgacggcgggaaggagacguggcacagcgcggccaccgccaucuacugccucaugggcuccgggcagcugcugugggacaccgugaccggcguggacauggcccucuga

SEQ ID NO: 93147 - RNA, 1401 nt, Artificial Sequence; identical to SEQ ID NO: 92980
  derived and/or modified CDS sequence (opt1) from neuraminidase__InfluenzaB__AGX15999

SEQ ID NO: 93148 - RNA, 1401 nt, Artificial Sequence; identical to SEQ ID NO: 92980
  derived and/or modified CDS sequence (opt1) from neuraminidase__InfluenzaB__AGX16010

SEQ ID NO: 93149 - RNA, 1401 nt, Artificial Sequence; identical to SEQ ID NO: 92980
  derived and/or modified CDS sequence (opt1) from neuraminidase__InfluenzaB__AGX16021

SEQ ID NO: 93150 - RNA, 1401 nt, Artificial Sequence
  derived and/or modified CDS sequence (opt1) from neuraminidase__InfluenzaB__AGX16032
augcugcccagcaccauccagacccucacgcuguuccugaccuccggcggggugcuccugagccuguacgucuccgccagccucuccuaccugcuguacagcgacauccuccugaaguucucccagaccgagaucaccgccccgaucaugccccuggacugcgcgaacgccagcaacgugcaggccgugaaccgcuccgccacgaagggcgucacccuccugcugcccgagcccgaguggaccuacccgcggcucagcugccccggguccaccuuccagaaggcccugcugaucagcccccaccgcuucggcgagacgaaggggaacuccgcgccccucaucauccgggagccguucaucgccugcggccccaaggagugcaagcacuucgcccugacccacuacgccgcgcagcccggcggguacuacaacggcacccgcgaggaccggaacaagcugcgccaccucaucagcgugaagcuggggaagauccccaccguggagaacuccaucuuccacauggccgccuggagcggcuccgccugccacgacgggaaggaguggacguacaucggcgucgacggcccggacagcaacgcccugcucaagaucaaguacggggaggcguacaccgacaccuaccacuccuacgccaagaacauccugcggacccaggagagcgccugcaacugcaucggcggggacugcuaccugaugaucacggacggccccgccagcggcaucuccgagugccgcuuccucaagauccgggaggggcgcaucaucaaggagaucuuccccaccggccgggugaagcacaccgaggagugcacgugcggguucgccagcaacaagaccaucgagugcgcgugccgcgacaacuccuacaccgccaagcggcccuucgugaagcugaacgucgagaccgacaccgccgagauccgccugaugugcacggagaccuaccucgacaccccgcggcccaacgacggcagcaucaccgggcccugcgaguccgacggcgacaagggcagcgggggcaucaagggcggguucgugcaccagcgcauggccuccaagaucgggcggugguacagccgcacgauguccaagaccaagcggaugggcaugggccuguacgugaaguacgacggggaccccuggaccgacagcgaggcccuggcgcucuccggcgucauggugagcauggaggagccggggugguacuccuucggcuucgagaucaaggacaagaagugcgacgugcccugcaucgggaucgagaugguccacgacggcggcaagaccacguggcacagcgccgccaccgccaucuacugccugaugggguccggccagcugcucugggacaccgugaccgggguggacauggcccuguga

SEQ ID NO: 93151 - RNA, 1401 nt, Artificial Sequence; identical to SEQ ID NO: 92767
  derived and/or modified CDS sequence (opt1) from neuraminidase__InfluenzaB__AGX16043

SEQ ID NO: 93152 - RNA, 1401 nt, Artificial Sequence; identical to SEQ ID NO: 92769
  derived and/or modified CDS sequence (opt1) from neuraminidase__InfluenzaB__AGX16054

SEQ ID NO: 93153 - RNA, 1401 nt, Artificial Sequence
  derived and/or modified CDS sequence (opt1) from neuraminidase__InfluenzaB__AGX16087
augcugcccagcaccauccagacccucacgcuguuccugaccuccggcggggugcuccugagccuguacgucuccgccagccucuccuaccugcuguacagcgacauccuccugaaguucucccagaccgagaucaccgccccgaucaugccccuggacugcgcgaacgccagcaacgugcaggccgugaaccgcuccgccacgaagggcgucacccuccugcugcccgagcccgaguggaccuacccgcggcucagcugccccggguccaccuuccagaaggcccugcugaucagcccccaccgcuucggcgagacgaaggggaacuccgcgccccucaucauccgggagccguucaucgccugcggccccaaggagugcaagcacuucgcccugacccacuacgccgcgcagcccggcggguacuacaacggcacccgcgaggaccggaacaagcugcgccaccucaucagcgugaagcuggggaagauccccaccguggagaacuccaucuuccacauggccgccuggagcggcuccgccugccacgacgggcgggaguggacguacaucggcgucgacggcccggacagcaacgcccugcucaagaucaaguacggggaggcguacaccgacaccuaccacuccuacgccaagaacauccugcgcacccaggagagcgccugcaacugcaucggcggggacugcuaccugaugaucacggacggccccgccagcggcaucuccgagugccgguuccucaagauccgcgaggggcggaucaucaaggagaucuuccccaccggccgcgugaagcacaccgaggagugcacgugcggguucgccagcaacaagaccaucgagugcgcgugccgggacaacaacuacaccgccaagcgccccuucgugaagcugaacgucgagaccgacaccgccgagauccggcugaugugcacggagaccuaccucgacaccccgcgccccaacgacggcuccaucaccgggcccugcgagagcaacggcgacaagggcuccgggggcaucaagggcggguucgugcaccagcggauggccagcaagaucgggcgcugguacucccggacgaugagcaagaccaagcgcaugggcaugggccuguacgugaaguacgacggggaccccuggaccgacuccgaggcccuggcgcucagcggcgucaugguguccauggaggagccggggugguacagcuucggcuucgagaucaaggacaagaagugcgacgugcccugcaucgggaucgagaugguccacgacggcggcaagaccacguggcacuccgccgccaccgccaucuacugccugauggggagcggccagcugcucugggacaccgugaccgggguggacauggcccuguga

SEQ ID NO: 93154 - RNA, 1401 nt, Artificial Sequence
  derived and/or modified CDS sequence (opt1) from neuraminidase__InfluenzaB__AGX16109
augcugcccagcaccauccagacccucacgcuguuccugaccuccggcggggugcuccugagccuguacgucuccgccagccucuccuaccugcuguacagcgacauccuccugaaguucucccagaccgagaucaccgccccgacgaugccccuggacugcgcgaacgccagcaacgugcaggccgugaaccgcuccgccaccaagggcgucacccuccugcugcccgagcccgaguggaccuacccgcggcucagcugccccggguccacguuccagaaggcccugcugaucagcccccaccgcuucggcgagaccaaggggaacuccgcgccccucaucauccgggagccguucaucgccugcggccccaaggagugcaagcacuucgcccugacccacuacgccgcgcagcccggcggguacuacaacggcacccgcgaggaccggaacaagcugcgccaccucaucagcgugaagcuggggaagauccccacgguggagaacuccaucuuccacauggccgccuggagcggcuccgccugccacgacgggcgggaguggaccuacgucggcguggacggcccggacagcaacgcccugcucaagaucaaguacggggaggcguacaccgacaccuaccacuccuacgccaagaacauccugcgcacgcaggagagcgccugcaacugcaucggcggggacugcuaccugaugaucaccgacggccccgccagcggcaucuccgagugccgguuccucaagauccgcgaggggcggaucaucaaggagaucuuccccaccggccgcgugaagcacaccgaggagugcacgugcggguucgccagcaacaagaccaucgagugcgcgugccgggacaacuccuacaccgccaagcgccccuucgucaagcuggacguggagaccgacacggccgagauccggcugaugugcaccgagaccuaccucgacaccccgcgccccaacgacggcagcaucacggggcccugcgaggccaacggcgacaagggcuccgggggcaucaagggcggguucgugcaccagcggauggccagcaagaucgggcgcugguacucccggaccaugagcaagaccaagcgcaugggcaugggccuguacgucaaguacgacggggaccccuggaccgacuccgaggcgcuggcccucagcggcgugaugguguccauggaggagccggggugguacagcuucggcuucgagaucaaggacaagaagugcgacguccccugcaucgggaucgagauggugcacgacggcggcaagacgaccuggcacuccgccgccaccgccaucuacugccugauggggagcggccagcugcucugggacaccgugacgggggucgacauggcgcuguga

SEQ ID NO: 93155 - RNA, 1401 nt, Artificial Sequence
  derived and/or modified CDS sequence (opt1) from neuraminidase__InfluenzaB__AGX16120
augcugcccagcaccauccagacccucacgcuguuccugaccuccggcggggugcuccugagccuguacgucuccgccagccucuccuaccugcuguacagcgacauccuccugaaguucuccaccaccgagaucacggccccgaccaugccccuggacugcgcgaacgccagcaacgugcaggccgugaaccgcuccgccaccaagggcgucaccuuccuccugcccgagcccgaguggacguacccgcggcugagcugccccggguccaccuuccagaaggcccuccugaucagcccccaccgcuucggcgagaccaaggggaacuccgcgccccugaucauccgggagccguucaucgccugcggccccaaggagugcaagcacuucgcccucacccacuacgccgcgcagcccggcggguacuacaacggcacgcgcgaggaccggaacaagcugcgccaccugaucagcgugaagcucgggaagauccccaccguggagaacuccaucuuccacauggccgccuggagcggcuccgccugccacgacgggaaggaguggaccuacaucggcgucgacggcccggacagcaacgcccugcugaagaucaaguacggggaggcguacaccgacacguaccacuccuacgccaacaacauccuccggacccaggagagcgccugcaacugcaucggcgggaacugcuaccugaugaucaccgacggcagcgccuccggcaucagcgagugccgcuuccugaagauccgggaggggcgcaucaucaaggagaucuuccccaccggccgggugaagcacacggaggagugcacgugcggguucgccuccaacaagaccaucgagugcgcgugccgcgacaacagcuacaccgccaagcggcccuucgugaagcucaacgucgagaccgacaccgccgagauccgccugaugugcaccgagaccuaccuggacacgccccggccggacgacggcuccaucaccgggcccugcgagagcaacggcaacaagggcuccgggggcaucaagggcggguucgugcaccagcgcauggccagcaagaucgggcggugguacucccgcaccaugagcaagaccaagcggaugggcaugggccucuacgugaaguacgacggggaccccuggacggacuccgacgcccuggcgcugagcggcgucaugguguccauggaggagcccgggugguacagcuucggcuucgagaucaaggacaagaagugcgacgugccgugcaucgggaucgagaugguccacgacggcggcaaggagaccuggcacuccgccgccaccgccaucuacugccucauggggagcggccagcugcugugggacaccgugacggggguggacauggcccucuga

SEQ ID NO: 93156 - RNA, 1401 nt, Artificial Sequence; identical to SEQ ID NO: 93155
  derived and/or modified CDS sequence (opt1) from neuraminidase__InfluenzaB__AGX16131

SEQ ID NO: 93157 - RNA, 1401 nt, Artificial Sequence; identical to SEQ ID NO: 93155
  derived and/or modified CDS sequence (opt1) from neuraminidase__InfluenzaB__AGX16142

SEQ ID NO: 93158 - RNA, 1401 nt, Artificial Sequence
  derived and/or modified CDS sequence (opt1) from neuraminidase__InfluenzaB__AGX16153
augcugcccagcaccauccagacccucacgcuguuccugaccuccggcggggugcuccugagccuguacgucuccgccagccucuccuaccugcuguacagcgacauccuccugaaguucucccagaccgagaucaccgccccgaucaugccccuggacugcgcgaacgccagcaacgugcaggccgugaaccgcuccgccacgcggggcgucacccuccugcugcccgagcccgaguggaccuacccgcgccucagcugccccggguccaccuuccagaaggcccugcugaucagcccccaccgguucggcgagacgaaggggaacuccgcgccccucaucauccgcgagccguucaucgccugcggccccaaggagugcaagcacuucgcccugacccacuacgccgcgcagcccggcggguacuacaacggcacccgggaggaccgcaacaagcugcggcaccucaucagcgugaagcuggggaagauccccaccguggagaacuccaucuuccacaugacggccuggagcggcuccgccugccacgacgggcgcgaguggaccuacaucggcgucgacggcccggacagcaacgcccugcucaagaucaaguacggggaggccuacaccgacaccuaccacuccuacgcgaagaacauccugcggacgcaggagagcgccugcaacugcaucggcggggacugcuaccugaugaucaccgacggccccgccagcggcaucuccgagugccgcuuccucaagauccgggaggggcgcaucaucaaggagaucuuccccaccggccgggugaagcacaccgaggagugcacgugcggguucgccagcaacaagaccaucgagugcgccugccgcgacaacuccuacaccgcgaagcggcccuucgugaagcugaacgucgagaccgacacggccgagauccgccugaugugcaccgagaccuaccucgacaccccgcggcccaacgacggcagcaucacggggcccugcgaguccaacggcgacaagggcagcgggggcaucaagggcggguucgugcaccagcgcauggccuccaagaucgggcggugguacagccgcaccauguccaagaccaagcggaugggcaugggccuguacgugaaguacgacggggaccccuggaccgacagcgaggcccuggcccucuccggcgucauggugagcauggaggagccggggugguacuccuucggcuucgagaucaaggacaagaagugcgacgugcccugcaucgggaucgagaugguccacgacggcggcaagacgaccuggcacagcgcggccaccgccaucuacugccugaugggguccggccagcugcucugggacaccgugacggggguggacauggcccuguga

SEQ ID NO: 93159 - RNA, 1401 nt, Artificial Sequence; identical to SEQ ID NO: 93153
  derived and/or modified CDS sequence (opt1) from neuraminidase__InfluenzaB__AGX16164

SEQ ID NO: 93160 - RNA, 1401 nt, Artificial Sequence; identical to SEQ ID NO: 92812
  derived and/or modified CDS sequence (opt1) from neuraminidase__InfluenzaB__AGX16197

SEQ ID NO: 93161 - RNA, 1401 nt, Artificial Sequence; identical to SEQ ID NO: 92812
  derived and/or modified CDS sequence (opt1) from neuraminidase__InfluenzaB__AGX16208

SEQ ID NO: 93162 - RNA, 1401 nt, Artificial Sequence; identical to SEQ ID NO: 92812
  derived and/or modified CDS sequence (opt1) from neuraminidase__InfluenzaB__AGX16219

SEQ ID NO: 93163 - RNA, 1401 nt, Artificial Sequence; identical to SEQ ID NO: 92651
  derived and/or modified CDS sequence (opt1) from neuraminidase__InfluenzaB__AGX16230

SEQ ID NO: 93164 - RNA, 1401 nt, Artificial Sequence
  derived and/or modified CDS sequence (opt1) from neuraminidase__InfluenzaB__AGX16241
augcugcccagcaccauccagacccucacgcuguuccugaccuccggcggggugcuccugagccuguacgucuccgccagccucuccuaccugcuguacagcgacauccuccugaaguucucccagaccgagaucaccgccccgaucaugccccuggacugcgcgaacgccagcaacgugcaggccgugaaccacuccgccacgaagggcgucacccuccugcugcccgagcccgaguggaccuacccgcgccucagcugccccggguccaccuuccagaaggcccugcugaucagcccccaccgguucggcgagacgaaggggaacuccgcgccccucaucauccgcgagccguucaucgccugcggccccaaggagugcaagcacuucgcccugacccacuacgccgcgcagcccggcggguacuacaacggcacccgggaggaccgcaacaagcugcggcaccucaucagcgugaagcuggggaagauccccaccguggagaacuccaucuuccacauggccgccuggagcggcuccgccugccacgacgggcgcgaguggacguacaucggcgucgacggcccggacagcaacgcccugcucaagaucaaguacggggaggcguacaccgacaccuaccacuccuacgccaagaacauccugcggacccaggagagcgccugcaacugcaucggcggggacugcuaccugaugaucacggacggccccgccagcggcaucuccgagugccgcuuccucaagauccgggaggggcgcaucaucaaggagaucuuccccaccggccgggugaagcacaccgaggagugcacgugcggguucgccagcaacaagaccaucgagugcgcgugccgcgacaacuccuacaccgccaagcggcccuucgugaagcugaacgucgagaccgacaccgccgagauccgccugaugugcacggagaccuaccucgacaccccgcggcccaacgacggcagcaucaucgggcccugcgaguccaacggcgacaagggcagcgggggcaucaagggcggguucgugcaccagcgcauggccuccaagaucgggcggugguacagccgcaccauguccaagacgaagcggaugggcaugggccuguacgugaaguacgacggggaccccuggaccgacagcgaggcccugacccucuccggcgucauggugagcauggaggagccggggugguacuccuucggcuucgagaucaaggacaagaagugcgacgugcccugcaucgggaucgagaugguccacgacggcggcaagaccacguggcacagcgcggccaccgccaucuacugccugaugggguccggccagcugcucugggacaccgugaccgggguggacauggcccuguga

SEQ ID NO: 93165 - RNA, 1401 nt, Artificial Sequence
  derived and/or modified CDS sequence (opt1) from neuraminidase__InfluenzaB__AGX16252
augcugcccagcaccauccagacccucacgcuguuccugaccuccggcggggugcuccugagccuguacgucuccgccagccucuccuaccugcuguacagcgacauccuccugaaguucucccagaccgagaucaccgccccgaucaugccccuggacugcgcgaacgccagcaacgugcaggccgugaaccgcuccgccgccaagggcgucacgcuccugcugcccgagcccgagugggcguacccgcggcucagcugccccggguccaccuuccagaaggcccugcugaucagcccccaccgcuucggcgagaccaaggggaacuccgcgccccucaucauccgggagccguucaucgccugcggccccaccgagugcaagcacuucgcccugacgcacuacgccgcccagcccggcggguacuacaacggcacccgcgaggaccggaacaagcugcgccaccucaucagcgugaagcuggggaagauccccaccguggagaacuccaucuuccacauggccgccuggagcggcuccgcgugccacgacgggaaggaguggaccuacaucggcgucgacggcccggacagcaacgcccugcucaagaucaaguacggggaggccuacacggacaccuaccacuccuacgccaagaacauccugcggacccaggagagcgccugcaacugcaucggcggggacugcuaccugaugaucaccgacggccccgcgagcggcaucuccgagugccgcuuccucaagauccgggaggggcgcaucaucaaggagaucuuccccacgggccgggugaagcacaccgaggagugcacgugcggguucgccagcaacaagaccaucgagugcgccugccgcgacaaccgguacaccgccaagcgccccuucgugaagcugaacgucgagaccgacaccgccgagauccggcugaugugcaccgagacguaccucgacaccccgcgccccaacgacggcuccaucaccgggcccugcgagagcgacggcgacaagggcuccgggggcaucaagggcggguucgugcaccagcggauggcgagcaagaucgggcgcugguacucccggaccaugagcaagacgaagcgcaugggcaugggccuguacgugaaguacgacggggaccccuggaccgacuccgaggcccuggcccucagcggcgucaugguguccauggaggagccggggugguacagcuucggcuucgagaucaaggacaagaagugcgacgugcccugcaucgggaucgagaugguccacgacggcggcaagaccaccuggcacuccgccgccacggcgaucuacugccugauggggagcggccagcugcucugggacaccgugaccgggguggacauggcccuguga

SEQ ID NO: 93166 - RNA, 1401 nt, Artificial Sequence; identical to SEQ ID NO: 92812
  derived and/or modified CDS sequence (opt1) from neuraminidase__InfluenzaB__AGX16274

SEQ ID NO: 93167 - RNA, 1401 nt, Artificial Sequence
  derived and/or modified CDS sequence (opt1) from neuraminidase__InfluenzaB__AGX16285
augcugcccagcaccauccagacccucacgcuguuccugaccuccggcggggugcuccugagccuguacgucuccgccagccucuccuaccugcuguacagcgacauccuccugaaguucucccagaccgagaucaccgccccgaucaugccccuggacugcgcgaacgccagcaacgugcaggccgugaaccgcuccgccgccaagggcgucacgcuccugcugcccgagcccgaguggaccuacccgcggcucagcugccccggguccaccuuccagaaggcgcugcugaucagcccccaccgcuucggcgagaccaaggggaacuccgcgccccucaucauccgggagccguucaucgccugcggccccacggagugcaagcacuucgcccugacccacuacgccgcccagcccggcggguacuacaacggcacccgcgaggaccggaacaagcugcgccaccucaucagcgugaagcuggggaagauccccaccguggagaacuccaucuuccacauggccgccuggagcggcuccgccugccacgacgggaaggaguggacguacaucggcgucgacggcccggacagcaacgcgcugcucaagaucaaguacggggaggccuacaccgacaccuaccacuccuacgccaagaacauccugcggacccaggagagcgccugcaacugcaucggcggggacugcuaccugaugaucacggacggccccgccagcggcaucuccgagugccgcuuccucaagauccgggaggggcgcaucaucaaggagaucuuccccaccggccgggugaagcacaccgaggagugcacgugcggguucgcgagcaacaagaccaucgagugcgccugccgcgacaacuccuacaccgccaagcggcccuucgugaagcugaacgucgagaccgacaccgccgagauccgccugaugugcacggagaccuaccucgacaccccgcggcccaacgacggcagcaccacggggcccugcgaguccgacggcgacaagggcagcgggggcaucaagggcggguucgugcaccagcgcauggccuccaagaucgggcggugguacagccgcaccauguccaagaccaagcggaugggcaugggccuguacgugaaguacgacggggaccccuggaccgacagcgaggcgcuggcccucuccggcgucauggugagcauggaggagccggggugguacuccuucggcuucgagaucaaggacaagaagugcgacgugcccugcaucgggaucgagaugguccacgacggcggcaagacgaccuggcacagcgccgccaccgccaucuacugccugaugggguccggccagcugcucugggacaccgugacggggguggacauggcgcuguga

SEQ ID NO: 93168 - RNA, 1401 nt, Artificial Sequence; identical to SEQ ID NO: 92812
  derived and/or modified CDS sequence (opt1) from neuraminidase__InfluenzaB__AGX16296

SEQ ID NO: 93169 - RNA, 1401 nt, Artificial Sequence; identical to SEQ ID NO: 92659
  derived and/or modified CDS sequence (opt1) from neuraminidase__InfluenzaB__AGX16307

SEQ ID NO: 93170 - RNA, 1401 nt, Artificial Sequence; identical to SEQ ID NO: 92812
  derived and/or modified CDS sequence (opt1) from neuraminidase__InfluenzaB__AGX16329

SEQ ID NO: 93171 - RNA, 1401 nt, Artificial Sequence
  derived and/or modified CDS sequence (opt1) from neuraminidase__InfluenzaB__AGX16362
augcugcccagcaccauccagacccucacgcuguuccugaccuccggcggggugcuccugagccuguacgucuccgccagccucuccuaccugcuguacagcgacauccuccugaaguucucccagaccgagaucaccgccccgaucaugccccuggacugcgcgaacgccagcaacgugcaggccgugaaccgcuccgccgccaagggcgucacgcuccugcugcccgagcccgaguggaccuacccgcggcucagcugccccggguccaccuuccagaaggcgcugcugaucagcccccaccgcuucggcgagaccaaggggaacuccgcgccccucaucauccgggagccguucaucgccugcggccccacggagugcaagcacuucgcccugacccacuacgccgcccagcccggcggguacuacaacggcacccgcgaggaccggaacaagcugcgccaccucaucagcgugaagcuggggaagauccccaccguggagaacuccaucuuccacauggccgccuggagcggcuccgccugccacgacgggaaggaguggacguacaucggcgucgacggcccggacagcaacgcgcugcucaagaucaaguacggggaggccuacaccgacaccuaccacuccuacgccaagaacauccugcggacccaggagagcgccugcaacugcaucggcggggacugcuaccugaugaucacggacggccccgccagcggcguguccgagugccgcuuccucaagauccgggaggggcgcaucaucaaggagaucuuccccaccggccgggugaagcacaccgaggagugcacgugcggguucgcgagcaacaagaccaucgagugcgccugccgcgacaacuccuacaccgccaagcggcccuucgucaagcugaacguggagaccgacaccgccgagauccgccugaugugcacggagaccuaccucgacaccccgcggcccaacgacggcagcaucaccgggcccugcgaguccgacggcgacaagggcagcgggggcaucaagggcggguucgugcaccagcgcauggccuccaagaucgggcggugguacagccgcacgauguccaagaccaagcggaugggcaugggccuguacgucaaguacgacggggaccccuggaccgacagcgaggcgcuggcccucuccggcgugauggugagcauggaggagccggggugguacuccuucggcuucgagaucaaggacaagaagugcgacguccccugcaucgggaucgagauggugcacgacggcggcaagaccacguggcacagcgccgccaccgccaucuacugccugaugggguccggccagcugcucugggacaccgugaccggggucgacauggcgcuguga

SEQ ID NO: 93172 - RNA, 1401 nt, Artificial Sequence; identical to SEQ ID NO: 92984
  derived and/or modified CDS sequence (opt1) from neuraminidase__InfluenzaB__AGX16373

SEQ ID NO: 93173 - RNA, 1401 nt, Artificial Sequence
  derived and/or modified CDS sequence (opt1) from neuraminidase__InfluenzaB__AGX16384
augcugcccagcaccauccagacccucacgcuguuccugaccuccggcggggugcuccugagccuguacgucuccgccagccucuccuaccugcuguacagcgacauccuccugaaguucucccagaccgagaucaccgccccgaucaugccccuggacugcgcgaacgccagcaacgugcaggccgugaaccgcuccgccgccaagggcgucacgcuccugcugcccgagcccgaguggaccuacccgcggcucagcugccccggguccaccuuccagaaggcgcugcugaucagcccccaccgcuucggcgagaccaaggggaacuccgcgccccucaucauccgggagccguucaucgccugcggccccacggagugcaagcacuucgcccugacccacuacgccgcccagcccggcggguacuacaacggcacccgcgaggaccggaacaagcugaagcaccucaucagcgugaagcuggggaagauccccaccguggagaacuccaucuuccacauggccgccuggagcggcuccgccugccacgacgggaaggaguggacguacaucggcgucgacggcccggacagcaacgcgcugcucaagaucaaguacggggaggccuacaccgacaccuaccacuccuacgccaagaacauccugcgcacccaggagagcgccugcaacugcaucggcggggacugcuaccugaugaucacggacggccccgccagcggcaucuccgagugccgguuccucaagauccgcgaggggcggaucaucaaggagaucuuccccaccggccgcgugaagcacaccgaggagugcacgugcggguucgcgagcaacaagaccaucgagugcgccugccgggacaacuccuacaccgccaagcgccccuucgugaagcugaacgucgagaccgacaccgccgagauccggcugaugugcacggagaccuaccucgacaccccgcgccccaacgacggcagcaucaccgggcccugcgaguccgacggcgacaagggcagcgggggcaucaagggcggguucgugcaccagcggauggccuccaagaucgggcgcugguacagccggacgauguccaagaccaagcgcaugggcaugggccuguacgugaaguacgacggggaccccuggaccgacagcgaggcgcuggcccucuccggcgucauggugagcauggaggagccggggugguacuccuucggcuucgagaucaaggacaagaagugcgacgugcccugcaucgggaucgagaugguccacgacggcggcaagaccacguggcacagcgccgccaccgccaucuacugccugaugggguccggccagcugcucugggacaccgugaccgggguggacauggcgcuguga

SEQ ID NO: 93174 - RNA, 1401 nt, Artificial Sequence; identical to SEQ ID NO: 92841
  derived and/or modified CDS sequence (opt1) from neuraminidase__InfluenzaB__AGX16406

SEQ ID NO: 93175 - RNA, 1401 nt, Artificial Sequence; identical to SEQ ID NO: 92841
  derived and/or modified CDS sequence (opt1) from neuraminidase__InfluenzaB__AGX16427

SEQ ID NO: 93176 - RNA, 1401 nt, Artificial Sequence; identical to SEQ ID NO: 92841
  derived and/or modified CDS sequence (opt1) from neuraminidase__InfluenzaB__AGX16438

SEQ ID NO: 93177 - RNA, 1401 nt, Artificial Sequence; identical to SEQ ID NO: 92841
  derived and/or modified CDS sequence (opt1) from neuraminidase__InfluenzaB__AGX16449

SEQ ID NO: 93178 - RNA, 1401 nt, Artificial Sequence; identical to SEQ ID NO: 92841
  derived and/or modified CDS sequence (opt1) from neuraminidase__InfluenzaB__AGX16460

SEQ ID NO: 93179 - RNA, 1401 nt, Artificial Sequence
  derived and/or modified CDS sequence (opt1) from neuraminidase__InfluenzaB__AGX16471
augcugcccagcaccauccagacccucacgcuguuccugaccuccggcggggugcuccugagccuguacgucuccgccagccucuccuaccugcuguacagcgacauccuccugaaguucucccagaccgagaucaccgccccgaucaugccccuggacugcgcgaacgccagcaacgugcaggccgugaaccgcuccgccgccaagggcgucacgcuccugcugcccgagcccgaguggaccuacccgcggcucagcugccccggguccaccuuccagaaggcgcugcugaucagcccccaccgcuucggcgagaccaaggggaacuccgcgccccucaucauccgggagccguucaucgccugcggccccacggagugcaagcacuucgcccugacccacuacgccgcccagcccggcggguacuacaacggcacccgcgaggaccggaacaagcugcgccaccucaucagcgugaagcuggggaagauccccaccguggagaacuccaucuuccacauggccgccuggagcggcuccgccugccacgacgggaaggaguggacguacaucggcgucgacggcccggacagcaacgcgcugcucaagaucaaguacggggaggccuacaccgacaccuaccacuccuacgccaagaacauccugcggacccaggagagcgccugcaacugcaucggcggggacugcuaccugaugaucacggacggccccgccagcggcaucuccgagugccgcuuccucaagauccgggaggggcgcaucaucaaggagaucuuccccaccggccgggugaagcacaccgaggagugcacgugcggguucgcgagcaacaagaccaucgagugcgccugccgcgacaacuccuacaccgccaagcggcccuucgugaagcugaacgucgagaccgacaccgccgagauccgccugaugugcacgaagaccuaccucgacaccccgcggcccaacgacggcagcaucaccgggcccugcgaguccgacggcgacaagggcagcgggggcaucaagggcggguucgugcaccagcgcauggccuccaagaucgggcggugguacagccgcacgauguccaagacccggcgcaugggcaugggccuguacgugaaguacgacggggaccccuggaccgacagcgaggcgcuggcccucuccggcgucauggugagcauggaggagccggggugguacuccuucggcuucgagaucaaggacaagaagugcgacgugcccugcaucgggaucgagaugguccacgacggcggcaagaccacguggcacagcgccgccaccgccaucuacugccugaugggguccggccagcugcucugggacaccgugaccgggguggacauggcgcuguga

SEQ ID NO: 93180 - RNA, 1401 nt, Artificial Sequence; identical to SEQ ID NO: 92841
  derived and/or modified CDS sequence (opt1) from neuraminidase__InfluenzaB__AGX16482

SEQ ID NO: 93181 - RNA, 1401 nt, Artificial Sequence
  derived and/or modified CDS sequence (opt1) from neuraminidase__InfluenzaB__AGX16493
augcugcccagcaccauccagacccucacgcuguuccugaccuccggcggggugcuccugagccuguacgucuccgccagccucuccuaccugcuguacagcgacauccuccugaaguucucccagaccgagaucaccgccccgaucaugccccuggacugcgcgaacgccagcaacgugcaggccgugaaccgcuccgccgccaagggcgucacgcuccugcugcccgagcccgaguggaccuacccgcggcucagcugccccggguccaccuuccagaaggcgcugcugaucagcccccaccgcuucggcgagaccaaggggaacuccgcgccccucaucauccgggagccguucaucgccugcggccccacggagugcaagcacuucgcccugacccacuacgccgcccagcccggcggguacuacaacggcacccgcgaggaccggaacaagcugcgccaccucaucagcgugaagcuggggaagauccccaccguggagaacuccaucuuccacauggccgccuggagcggcuccgccugccacgacgggaaggaguggacguacaucggcgucgacggcccggacagcaacgcgcugcucaagaucaaguacggggaggccuacaccgacaccuaccacuccuacgccaagaacauccugcggacccaggagagcgccugcaacugcaucggcggggacugcuaccugaugaucacggacggccccgccagcggcaucuccgagugccgcuuccucaagauccgggaggggcgcaucaucaaggagaucuuccccaccggccgggugaagcacaccgaggagugcacgugcggguucgcgagcaacaagaccaucgagugcgccugccgcgacaacuccuacaccgccaagcggcccuucgugaagcugaacgucgagaccgacaccgccgagauccgccugaugugcacggagaccuaccucgacaccccgcggcccaacgacggcagcaucaccgggcccugcgaguccgacggcgacaagggcagcgggggcaucaagggcggguucgugcaccagcgcauggccuccaagaucgggcggugguacagccgcacgauguccaagaccaagcggaugggcaugggccuguacgugaaguacgacggggaccccuggaccgacagcgaggcgcuggcccucuccggcgucguggugagcauggaggagccggggugguacuccuucggcuucgagaucaaggacaagaagugcgacguccccugcaucgggaucgagauggugcacgacggcggcaagaccacguggcacagcgccgccaccgccaucuacugccugaugggguccggccagcugcucugggacaccgugaccggggucgacauggcgcuguga

SEQ ID NO: 93182 - RNA, 1401 nt, Artificial Sequence; identical to SEQ ID NO: 92640
  derived and/or modified CDS sequence (opt1) from neuraminidase__InfluenzaB__AGX16504

SEQ ID NO: 93183 - RNA, 1401 nt, Artificial Sequence; identical to SEQ ID NO: 92640
  derived and/or modified CDS sequence (opt1) from neuraminidase__InfluenzaB__AGX16515

SEQ ID NO: 93184 - RNA, 1401 nt, Artificial Sequence
  derived and/or modified CDS sequence (opt1) from neuraminidase__InfluenzaB__AGX16548
augcugcccagcaccauccagacccucacgcuguuccugaccuccggcggggugcuccugagccuguacgucuccgccagccucuccuaccugcuguacagcgacauccuccugaaguucuccccgaccgagaucaccgcccccacgaugccccuggacugcgcgaacgccagcaacgugcaggccgugaaccgcuccgccaccaagggcgucacccuccugcugcccgagccggaguggaccuacccccggcucagcugccccggguccacguuccagaaggcccugcugaucagcccccaccgcuucggcgagaccaaggggaacuccgcgccgcucaucauccgggagcccuucaucgccugcggccccaaggagugcaagcacuucgcccugacccacuacgccgcgcagcccggcggguacuacaacggcacccgcggggaccggaacaagcugcgccaccucaucagcgugaagcugggcaagaucccgacgguggagaacuccaucuuccacauggccgccuggagcggguccgccugccacgacggcaaggaguggaccuacaucggcgucgacgggcccgacaacaacgcccugcucaagaucaaguacggcgaggcguacaccgacaccuaccacagcuacgccaacaacauccugcggacgcaggaguccgccugcaacugcaucgggggcaacugcuaccugaugaucaccgacggcagcgccagcgggaucuccgagugccgcuuccucaagauccgggagggccgcaucaucaaggagaucuuccccaccgggcgggugaagcacaccgaggagugcacgugcggcuucgccagcaacaagaccaucgagugcgcgugccgcgacaacuccuacaccgccaagcggcccuucgugaagcugaacgucgagaccgacacggccgagauccgccugaugugcaccgagaccuaccucgacaccccgcggcccgacgacgggagcaucacgggccccugcgaguccaacggcgacaacgggagcggcgggaucaagggcggguucgugcaccagcgcauggccuccaagaucggccggugguacagccgcaccauguccaagaccaagcggaugggcauggggcuguacgugaaguacgacggcgaccccugggccgacagcgacgcgcuggcccucuccggggucauggugagcauggaggagccgggcugguacuccuucggguucgagaucaaggacaagaagugcgacgugcccugcaucggcaucgagaugguccacgacggcgggaaggagaccuggcacagcgccgccacggccaucuacugccugaugggcuccgggcagcugcucugggacaccgugaccggcguggacauggcgcuguga

SEQ ID NO: 93185 - RNA, 1401 nt, Artificial Sequence
  derived and/or modified CDS sequence (opt1) from neuraminidase__InfluenzaB__AGX16559
augcugcccagcaccauccagacccucacgcuguuccugaccuccggcggggugcuccugagccuguacgucuccgccagccucuccuaccugcuguacagcgacauccuccugaaguucuccccgaccgagaucaucgcccccaccaugccccuggacugcgcgaacgccagcaacgugcaggccgugaaccgcuccgccacgaagggcgucacccuccugcugcccgagccggaguggaccuacccccggcucagcugccccggguccaccuuccagaaggcccugcugaucagcccccaccgcuucggcgagacgaaggggaacuccgcgccgcucaucauccgggagcccuucaucgccugcggccccaaggagugcaagcacuucgcccugacccacuacgccgcgcagcccggcggguacuacaacggcacccgcggggaccggaacaagcugcgccaccucaucagcgugaagcugggcaagaucccgaccguggagaacuccaucuuccacauggccgccuggagcggguccgccugccacgacggcaaggaguggacguacaucggcgucgacgggcccgacaacaacgcccugcucaagaucaaguacggcgaggcguacaccgacaccuaccacagcuacgccaacaacauccugcggacccaggaguccgccugcaacugcaucgggggcaacugcuaccugaugaucacggacggcagcgccagcgggaucuccgagugccgcuuccucaagauccgggagggccgcaucaucaaggagaucuuccccaccgggcgggugaagcacaccgaggagugcacgugcggcuucgccagcaacaagaccaucgagugcgcgugccgcgacaacuccuacaccgccaagcggcccuucgugaagcugaacgucgagaccgacaccgccgagauccgccugaugugcacggagaccuaccucgacaccccgcggcccgacgacgggagcaucaccggccccugcgaguccaacggcgacaaggggagcggcgggaucaagggcggguucgugcaccagcgcauggccuccaagaucggccggugguacagccgcacgauguccaagaccaagcggaugggcauggggcuguacgugaaguacgacggcgaccccugggccgacagcgacgcgcuggcccucuccggggucauggugagcauggaggagccgggcugguacuccuucggguucgagauccgcgacaagaagugcgacgugcccugcaucggcaucgagaugguccacgacggcgggaaggagaccuggcacagcgccgccaccgccaucuacugccugaugggcuccgggcagcugcucugggacacggugaccggcguggacauggcgcuguga

SEQ ID NO: 93186 - RNA, 1401 nt, Artificial Sequence
  derived and/or modified CDS sequence (opt1) from neuraminidase__InfluenzaB__AGX16581
augcugcccagcaccauccagacccucacgcuguuccugaccuccggcggggugcuccugagccuguacgucuccgccagccucuccuaccugcuguacagcgacauccuccugaaguucuccccgaccgagaucaucgcccccaccaugccccuggacugcgcgaacgccagcaacgugcaggccgugaaccgcuccgccacgaagggcgucacccuccugcugcccgagccggaguggaccuacccccggcucagcugccccggguccaccuuccagaaggcccugcugaucagcccccaccgcuucggcgagacgaaggggaacuccgcgccgcucaucauccgggagcccuucaucgccugcggccccaaggagugcaagcacuucgcccugacccacuacgccgcgcagcccggcggguacuacaacggcacccgcggggaccggaacaagcugcgccaccucaucagcgugaagcugggcaagaucccgaccguggagaacuccaucuuccacauggccgccuggagcggguccgccugccacgacggcaaggaguggacguacaucggcgucgacgggcccgacaacaacgcccugcucaagaucaaguacggcgaggcguacaccgacaccuaccacagcuacgccaacaacauccugcggacccaggaguccgccugcaacugcaucgggggcaacugcuaccugaugaucacggacggcagcgccagcgggaucuccgagugccgcuuccucaagauccgggagggccgcaucaucaaggagaucuuccccaccgggcgggugaagcacaccgaggagugcacgugcggcuucgccagcaacaagaccaucgagugcgcgugccgcgacaacuccuacaccgccaagcggcccuucgugaagcugaacgucgagaccgacaccgccgagauccgccugaugugcacggagaccuaccucgacaccccgcggcccgacgacgggagcaucaccggccccugcgaguccaacggcgacaaggggagcggcgggaucaagggcggguucgugcaccagcgcauggccuccaagaucggccggugguacagccgcacgauguccaagaccaagcggaugggcauggggcuguacgugaaguacgacggcgaccccugggccgacagcgacgcgcuggcccucuccggggucauggugagcauggaggagccgggcugguacuccuucggguucgagaucaaggacaagaagugcgacgugcccugcaucggcaucgagaugguccacgacggcgggaaggagaccuggcacagcgccgccaccgccaucuacugccugaugggcuccgggcagcugcucugggacacggugaccggcguggacauggcgcuguga

SEQ ID NO: 93187 - RNA, 1401 nt, Artificial Sequence; identical to SEQ ID NO: 93186
  derived and/or modified CDS sequence (opt1) from neuraminidase__InfluenzaB__AGX16592

SEQ ID NO: 93188 - RNA, 1401 nt, Artificial Sequence; identical to SEQ ID NO: 92640
  derived and/or modified CDS sequence (opt1) from neuraminidase__InfluenzaB__AGX16603

SEQ ID NO: 93189 - RNA, 1401 nt, Artificial Sequence; identical to SEQ ID NO: 92706
  derived and/or modified CDS sequence (opt1) from neuraminidase__InfluenzaB__AGX16614

SEQ ID NO: 93190 - RNA, 1401 nt, Artificial Sequence; identical to SEQ ID NO: 93184
  derived and/or modified CDS sequence (opt1) from neuraminidase__InfluenzaB__AGX16625

SEQ ID NO: 93191 - RNA, 1401 nt, Artificial Sequence
  derived and/or modified CDS sequence (opt1) from neuraminidase__InfluenzaB__AGX16636
augcugcccagcaccauccagacccucacgcuguuccugaccuccggcggggugcuccugagccuguacgucuccgccagccucuccuaccugcuguacagcgacauccuccugaaguucuccccgaccgagaucaucgcccccaccaugccccuggacugcgcgaacgccagcaacgugcaggccgugaaccgcuccgccacgaagggcgucacccuccugcugcccgagccggaguggaccuacccccggcucagcugccccggguccaccuuccagaaggcccugcugaucagcccccaccgcuucggcgagacgaaggggaacuccgcgccgcucaucauccgggagcccuucaucgccugcggccccaaggagugcaagcacuucgcccugacccacuacgccgcgcagcccggcggguacuacaacggcacccgcggggaccggaacaagcugcgccaccucaucagcgugaagcugggcaagaucccgaccguggagaacuccaucuuccacauggccgccuggagcggguccgccugccacgacggcaaggaguggacguacaucggcgucgacgggcccgacaacaacgcccugcucaagaucaaguacggcgaggcguacaccgacaccuaccacagcuacgccaacaacauccugcggacccaggaguccgccugcaacugcaucgggggcaacugcuaccugaugaucacggacggcagcgccagcgggaucuccgagugccgcuuccucaagauccgggagggccgcaucaucaaggagaucuuccccaccgggcgggugaagcacaccgaggagugcacgugcggcuucgccagcaacaagaccaucgagugcgcgugccgcgacaacuccuacaccgccaagcggcccuucgugaagcugaacgucgagaccgacaccgccgagauccgccugaugugcacggagaccuaccucgacaccccgcggcccgacgacgggagcaucaccggccccugcgaguccaacggcgacaaggggagcggcgggaucaagggcggguucgugcaccagcgcauggccuccaagaucggccggugguacagccgcacgauguccaagaccaagcggaugggcauggggcuguacgugaaguacgacggcgaccccugggccgacagcgacgcgcuggcccucuccggggucauggugagcauggaggagccgggcugguacuccuucggguucgagaucaaggacaagaagugcgacgugcccugcaucggcaucgagaugguccacgacggcgggaaggagaccuggcacagcgccgccaccgccaucuacugccugaugggcuccgggcagcugcucuggaacacggugaccggcguggacauggcgcuguga

SEQ ID NO: 93192 - RNA, 1401 nt, Artificial Sequence; identical to SEQ ID NO: 92638
  derived and/or modified CDS sequence (opt1) from neuraminidase__InfluenzaB__AGX16647

SEQ ID NO: 93193 - RNA, 1401 nt, Artificial Sequence; identical to SEQ ID NO: 93186
  derived and/or modified CDS sequence (opt1) from neuraminidase__InfluenzaB__AGX16658

SEQ ID NO: 93194 - RNA, 1401 nt, Artificial Sequence; identical to SEQ ID NO: 92640
  derived and/or modified CDS sequence (opt1) from neuraminidase__InfluenzaB__AGX16669

SEQ ID NO: 93195 - RNA, 1401 nt, Artificial Sequence; identical to SEQ ID NO: 92706
  derived and/or modified CDS sequence (opt1) from neuraminidase__InfluenzaB__AGX16680

SEQ ID NO: 93196 - RNA, 1401 nt, Artificial Sequence; identical to SEQ ID NO: 92640
  derived and/or modified CDS sequence (opt1) from neuraminidase__InfluenzaB__AGX16691

SEQ ID NO: 93197 - RNA, 1401 nt, Artificial Sequence
  derived and/or modified CDS sequence (opt1) from neuraminidase__InfluenzaB__AGX16702
augcugcccagcaccauccagacccucacgcuguuccugaccuccggcggggugcuccugagccuguacgucuccgccagccucuccuaccugcuguacagcgacauccuccugaaguucuccccgaccgagaucaccgcccccacgaugccccuggacugcgcgaacgccagcaacgugcaggccgugaaccgcuccgccaccaagggcgucacccuccugcugcccgagccggaguggaccuacccccggcucagcugccccggguccacguuccagaaggcccugcugaucagcccccaccgcuucggcgagaccaaggggaacuccgcgccgcucaucauccgggagcccuucaucgccugcggccccaaggagugcaagcacuucgcccugacccacuacgccgcgcagcccggcggguacuacaacggcaagcgcggggaccggaacaagcugcgccaccucaucagcgugaagcugggcaagaucccgaccguggagaacuccaucuuccacauggccgccuggagcggguccgccugccacgacggcaaggaguggacguacaucggcgucgacgggcccgacaacaacgcccugcucaagaucaaguacggcgaggcguacaccgacaccuaccacagcuacgccaacaacauccugcggacccaggaguccgccugcaacugcaucgggggcaacugcuaccugaugaucacggacggcagcgccagcgggaucuccgagugccgcuuccucaagauccgggagggccgcaucaucaaggagaucuuccccaccgggcgggugaagcacaccgaggagugcacgugcggcuucgccagcaacaagaccaucgagugcgcgugccgcgacaacuccuacaccgccaagcggcccuucgugaagcugaacgucgagaccgacaccgccgagauccgccugaugugcacggagaccuaccucgacaccccgcggcccgacgacgggagcaucaccggccccugcgaguccaacggcgacaaggggagcggcgggaucaagggcggguucgugcaccagcgcauggccuccaagaucggccggugguacagccgcacgauguccaagaccaagcggaugggcauggggcuguacgugaaguacgacggcgaccccugggccgacagcgacgcgcuggcccucuccggggucauggugagcauggaggagccgggcugguacuccuucggguucgagaucaaggacaagaagugcgacgugcccugcaucggcaucgagaugguccacgacggcgggaaggagaccuggcacagcgccgccaccgccaucuacugccugaugggcuccgggcagcugcucugggacacggugaccggcguggacauggcgcuguga

SEQ ID NO: 93198 - RNA, 1401 nt, Artificial Sequence
  derived and/or modified CDS sequence (opt1) from neuraminidase__InfluenzaB__AGX16713
augcugcccagcaccauccagacccucacgcuguuccugaccuccggcggggugcuccugagccuguacgucuccgccagccucuccuaccugcuguacagcgacauccuccugaaguucuccccgaccgagaucaccgcccccacgaugccccuggacugcgcgaacgccagcaacgugcaggccgugaaccgcuccgccaccaagggcgucacccuccugcugcccgagccggaguggaccuacccccggcucagcugccccggguccaucuuccagaaggcccugcugaucagcccccaccgcuucggcgagacgaaggggaacuccgcgccgcucaucauccgggagcccuucaucgccugcggccccaaggagugcaagcacuucgcccugacccacuacgccgcgcagcccggcggguacuacaacggcacccgcggggaccggaacaagcugcgccaccucaucagcgugaagcugggcaagaucccgaccguggagaacuccaucuuccacauggccgccuggagcggguccgccugccacgacggcaaggaguggacguacaucggcgucgacgggcccgacaacaacgcccugcucaagaucaaguacggcgaggcguacaccgacaccuaccacagcuacgccaacaacauccugcggacccaggaguccgccugcaacugcaucgggggcaacugcuaccugaugaucacggacggcagcgccagcgggaucuccgagugccgcuuccucaagauccgggagggccgcaucaucaaggagaucuuccccaccgggcgggugaagcacaccgaggagugcacgugcggcuucgccagcaacaagaccaucgagugcgcgugccgcgacaacuccuacaccgccaagcggcccuucgugaagcugaacgucgagaccgacaccgccgagauccgccugaugugcacggagaccuaccucgacaccccgcggcccgacgacgggagcaucaccggccccugcgaguccaacggcgacaaggggagcggcgggaucaagggcggguucgugcaccagcgcauggccuccaagaucggccggugguacagccgcacgauguccaagaccaagcggaugggcauggggcuguacgugaaguacgacggcgaccccugggccgacagcgacgcgcuggcccucuccggggucauggugagcauggaggagccgggcugguacuccuucggguucgagauccgcgacaagaagugcgacgugcccugcaucggcaucgagaugguccacgacggcgggaaggagaccuggcacagcgccgccaccgccaucuacugccugaugggcuccgggcagcugcucugggacacggugaccggcguggacauggcgcuguga

SEQ ID NO: 93199 - RNA, 1401 nt, Artificial Sequence; identical to SEQ ID NO: 92640
  derived and/or modified CDS sequence (opt1) from neuraminidase__InfluenzaB__AGX16724

SEQ ID NO: 93200 - RNA, 1401 nt, Artificial Sequence; identical to SEQ ID NO: 93186
  derived and/or modified CDS sequence (opt1) from neuraminidase__InfluenzaB__AGX16735

SEQ ID NO: 93201 - RNA, 1401 nt, Artificial Sequence; identical to SEQ ID NO: 93186
  derived and/or modified CDS sequence (opt1) from neuraminidase__InfluenzaB__AGX16746

SEQ ID NO: 93202 - RNA, 1401 nt, Artificial Sequence; identical to SEQ ID NO: 92640
  derived and/or modified CDS sequence (opt1) from neuraminidase__InfluenzaB__AGX16757

SEQ ID NO: 93203 - RNA, 1401 nt, Artificial Sequence
  derived and/or modified CDS sequence (opt1) from neuraminidase__InfluenzaB__AGX16768
augcugcccagcaccauccagacccucacgcuguuccugaccuccggcggggugcuccugagccuguacgucuccgccagccucuccuaccugcuguacagcgacauccuccugaaguucuccccgaccgagaucaucgcccccaccaugccccuggacugcgcgaacgccagcaacgugcaggccgugaaccgcuccgccacgaagggcgucacccuccugcugcccgagccggaguggaccuacccccggcucagcugccccggguccaccuuccagaaggcccugcugaucagcccccaccgcuucggcgagacgaaggggaacuccgcgccgcucaucauccgggagcccuucaucgccugcggccccaaggagugcaagcacuucgcccugacccacuacgccgcgcagcccggcggguacuacaacggcacccgcggggaccggaacaagcugcgccaccucaucagcgugaagcugggcaagaucccgaccguggagaacuccaucuuccacauggccgccuggagcggguccgccugccacgacggcaaggaguggacguacaucggcgucgacgggcccgacaacaacgcccugcucaagaucaaguacggcgaggcguacaccgacaccuaccacagcuacgccaacaacauccugcggacccaggaguccgccugcaacugcaucgggggcaacugcuaccugaugaucacggacggcagcgccagcgggaucuccgagugccgcuuccucaagauccgggagggccgcaucaucaaggagaucuuccccaccgggcgggugaagcacaccgaggagugcacgugcggcuucgccagcaacaagaccaucgagugcgcgugccgcgacaacuccuacaccgccaagcggcccuucgugaagcugaacgucgagaccgacaccgccgagauccgccugaugugcacggagaccuaccucgacaccccgcggcccgacgacgggagcaucaccggccccugcaaguccaacggcgacaaggggagcggcgggaucaagggcggguucgugcaccagcgcauggccuccaagaucggccggugguacagccgcacgauguccaagaccaagcggaugggcauggggcuguacgugaaguacgacggcgaccccugggccgacagcgacgcgcuggcccucuccggggucauggugagcauggaggagccgggcugguacuccuucggguucgagaucaaggacaagaagugcgacgugcccugcaucggcaucgagaugguccacgacggcgggaaggagaccuggcacagcgccgccaccgccaucuacugccugaugggcuccgggcagcugcucugggacacggugaccggcguggacauggcgcuguga

SEQ ID NO: 93204 - RNA, 1401 nt, Artificial Sequence; identical to SEQ ID NO: 92706
  derived and/or modified CDS sequence (opt1) from neuraminidase__InfluenzaB__AGX16779

SEQ ID NO: 93205 - RNA, 1401 nt, Artificial Sequence
  derived and/or modified CDS sequence (opt1) from neuraminidase__InfluenzaB__AGX16790
augcugcccagcaccauccagacccucacgcuguuccugaccuccggcggggugcuccugagccuguacgucuccgccagccucuccuaccugcuguacagcgacauccuccugaaguucuccccgaccgagaucaccgcccccacgaugccccuggacugcgcgaacgccagcaacgugcaggccgugaaccgcuccgccaccaagggcgucacccuccugcugcccgagccggaguggaccuacccccggcucagcugccccggguccacguuccagaaggcccugcugaucagcccccaccgcuucggcgagaccaaggggaacuccgcgccgcucaucauccgggagcccuucaucgccugcggccccaaggagugcaagcacuucgcccugacccacuacgccgcgcagcccggcggguacuacaacggcacccgcgggggccggaacaagcugcgccaccucaucagcgugaagcuggggaagaucccgacgguggagaacuccaucuuccacauggccgccuggagcggcuccgccugccacgacggcaaggaguggaccuacaucggggucgacggccccgacaacaacgcccugcucaagaucaaguacggggaggcguacaccgacaccuaccacagcuacgccaacaacauccugcggacgcaggaguccgccugcaacugcaucggcggcaacugcuaccugaugaucaccgacgggagcgccagcggcaucuccgagugccgcuuccucaagauccgggaggggcgcaucaucaaggagaucuuccccaccggccgggugaagcacaccgaggagugcacgugcggguucgccagcaacaagaccaucgagugcgcgugccgcgacaacuccuacaccgccaagcggcccuucgugaagcugaacgucgagaccgacacggccgagauccgccugaugugcaccgagaccuaccucgacaccccgcggcccgacgacggcagcaucacgggccccugcgaguccaacggggacaagggcagcgggggcaucaagggcggguucgugcaccagcgcauggccuccaagaucggccggugguacagccgcaccauguccaagaccaagcggauggggaugggccuguacgugaaguacgacggggaccccugggccgacagcgacgcgcuggcccucuccggcgucauggugagcauggaggagccggggugguacuccuucggcuucgagauccgcgacaagaagugcgacgugcccugcaucggcaucgagaugguccacgacgggggcaaggagaccuggcacagcgccgccacggccaucuacugccugaugggguccggccagcugcucugggacaccgugaccggcguggacauggcgcuguga

SEQ ID NO: 93206 - RNA, 1401 nt, Artificial Sequence
  derived and/or modified CDS sequence (opt1) from neuraminidase__InfluenzaB__AGX16801
augcugcccagcaccauccagacccucacgcuguuccugaccuccggcggggugcuccugagccuguacgucuccgccagccucuccuaccugcuguacagcgacauccuccugaaguucuccccgaccgagaucaucgcccccaccaugccccuggacugcgcgaacgccagcaacgugcaggccgugaaccgcuccgccacgaagggcgucacccuccugcugcccgagccggaguggaccuacccccggcucagcugccccggguccaccuuccagaaggcccugcugaucagcccccaccgcuucggcgagacgaaggggaacuccgcgccgcucaucauccgggagcccuucaucgccugcggccccaaggagugcaagcacuucgcccugacccacuacgccgcgcagcccggcggguacuacaacggcacccgcggggaccggaacaagcugcgccaccucaucagcgugaagcugggcaagaucccgaccguggagaacuccaucuuccacauggccgccuggagcggguccgccugccacgacggcaaggaguggacguacaucggcgucgacgggcccgacaacaacgcccugcucaagaucaaguacggcgaggcguacaccgacaccuaccacagcuacgccaacaacauccugcggacccaggaguccgccugcaacugcaucgggggcaacugcuaccugaugaucacggacggcagcgccagcgggaucuccgagugccgcuuccucaagauccgggagggccgcaucaucaaggagaucuuccccaccgggcgggugaagcacaccgaggagugcacgugcggcuucgccagcaacaagaccaucgagugcgcgugccgcgacaacuccuacaccgccaagcggcccuucgugaagcugaacgucgagaccgacaccgccgagauccgccugaugugcacggagaccuaccucgacaccccgcggcccaacgacgggagcaucaccggccccugcgaguccaacggcgacaaggggagcggcgggaucaagggcggguucgugcaccagcgcauggccuccaagaucggccggugguacagccgcacgauguccaagaccaagcggaugggcauggggcuguacgugaaguacgacggcgaccccugggccgacagcgacgcgcuggcccucuccggggucauggugagcauggaggagccgggcugguacuccuucggguucgagaucaaggacaagaagugcgacgugcccugcaucggcaucgagaugguccacgacggcgggaaggagaccuggcacagcgccgccaccgccaucuacugccugaugggcuccgggcagcugcucugggacacggugaccggcguggacauggcgcuguga

SEQ ID NO: 93207 - RNA, 1401 nt, Artificial Sequence; identical to SEQ ID NO: 92640
  derived and/or modified CDS sequence (opt1) from neuraminidase__InfluenzaB__AGX16812

SEQ ID NO: 93208 - RNA, 1401 nt, Artificial Sequence
  derived and/or modified CDS sequence (opt1) from neuraminidase__InfluenzaB__AGX16823
augcugcccagcaccauccagacccucacgcuguuccugaccuccggcggggugcuccugagccuguacgucuccgccagccucuccuaccugcuguacagcgacauccuccugaaguucuccccgaccgagaucaccgcccccacgaugccccuggacugcgcgaacgccagcaacgugcaggccgugaaccgcuccgccaccaagggcgucacccuccugcugcccgagccggaguggaccuacccccggcucagcugccccggguccacguuccagaaggcccugcugaucagcccccaccgcuucggcgagaccaaggggaacuccgcgccgcucaucauccgggagcccuucaucgccugcggccccaaggagugcaagcacuucgcccugacccacuacgccgcgcagcccggcggguacuacaacggcacccgcggggaccggaacaagcugcgccaccucaucagcgugaagcugggcaagaucccgacgguggagaacuccaucuuccacauggccgccuggagcggguccgccugccacgacggcaaggaguggaccuacaucggcgucgacgggcccgacaacaacgcccugcucaagaucaaguacggcgaggcguacaccgacaccuaccacagcuacgccaacaacauccugcggacgcaggaguccgccugcaacugcaucgggggcaacugcuaccugaugaucaccgacggcagcgccagcgggaucuccgagugccgcuuccucaagauccgggagggccgcaucaucaaggagaucuuccccaccgggcgggugaagcacaccgaggagugcacgugcggcuucgccagcaacaagaccaucgagugcgcgugccgcgacaacuccuacaccgccaagcggcccuucgugaagcugaacgucgagaccgacacggccgagauccgccugaugugcaccgagaccuaccucgacaccccgcggcccgccgacgggagcaucacgggccccugcgaguccaacggcgacaaggggagcggcgggaucaagggcggguucgugcaccagcgcauggccuccaagaucggccggugguacagccgcaccauguccaagaccaagcggaugggcauggggcuguacgugaaguacgacggcgaccccugggcggacagcgacgcccuggcccucuccggggucauggugagcauggaggagccgggcugguacuccuucggguucgagaucaaggacaagaagugcgacgugcccugcaucggcaucgagaugguccacgacggcgggaaggagaccuggcacagcgccgccacggcgaucuacugccugaugggcuccgggcagcugcucugggacaccgugaccggcguggacauggcccuguga

SEQ ID NO: 93209 - RNA, 1401 nt, Artificial Sequence; identical to SEQ ID NO: 92640
  derived and/or modified CDS sequence (opt1) from neuraminidase__InfluenzaB__AGX16834

SEQ ID NO: 93210 - RNA, 1401 nt, Artificial Sequence
  derived and/or modified CDS sequence (opt1) from neuraminidase__InfluenzaB__AGX16845
augcugcccagcaccauccagacccucacgcuguuccugaccuccggcggggugcuccugagccuguacgucuccgccagccucuccuaccugcuguacagcgacauccuccugaaguucuccccgaccgagaucaccacgcccaccaugccccuggacugcgccaacgcgagcaacgugcaggccgugaaccgcuccgccaccaagggcgucacccuccugcugcccgagccggaguggacguacccccggcucagcugccccggguccaccuuccagaaggcccugcuggugagcccccaccgcuucggcgagaccaaggggaacuccgccccgcucaucauccgggagcccuucaucgcgugcggccccaaggagugcaagcacuucgcccugacccacuacgccgcccagcccggcggguacuacaacggcacgcgcggggaccggaacaagcugcgccaccucaucagcgugaagcugggcaagaucccgaccgucgagaacuccaucuuccacauggcggccuggagcggguccgccugccacgacggcaaggaguggaccuacaucggcguggacgggcccgacaacaacgcccugcucaagaucaaguacggcgaggccuacaccgacacguaccacagcuacgcgaacaacauccugcggacccaggaguccgccugcaacugcaucgggggcaacugcuaccugaugaucaccgacggcagcgccagcgggaucuccgagugccgcuuccucaagauccgggagggccgcaucaucaaggagaucuuccccaccgggcgggugaagcacacggaggagugcacgugcggcuucgccagcaacaagaccaucgagugcgccugccgcgacaacuccuacaccgcgaagcggcccuucgucaagcugaacguggagaccgacaccgccgagauccgccugaugugcaccgagaccuaccucgacacgccgcggcccgacgacgggagcaucaccggccccugcgaguccaacggcgacaaggggagcggcgggaucaagggcggguucgugcaccagcgcauggccuccaagaucggccggugguacagccgcaccauguccaagaccaagcggaugggcauggggcuguacgucaaguacgacggcgaccccugggccgacagcgacgcccuggcgcucuccggggugauggugagcauggaggagccgggcugguacuccuucggguucgagaucaaggacaagaagugcgacguccccugcaucggcaucgagauggugcacgacggcgggaaggagacguggcacagcgccgccaccgccaucuacugccugaugggcuccgggcagcugcucugggacaccgugaccggcgucgacauggcccuguga

SEQ ID NO: 93211 - RNA, 1401 nt, Artificial Sequence
  derived and/or modified CDS sequence (opt1) from neuraminidase__InfluenzaB__AGX16856
augcugcccagcaccauccagacccucacgcuguuccugaccuccggcggggugcuccugagccuguacgucuccgccagccucuccuaccugcuguacagcgacauccuccugaaguucuccccgaccgagaucaccgcccccacggugccccuggacugcgcgaacgccagcaacgugcaggccgucaaccgcuccgccaccaagggcgugacccuccugcugcccgagccggaguggaccuacccccggcucagcugccccggguccacguuccagaaggcccugcugaucagcccccaccgcuucggcgagaccaaggggaacuccgcgccgcucaucauccgggagcccuucaucgccugcggccccaaggagugcaagcacuucgcccugacccacuacgccgcgcagcccggcggguacuacagcggcacccgcggggaccggaacaagcugcgccaccucaucuccgugaagcugggcaagaucccgacggucgagaacagcaucuuccacauggccgccugguccgggagcgccugccacgacggcaaggaguggaccuacaucggcguggacgggcccgacaacaacgcccugcucaagaucaaguacggcgaggcguacaccgacaccuaccacuccuacgccaacaacauccugcggacgcaggagagcgccugcaacugcaucgggggcaacugcuaccugaugaucaccgacggcagcgccuccgggaucagcgagugccgcuuccucaagauccgggagggccgcaucaucaaggagaucuuccccaccgggcgggugaagcacaccgaggagugcacgugcggcuucgccuccaacaagaccaucgagugcgcgugccgcgacaacagcuacaccgccaagcggcccuucgucaagcugaacguggagaccgacacggccgagauccgccugaugugcaccgagaccuaccucgacaccccgcggcccgacgacggguccaucacgggccccugcgagagcaacggcgacaagggguccggcgggaucaagggcggguucgugcaccagcgcauggccagcaagaucggccggugguacucccgcaccaugagcaagaacaagcggaugggcauggggcuguacgucaaguacgacggcgaccccugggccgacuccgacgcgcuggcccucagcggggugaugguguccauggaggagccgggcugguacagcuucggguucgagaucaaggacaagaagugcgacguccccugcaucggcaucgagauggugcacgacggcgggaaggagaccuggcacuccgccgccaccgccaucuacugccugaugggcagcgggcagcugcucugggacacggugaccggcgucgacauggcgcuguga

SEQ ID NO: 93212 - RNA, 1401 nt, Artificial Sequence; identical to SEQ ID NO: 92640
  derived and/or modified CDS sequence (opt1) from neuraminidase__InfluenzaB__AGX16867

SEQ ID NO: 93213 - RNA, 1401 nt, Artificial Sequence
  derived and/or modified CDS sequence (opt1) from neuraminidase__InfluenzaB__AGX16878
augcugcccagcaccauccagacccucacgcuguuccugaccuccggcggggugcuccugagccuguacgucuccgccagccucuccuaccugcuguacagcgacauccuccugaaguucuccccgaccgagcugaccgcccccacgaugccccucgacugcgcgaacgccagcaacgugcaggccgugaaccgcuccgccaccaagggcgucacccugcugcuccccgagccggaguggaccuacccccggcugagcugccccggguccacguuccagaaggcccugcucaucagcccccaccgcuucggcgagaccaaggggaacuccgcgccgcugaucauccgggagcccuucaucgccugcggccccaaggagugcaagcacuucgcccugacccacuacgccgcgcagcccggcggguacuacaacggcaagcgcggggaccggaacaagcuccgccaccugaucagcgugaagcugggcaagaucccgaccguggagaacuccaucuuccacauggccgccuggagcggguccgccugccacgacggcaaggaguggacguacaucggcgucgacgggcccgacaacaacgcccuccugaagaucaaguacggcgaggcguacaccgacaccuaccacagcuacgccaacaacauccugcggacccaggaguccgccugcaacugcaucgggggcaacugcuaccucaugaucacggacggcagcgccagcgggaucuccgagugccgcuuccugaagauccgggagggccgcaucaucaaggagaucuuccccaccgggcgggugaagcacaccgaggagugcacgugcggcuucgccagcaacaagaccaucgagugcgcgugccgcgacaacuccuacaccgccaagcggcccuucgugaagcugaacgucgagaccgacaccgccgagauccgccucaugugcacggagaccuaccuggacaccccgcggcccgacgacgggagcaucaccggccccugcgaguccaacggcgacaacgggagcggcgggaucaagggcggguucgugcaccagcgcauggccuccaagaucggccggugguacagccgcacgauguccaagaccaagcggaugggcauggggcuguacgugaaguacgacggcgaccccugggccgacagcgacgcgcucgcccuguccggggucauggugagcauggaggagccgggcugguacuccuucggguucgagaucaaggacaagaagugcgacgugcccugcaucggcaucgagaugguccacgacggcgggaaggagaccuggcacagcgccgccaccgccaucuacugccugaugggcuccgggcagcuccugugggacacggugaccggcguggacauggcgcuguga

SEQ ID NO: 93214 - RNA, 1401 nt, Artificial Sequence; identical to SEQ ID NO: 93186
  derived and/or modified CDS sequence (opt1) from neuraminidase__InfluenzaB__AGX16889

SEQ ID NO: 93215 - RNA, 1401 nt, Artificial Sequence
  derived and/or modified CDS sequence (opt1) from neuraminidase__InfluenzaB__AGX16900
augcugcccagcaccauccagacccucacgcuguuccugaccaccggcggggugcuccugucccuguacgucagcgccucccucagcuaccugcuguacuccgacauccuccugaaguucagcccgaccgagaucaucgcccccacgaugccccuggacugcgcgaacgccuccaacgugcaggccgugaaccgcagcgccaccaagggcgucacccuccugcugcccgagccggaguggaccuacccccggcucuccugccccgggagcacguuccagaaggcccugcugaucagcccccaccgcuucggcgagaccaaggggaacuccgcgccgcucaucauccgggagcccuucaucgccugcggccccaaggagugcaagcacuucgcccugacccacuacgccgcgcagcccggcggguacuacaacggcacccgcggggaccggaacaagcugcgccaccucaucuccgugaagcugggcaagaucccgacgguggagaacagcaucuuccacauggccgccugguccgggagcgccugccacgacggcaaggaguggaccuacaucggcgucgacgggcccgacaacaacgcccugcucaagaucaaguacggcgaggcguacaccgacaccuaccacuccuacgccaacaacauccugcggacgcaggagagcgccugcaacugcaucgggggcaacugcuaccugaugaucaccgacggcuccgccagcgggaucagcgagugccgcuuccucaagauccgggagggccgcaucaucaaggagaucuuccccaccgggcgggugaagcacaccgaggagugcacgugcggcuucgccuccaacaagaccaucgagugcgcgugccgcgacaacagcuacaccgccaagcggcccuucgugaagcugaacgucgagaccgacacggccgagauccgccugaugugcaccgagaccuaccucgacaccccgcggcccgacgacggguccaucacgggccccugcgagagcaacggcgacaagggguccggcgggaucaagggcggguucgugcaccagcgcauggccagcaagaucggccggugguacucccgcaccaugagcaagaccaagcggaugggcauggggcuguacgugaaguacgacggcgaccccugggccgacuccgacgcgcuggcccucagcggggucaugguguccauggaggagccgggcugguacagcuucggguucgagaucaaggacaagaagugcgacgugcccugcaucggcaucgagaugguccacgacggcgggaaggagaccuggcacuccgccgccacggccaucuacugccugaugggcagcgggcagcugcucugggacaccgugaccggcguggacauggcgcuguga

SEQ ID NO: 93216 - RNA, 1401 nt, Artificial Sequence
  derived and/or modified CDS sequence (opt1) from neuraminidase__InfluenzaB__AGX16911
augcugcccagcaccauccagacccucacgcuguuccugaccuccggcggggugcuccugagccuguacgucuccgcccuccugagcuaccugcucuacuccgacauccugcugaaguucagcccgaccgagaucaccgcccccacgaugccccucgacugcgcgaacgccuccaacgugcaggccgugaaccgcagcgccaccaagggcgucacccugcugcuccccgagccggaguggaccuacccccggcuguccugccccgggagcacguuccagaaggcccugcucaucagcccccaccgcuucggcgagaccaaggggaacuccgcgccgcugaucauccgggagcccuucaucgccugcggccccaaggagugcaagcacuucgcccugacccacuacgccgcgcagcccggcggguacuacaacggcacccgcggggaccggaacaagcuccgccaccugaucuccgugaagcugggcaagaucccgacgguggagaacagcaucuuccacauggccgccugguccgggagcgccugccacgacggcaaggaguggaccuacaucggcgucgacgggcccgacaacaacgcccuccugaagaucaaguacggcgaggcguacaccgacaccuaccacuccuacgccaacaacauccugcggacgcaggagagcgccugcaacugcaucgggggcaacugcuaccucaugaucaccgacggcuccgccagcgggaucagcgagugccgcuuccugaagauccgggagggccgcaucaucaaggagaucuuccccaccgggcgggugaagcacaccgaggagugcacgugcggcuucgccuccaacaagaccaucgagugcgcgugccgcgacaacagcuacaccgccaagcggcccuucgugaagcugaacgucgagaccgacacggccgagauccgccucaugugcaccgagaccuaccuggacaccccgcggcccgacgacggguccaucacgggccccugcgagagcaacggcgacaagggguccggcgggaucaagggcggguucgugcaccagcgcauggccagcaagaucggccggugguacucccgcaccaugagcaagaccaagcggaugggcauggggcuguacgugaaguacgacggcgaccccugggccgacuccgacgcgcucgcccugagcggggucaugguguccauggaggagccgggcugguacagcuucggguucgagaucaaggacaagaagugcgacgugcccugcaucggcaucgagaugguccacgacggcgggaaggagaccuggcacuccgccgccacggccaucuacugccugaugggcagcgggcagcuccugugggacaccgugaccggcguggacauggcgcuguga

SEQ ID NO: 93217 - RNA, 1401 nt, Artificial Sequence
  derived and/or modified CDS sequence (opt1) from neuraminidase__InfluenzaB__AGX16922
augcugcccagcaccauccagacccucacgcuguuccugaccuccggcggggugcuccugagccuguacgucuccgccagccucuccuaccugcuguacagcgacauccuccugaaguucuccccgaccgagaucaccgcccccacgaugccccuggacugcgcgaacgccagcaacgugcaggccgugaaccgcuccgccaccaagggcgucaccuuccuccugcccgagccggaguggaccuacccccggcugagcugccccggguccacguuccagaaggcccuccugaucagcccccaccgcuucggcgagaccaaggggaacuccgcgccgcugaucauccgggagcccuucaucgccugcggccccaaggagugcaagcacuucgcccucacccacuacgccgcgcagcccggcggguacuacaacggcacccgcggggaccggaacaagcugcgccaccugaucagcgugaagcucggcaagaucccgacgguggagaacuccaucuuccacauggccgccuggagcggguccgccugccacgacggcaaggaguggaccuacaucggcgucgacgggcccgacaacaacgcccugcugaagaucaaguacggcgaggcguacaccgacaccuaccacagcuacgccaacaacauccuccggacgcaggaguccgccugcaacugcaucgggggcaacugcuaccugaugaucaccgacggcagcgccagcgggaucuccgagugccgcuuccugaagauccgggagggccgcaucaucaaggagaucuuccccaccgggcgggugaagcacaccgaggagugcacgugcggcuucgccagcaacaagaccaucgagugcgcgugccgcgacaacuccuacaccgccaagcggcccuucgugaagcucaacgucgagaccgacacggccgagauccgccugaugugcaccgagaccuaccuggacaccccgcggcccgacgacgggagcaucacgggccccugcgaguccaacggcgacaaggggagcggcgggaucaagggcggguucgugcaccagcgcauggccuccaagaucggccggugguacagccgcaccauguccaagaccaagcggaugggcauggggcucuacgugaaguacgacggcgaccccugggccgacagcgacgcgcuggcccuguccggggucauggugagcauggaggagccgggcugguacuccuucggguucgagaucaaggacaagaagugcgacgugcccugcaucggcaucgagaugguccacgacggcgggaaggagaccuggcacagcgccgccacggccaucuacugccucaugggcuccgggcagcugcugugggacaccgugaccggcguggacauggcgcucuga

SEQ ID NO: 93218 - RNA, 1401 nt, Artificial Sequence
  derived and/or modified CDS sequence (opt1) from neuraminidase__InfluenzaB__AGX16933
augcugcccagcaccauccagacccucacgcuguuccugaccuccggcggggugcuccugagccuguacgucuccgccagccucuccuaccugcuguacagcgacauccuccugaaguucuccccgaccgagaucaacgcccccaccaugccccuggacugcgcgaacgccagcaacgugcaggccgugaaccgcuccgccacgaagggcgucacccuccugcugcccgagccggaguggaccuacccccggcucagcugccccggguccaccuuccagaaggcccugcugaucagcccccaccgcuucggcgagacgaaggggaacuccgcgccgcucaucauccgggagcccuucaucgccugcggccccaaggagugcaagcacuucgcccugacccacuacgccgcgcagcccggcggguacuacaacggcacccgcggggaccggaacaagcugcgccaccucaucagcgugaagcugggcaagaucccgaccguggagaacuccaucuuccacauggccgccuggagcggguccgccugccacgacggcaaggaguggacguacaucggcgucgacgggcccgacaacaacgcccugcucaagaucaaguacggcgaggcguacaccgacaccuaccacagcuacgccaacaacauccugcggacccaggaguccgccugcaacugcaucgggggcaacugcuaccugaugaucacggacggcagcgccagcgggaucuccgagugccgcuuccucaagauccgggagggccgcaucaucaaggagaucuuccccaccgggcgggugaagcacaccgaggagugcacgugcggcuucgccagcaacaagaccaucgagugcgcgugccgcgacaacuccuacaccgccaagcggcccuucgugaagcugaacgucgagaccgacaccgccgagauccgccugaugugcacggagaccuaccucgacaccccgcggcccgacgacgggagcaucaccggccccugcgaguccaacggcgacaaggggagcggcgggaucaagggcggguucgugcaccagcgcauggccuccaagaucggccggugguacagccgcacgauguccaagaccaagcggaugggcauggggcuguacgugaaguacgacggcgaccccugggccgacagcgacgcgcuggcccucuccggggucauggugagcauggaggagccgggcugguacuccuucggguucgagaucaaggacaagaagugcgacgugcccugcaucggcaucgagaugguccacgacggcgggaaggagaccuggcacagcgccgccaccgccaucuacugccugaugggcuccgggcagcugcuccuggacacggugaccggcguggacauggcgcuguga

SEQ ID NO: 93219 - RNA, 1401 nt, Artificial Sequence
  derived and/or modified CDS sequence (opt1) from neuraminidase__InfluenzaB__AGX16944
augcugcccagcaccauccagacccucacgcuguuccugaccuccggcggggugcuccugagccuguacgucuccgccagccucuccuaccugcuguacagcgacauccuccugaaguucuccccgaccgagaucaccgcccccacgaugccccuggacugcgcgaacgccagcaacgugcaggccgugaaccgcuccgccaccaagggcgucacccuccugcugcccgagccggaguggaccuacccccggcucagcugccccggguccacguuccagaaggcccugcugaucagcccccaccgcuucggcgagaccaaggggaacuccgcgccgcucaucauccgggagcccuucaucgccugcggccccaaggagugcaagcacuucgcccugacccacuacgccgcgcagcccggcggguacuacagcggcacccgcggggaccggaacaagcugcgccaccucaucuccgugaagcugggcaagaucccgacgguggagaacagcaucuuccacauggccgccugguccgggagcgccugccacgacggcaaggaguggaccuacaucggcgucgacgggcccgacaacaacgcccugcucaagaucaaguacggcgaggcguacaccgacaccuaccacuccuacgccaacaacauccugcggacgcaggagagcgccugcaacugcaucgggggcaacugcuaccugaugaucaccgacggcagcgccuccgggaucagcgagugccgcuuccucaagauccgggagggccgcaucaucaaggagaucuuccccaccgggcgggugaagcacaccgaggagugcacgugcggcuucgccuccaacaagaccaucgagugcgcgugccgcgacaacagcuacaccgccaagcggcccuucgugaagcugaacgucgagaccgacacggccgagauccgccugaugugcaccgagaccuaccucgacaccccgcggcccgacgacggguccaucacgggccccugcgagagcaacggcgacaagggguccggcgggaucaagggcggguucgugcaccagcgcauggccagcaagaucggccggugguacucccgcaccaugagcaagaacaagcggaugggcauggggcuguacgugaaguacgacggcgaccccugggccgacuccgacgcgcuggcccucagcggggucaugguguccauggaggagccgggcugguacagcuucggguucgagaucaaggacaagaagugcgacgugcccugcaucggcaucgagaugguccacgacggcgggaaggagaccuggcacuccgccgccaccgccaucuacugccugaugggcagcgggcagcugcucugggacacggugaccggcguggacauggcgcuguga

SEQ ID NO: 93220 - RNA, 1401 nt, Artificial Sequence; identical to SEQ ID NO: 92640
  derived and/or modified CDS sequence (opt1) from neuraminidase__InfluenzaB__AGX16955

SEQ ID NO: 93221 - RNA, 1401 nt, Artificial Sequence; identical to SEQ ID NO: 92638
  derived and/or modified CDS sequence (opt1) from neuraminidase__InfluenzaB__AGX16966

SEQ ID NO: 93222 - RNA, 1401 nt, Artificial Sequence; identical to SEQ ID NO: 92640
  derived and/or modified CDS sequence (opt1) from neuraminidase__InfluenzaB__AGX16977

SEQ ID NO: 93223 - RNA, 1401 nt, Artificial Sequence; identical to SEQ ID NO: 92640
  derived and/or modified CDS sequence (opt1) from neuraminidase__InfluenzaB__AGX16988

SEQ ID NO: 93224 - RNA, 1401 nt, Artificial Sequence; identical to SEQ ID NO: 93184
  derived and/or modified CDS sequence (opt1) from neuraminidase__InfluenzaB__AGX16999

SEQ ID NO: 93225 - RNA, 1401 nt, Artificial Sequence; identical to SEQ ID NO: 92640
  derived and/or modified CDS sequence (opt1) from neuraminidase__InfluenzaB__AGX17010

SEQ ID NO: 93226 - RNA, 1401 nt, Artificial Sequence; identical to SEQ ID NO: 93186
  derived and/or modified CDS sequence (opt1) from neuraminidase__InfluenzaB__AGX17021

SEQ ID NO: 93227 - RNA, 1401 nt, Artificial Sequence
  derived and/or modified CDS sequence (opt1) from neuraminidase__InfluenzaB__AGX17032
augcugcccagcaccauccagacccucacgcuguuccugaccuccggcggggugcuccugagccuguacgucuccgccagccucuccuaccugcuguacagcgacauccuccugaaguucuccccgaccgagaucaccgcccccacgaugccccuggacugcgcgaacgccagcgacgugcaggccgugaaccgcuccgccaccaagggcgucacccuccugcugcccgagccggaguggaccuacccccggcucagcugccccggguccacguuccagaaggcccugcugaucagcccccaccgcuucggcgagaccaaggggaacuccgcgccgcucaucauccgggagcccuucaucgccugcggccccaaggagugcaagcacuucgcccugacccacuacgccgcgcagcccggcggguacuacaaccgcacccggggcgaccgcaacaagcugcggcaccucaucagcgugaagcuggggaagaucccgacgguggagaacuccaucuuccacauggccgccuggagcggcuccgccugccacgacgggaaggaguggaccuacaucggcgucgacggccccgacaacaacgcccugcucaagaucaaguacggggaggcguacaccgacaccuaccacagcuacgccaacaacauccugcgcacgcaggaguccgccugcaacugcaucggcgggaacugcuaccugaugaucaccgacggcagcgccagcggcaucuccgagugccgguuccucaagauccgcgaggggcggaucaucaaggagaucuuccccaccggccgcgugaagcacaccgaggagugcacgugcggguucgccagcaacaagaccaucgagugcgcgugccgggacaacuccuacaccgccaagcgccccuucgugaagcugaacgucgagaccgacacggccgagauccggcugaugugcaccgagaccuaccucgacaccccgcgccccgacgacggcagcaucacggggcccugcgaguccaacggcgacaagggcagcgggggcaucaagggcggguucgugcaccagcggauggccuccaagaucgggcgcugguacagccggaccauguccaagaccaagcgcaugggcaugggccuguacgugaaguacgacggggaccccugggccgacagcgacgcgcuggcccucuccggcgucauggugagcauggaggagccggggugguacuccuucggcuucgagaucaaggacaagaagugcgacgugcccugcaucgggaucgagaugguccacgacggcggcaaggagaccuggcacagcgccgccacggccaucuacugccugaugggguccggccagcugcucugggacaccgugaccgggguggacauggcgcuguga

SEQ ID NO: 93228 - RNA, 1401 nt, Artificial Sequence; identical to SEQ ID NO: 92638
  derived and/or modified CDS sequence (opt1) from neuraminidase__InfluenzaB__AGX17043

SEQ ID NO: 93229 - RNA, 1401 nt, Artificial Sequence
  derived and/or modified CDS sequence (opt1) from neuraminidase__InfluenzaB__AGX17054
augcugcccagcaccauccagacccucacgcuguuccugaccuccggcggggugcuccugagccuguacgucuccgccagccucuccuaccugcuguacagcgacauccuccugaaguucuccccgaccgagaucaccgcccccacgaugccccuggacugcgcgaacgccagcaacgugcaggccgugaaccgcuccgccaccaagggcgucacccuccugcugcccgagccggaguggaccuacccccggcucagcugccccggguccacguuccagaaggcccugcugaucagcccccaccgcuucggcgagaccaaggggaacuccgcgccgcucaucauccgggagcccuucaucgccugcggccccaaggagugcaagcacuucgcccugacccacuacgccgcgcagcccggcggguacuacaacggcacccgcggggaccggaacaagcugcgccaccucaucagcgugaagcugggcaagaucccgacgguggagaacuccaucuuccacauggccgccuggagcggguccgccugccacgacggcaaggaguggaccuacaucggcgucgacgggcccgacaacaacgcccugcucaagaucaaguacggcgaggcguacaccgacaccuaccacagcuacgccaacaacauccugcggacgcaggaguccgccugcaacugcaucgggggcaacugcuaccugaugaucaccgacggcagcgccagcgggaucuccgagugccgcuuccucaagauccgggagggccgcaucaucaaggagaucuuccccaccgggcgggugaagcacaccgaggagugcacgugcggcuucgccagcaacaagaccaucgagugcgcgugccgcgacaacuccuacaccgccaagcggcccuucgugaagcugaacgucgagaccgacacggccgagauccgccugaugugcaccgagaccuaccucgacaccccgcggcccgacgacgggagcaucacgggccccugcgaguccaacggcgacaacgggaacggcgggaucaagggcggguucgugcaccagcgcauggccagcaagaucggccggugguacucccgcaccaugagcaagaccaagcggaugggcauggggcuguacgugaaguacgacggcgaccccugggccgacuccgacgcgcuggcccucagcggggucaugguguccauggaggagccgggcugguacagcuucggguucgagaucaaggacaagaagugcgacgugcccugcaucggcaucgagaugguccacgacggcgggaaggagaccuggcacuccgccgccacggccaucuacugccugaugggcagcgggcagcugcucugggacaccgugaccggcguggacauggcgcuguga

SEQ ID NO: 93230 - RNA, 1401 nt, Artificial Sequence
  derived and/or modified CDS sequence (opt1) from neuraminidase__InfluenzaB__AGX17065
augcugcccagcaccauccagacccucacgcuguuccugaccuccggcggggugcuccugagccuguacgucuccgcccuccugagcuaccugcucuacuccgacauccugcugaaguucagcccgaccaagaucaucgcccccaccacgucccucgacagcgcgaacgccuccaacuuccaggccgugaaccacagcgccaccaaggagaugaccuuccugcugcccgagcccgaguggaccuacccgcgccucuccugccagggcagcacguuccagaaggcccugcugaucagcccccaccgguucggggaggcgaagggcaacuccgcgccccucaucauccgcgagcccuucaucgccugcgggccgaaggagugcaagcacuucgcccugacccacuacgccgcccagcccggcggcuacuacaacgggacccgggaggaccgcaacaagcugcggcaccucaucuccgugaaccugggcaagauccccaccgucgagaacagcaucuuccacauggccgccugguccgggagcgccugccacgacggccgcgaguggacguacaucgggguggacggccccgacuccaacgcgcugaucaagaucaaguacggcgaggccuacaccgacaccuaccacagcuacgccaacaacauccuccggacccaggagagcgccugcaacugcaucgggggcgacugcuaccugaugaucacggacggguccgccagcggcaucuccaagugccgcuuccugaagauccgggagggccgcaucaucaaggagaucuucccgaccgggcggguggagcacaccgaggagugcacgugcggcuucgcgagcaacaagaccaucgagugcgccugccgcgacaacuccuacaccgccaagcggcccuucgucaagcucaacguggagaccgacaccgccgagauccgccugaugugcacggagaccuaccuggacacgccccggcccgacgacgggagcaucaccggcccgugcgaguccaacggggacaagggcagcggcgggaucaagggcggguucgugcaccagcgcauggccuccaagaucggccggugguacagccgcaccaucuccaagaccaagcggauggggauggagcucuacgucaaguacgacggcgaccccuggaccgacagcgacgcgcuggcccccuccggcgugauggugagcaucgaggagcccgggugguacuccuucggcuucgagaucaaggacaagaagugcgacgucccgugcaucgggaucgagauggugcacgacggcgggaagaccacguggcacagcgccgccaccgccaucuacugccugaugggcuccggccagcuccugugggacaccgugaccggggucgacauggcgcuguga

SEQ ID NO: 93231 - RNA, 1401 nt, Artificial Sequence
  derived and/or modified CDS sequence (opt1) from neuraminidase__InfluenzaB__AGX17076
augcugcccagcaccauccagacccucacgcuguuccugaccuccggcggggugcuccugagccuguacgucuccgccagccucuccuaccugcuguacagcgacauccuccugaaguucuccccgaccgagaucaccgcccccacgaugccccuggacugcgcgaacgccagcaacgugcaggccgugaaccgcuccgccaccaagggcgucacccuccugcugcccgagccggaguggaccuacccccggcucagcugccccggguccacguuccagaaggcccugcugaucagcccccaccgcuucggcgagaccaaggggaacuccgcgccgcucaucauccgggagcccuucaucgccugcggccccaaggagugcaagcacuucgcccugacccacuacgccgcgcagcccggcggguacuacaacggcacccgcggggaccggaacaagcugcgccaccucaucagcgugaagcugggcaagaucccgacgguggagaacuccaucuuccacauggccgccuggagcggguccgccugccacgacggcaaggaguggaccuacaucggcgucgacgggcccgacaacaacgcccugcucaagaucaaguacggcgaggcguacaccgacaccuaccacagcuacgccaacaacauccugcggacgcaggaguccgccugcaacugcaucgggggcaacugcuaccugaugaucaccgacggcagcgccagcgggaucuccgagugccgcuuccucaagauccgggagggccgcaucaucaaggagaucuuccccaccgggcgggugaagcacaccgaggagugcacgugcggcuucgccagcaacaagaccaucgagugcgcgugccgcgacaacuccuacaccgccaagcggcccuucgugaagcugaacgucgagaccgacacggccgagauccgccugaugugcaccgagaccuaccucgacaccccgcggcccgacgacgggagcaucacgggccccugcgaguccaacggcgacaaggggagcggcgggaucaagggcggguucgugcaccagcgcauggccuccaagaucggccggugguacagccgcaccauguccaagaccaagcggaugggcauggggcuguacgugaaguacgacggcgaccccugggccgacagcgacgcgcuggcccucuccggggucauggugagcauggaggagccgggcugguacuccuucggguucgagauccgcgacaagaagugcgacgugcccugcaucggcaucgagaucguccacgacggcgggaaggagaccuggcacagcgccgccacggccaucuacugccugaugggcuccgggcagcugcucugggacaccgugaccggcguggacauggcgcuguga

SEQ ID NO: 93232 - RNA, 1401 nt, Artificial Sequence; identical to SEQ ID NO: 93186
  derived and/or modified CDS sequence (opt1) from neuraminidase__InfluenzaB__AGX17087

SEQ ID NO: 93233 - RNA, 1401 nt, Artificial Sequence; identical to SEQ ID NO: 93186
  derived and/or modified CDS sequence (opt1) from neuraminidase__InfluenzaB__AGX17098

SEQ ID NO: 93234 - RNA, 1401 nt, Artificial Sequence; identical to SEQ ID NO: 93186
  derived and/or modified CDS sequence (opt1) from neuraminidase__InfluenzaB__AGX17109

SEQ ID NO: 93235 - RNA, 1401 nt, Artificial Sequence; identical to SEQ ID NO: 93186
  derived and/or modified CDS sequence (opt1) from neuraminidase__InfluenzaB__AGX17120

SEQ ID NO: 93236 - RNA, 1401 nt, Artificial Sequence; identical to SEQ ID NO: 92638
  derived and/or modified CDS sequence (opt1) from neuraminidase__InfluenzaB__AGX17131

SEQ ID NO: 93237 - RNA, 1401 nt, Artificial Sequence; identical to SEQ ID NO: 92640
  derived and/or modified CDS sequence (opt1) from neuraminidase__InfluenzaB__AGX17142

SEQ ID NO: 93238 - RNA, 1401 nt, Artificial Sequence
  derived and/or modified CDS sequence (opt1) from neuraminidase__InfluenzaB__AGX17153
augcugcccagcaccauccagacccucacgcuguuccugaccuccggcggggugcuccugagccuguacgucuccgccagccucuccuaccugcuguacagcgacauccuccugaaguucuccccgaccgagaucaccgcccccacgaugccccuggacugcgcgaacgccagcaacgugcaggccgugaaccgcuccgccaccaagggcgucacccuccugcugcccgagccggaguggaccuacccccggcucagcugccccggguccacguuccagaaggcccugcugaucagcccccaccgcuucggcgagaccaaggggaacuccgcgccgcucaucauccgggagcccuucaucgccugcggccccaaggagugcaagcacuucgcccugacccacuacgccgcgcagcccggcggguacuacaacggcacccgcggggaccggaacaagcugcgccaccucaucagcgugaagcugggcaagaucccgacgguggagaacuccaucuuccacauggccgccuggagcggguccgccugccacgacggcaaggaguggaccuacaucggcgucgacgggcccgacaacaacgcccugcucaagaucaaguacggcgaggcguacaccgacaccuaccacagcuacgccaacaacauccugcggacgcaggaguccgccugcaacugcaucgggggcaacugcuaccugaugaucaccgacggcagcgccagcgggaucuccgagugccgcuuccucaagauccgggagggccgcaucaucaaggagaucuuccccaccgggcgggugaagcacaccgaggagugcacgugcggcuucgccagcaacaagaccaucgagugcgcgugccgcgacaacuccuacaccgccaagcggcccuucgugaagcugaacgucgagaccgacacggccgagauccgccugaugugcaccgagaccuaccucgacaccccgcggcccgacgacgggagcaucaucggccccugcgaguccaacggcgacaaggggagcggcgggaucaagggcggguucgugcaccagcgcauggccuccaagaucggccggugguacagccgcacgauguccaagaccaagcggaugggcauggggcuguacgugaaguacgacggcgaccccugggccgacagcgacgcgcuggcccucuccggggucauggugagcauggaggagccgggcugguacuccuucggguucgagaucaaggacaagaagugcgacgugcccugcaucggcaucgagaugguccacgacggcgggaaggagaccuggcacagcgccgccaccgccaucuacugccugaugggcuccgggcagcugcucugggacacggugaccggcguggacauggcgcuguga

SEQ ID NO: 93239 - RNA, 1401 nt, Artificial Sequence; identical to SEQ ID NO: 93186
  derived and/or modified CDS sequence (opt1) from neuraminidase__InfluenzaB__AGX17164

SEQ ID NO: 93240 - RNA, 1404 nt, Artificial Sequence
  derived and/or modified CDS sequence (opt1) from neuraminidase__InfluenzaB__AGX17175
augcugcccagcaccauccagacccucacgcuguuccugaccuccggcggggugcuccugagccuguacgucuccgccagccucuccuaccugcuguacagcgacauccuccugaaguucuccccgaccgagaucaccgcccccacgaugccccuggacugcgcgaacgccagcaacgugcaggccgugaaccgcuccgccaccaagggcgucacccuccugcugcuccccgagccggaguggaccuacccccggcugagcugccccggguccacguuccagaaggcccugcucaucagcccccaccgcuucggcgagaccaaggggaacuccgcgccgcugaucauccgggagcccuucaucgccugcggccccaaggagugcaagcacuucgcccugacccacuacgccgcgcagcccggcggguacuacaacggcacccgcggggaccggaacaagcuccgccaccugaucagcgugaagcugggcaagaucccgacgguggagaacuccaucuuccacauggccgccuggagcggguccgccugccacgacggcaaggaguggaccuacaucggcgucgacgggcccgacaacaacgcccuccugaagaucaaguacggcgaggcguacaccgacaccuaccacagcuacgccaacaacauccugcggacgcaggaguccgccugcaacugcaucgggggcaacugcuaccucaugaucaccgacggcagcgccagcgggaucuccgagugccgcuuccugaagauccgggagggccgcaucaucaaggagaucuuccccaccgggcgggugaagcacaccgaggagugcacgugcggcuucgccagcaacaagaccaucgagugcgcgugccgcgacaacuccuacaccgccaagcggcccuucgugaagcugaacgucgagaccgacacggccgagauccgccucaugugcaccgagaccuaccuggacaccccgcggcccgacgacgggagcaucacgggccccugcgaguccaacggcgacaaggggagcggcgggaucaagggcggguucgugcaccagcgcauggccuccaagaucggccggugguacagccgcaccauguccaagaccaagcggaugggcauggggcuguacgugaaguacgacggcgaccccugggccgacagcgacgcgcucgcccuguccggggucauggugagcauggaggagccgggcugguacuccuucggguucgagauccgcgacaagaagugcgacgugcccugcaucggcaucgagaugguccacgacggcgggaaggagaccuggcacagcgccgccacggccaucuacugccugaugggcuccgggcagcuccugugggacaccgugaccggcguggacauggcgcuguga

SEQ ID NO: 93241 - RNA, 1401 nt, Artificial Sequence
  derived and/or modified CDS sequence (opt1) from neuraminidase__InfluenzaB__AGX17186
augcugcccagcaccauccagacccucacgcuguuccugaccuccggcggggugcuccugagccuguacgucuccgccagccucuccuaccugcuguacagcgacauccuccugaaguucuccccgaccgagaucaccacgcccaccaugccccuggacugcgccaacgcgagcaacgugcaggccgugaaccgcuccgccaccaagggcgucacccuccugcugcccgagccggaguggacguacccccggcucagcugccccggguccaccuuccagaaggcccugcugaucagcccccaccgcuucggcgagaccaaggggaacuccgccccgcucaucauccgggagcccuucaucgcgugcggccccaaggagugcaagcacuucgcccugacccacuacgccgcccagcccggcggguacuacaacggcacgcgcggggaccggaacaagcugcgccaccucaucagcgugaagcugggcaagaucccgaccguggagaacuccaucuuccacauggcggccuggagcggguccgccugccacgacggcaaggaguggaccuacaucggcgucgacgggcccgacaacaacgcccugcucaagaucaaguacggcgaggccuacaccgacacguaccacagcuacgcgaacaacauccugcggacccaggaguccgccugcaacugcaucgggggcaacugcuaccugaugaucaccgacggcagcgccagcgggaucuccgagugccgcuuccucaagauccgggagggccgcaucaucaaggagaucuuccccaccgggcgggugaaguacacggaggagugcacgugcggcuucgccagcaacaagaccaucgagugcgccugccgcgacaacuccuacaccgcgaagcggcccuucgugaagcugaacgucgagaccgacaccgccgagauccgccugaugugcaccgagaccuaccucgacacgccgcggcccgacgacgggagcaucaccggccccugcgaguccaacggcgacaaggggagcggcgggaucaagggcggguucgugcaccagcgcauggccuccaagaucggccggugguacagccgcaccauguccaagacccggcgcaugggcauggggcuguacgugaaguacgacggcgaccccugggccgacagcgacgcccuggcgcucuccggggucauggugagcauggaggagccgggcugguacuccuucggguucgagaucaaggacaagaagugcgacgugcccugcaucggcaucgagaugguccacgacggcgggaaggagacguggcacagcgccgccaccgccaucuacugccugaugggcuccgggcagcugcucugggacaccgugaccggcguggacauggcccuguga

SEQ ID NO: 93242 - RNA, 1401 nt, Artificial Sequence; identical to SEQ ID NO: 93217
  derived and/or modified CDS sequence (opt1) from neuraminidase__InfluenzaB__AGX17197

SEQ ID NO: 93243 - RNA, 1401 nt, Artificial Sequence
  derived and/or modified CDS sequence (opt1) from neuraminidase__InfluenzaB__AGX17208
augcugcccagcaccauccagacccucacgcuguuccugaccuccggcggggugcuccugagccuguacgucuccgccagccucuccuaccugcuguacagcgacauccuccugaaguucuccccgaccgagaucaccacgcccaccaugccccuggacugcgccaacgcgagcaacgugcaggccgugaaccgcuccgccaccaagggcgucacccuccugcugcccgagccggaguggacguacccccggcucagcugccccggguccaccuuccagaaggcccugcugaucagcccccaccgcuucggcgagaccaaggggaacuccgccccgcucaucauccgggagcccuucaucgcgugcggccccaaggagugcaagcacuucgcccugacccacuacgccgcccagcccggcggguacuacaacggcacgcgcggggaccggaacaagcugcgccaccucaucagcgugaagcugggcaagaucccgaccguggagaacuccaucuuccacauggcggccuggagcggguccgccugccacgacggcaaggaguggaccuacaucggcgucgacgggcccgacaacaacgcccugcucaagaucaaguacggcgaggccuacaccgacacguaccacagcuacgcgaacaacauccugcggacccaggaguccgccugcaacugcaucgggggcaacugcuaccugaugaucaccgacggcagcgccagcgggaucuccgagugccgcuuccucaagauccgggagggccgcaucaucaaggagaucuuccccaccgggcgggugaagcacacggaggagugcacgugcggcuucgccagcaacaagaccaucgagugcgccugccgcgacaacuccuacaccgcgaagcggcccuucgugaagcugaacgucgagaccgacaccgccgagauccgccugaugugcaccgagaccuaccucgacacgccgcggcccgacgacgggagcaucaccggccccugcgaguccaacggcgacaaggggagcggcgggaucaagggcggguucgugcaccagcgcauggccuccaagaucggccggugguacagccgcaccauguccaagacccggcgcaugggcauggggcuguacgugaaguacgacggcgaccccugggccgacagcgacgcccuggcgcucuccggggucauggugagcauggaggagccgggcugguacuccuucggguucgagaucaaggacaagaagugcgacgugcccugcaucggcaucgagaugguccacgacggcgggaaggagacguggcacagcgccgccaccgccaucuacugccugaugggcuccgggcagcugcucugggacaccgugaccggcguggacauggcccuguga

SEQ ID NO: 93244 - RNA, 1401 nt, Artificial Sequence; identical to SEQ ID NO: 93186
  derived and/or modified CDS sequence (opt1) from neuraminidase__InfluenzaB__AGX17219

SEQ ID NO: 93245 - RNA, 1401 nt, Artificial Sequence; identical to SEQ ID NO: 92640
  derived and/or modified CDS sequence (opt1) from neuraminidase__InfluenzaB__AGX17230

SEQ ID NO: 93246 - RNA, 1401 nt, Artificial Sequence; identical to SEQ ID NO: 93186
  derived and/or modified CDS sequence (opt1) from neuraminidase__InfluenzaB__AGX17241

SEQ ID NO: 93247 - RNA, 1401 nt, Artificial Sequence
  derived and/or modified CDS sequence (opt1) from neuraminidase__InfluenzaB__AGX17252
augcugcccagcaccauccagacccucacgcuguuccugaccuccggcggggugcuccugagccuguacgucuccgccagccucuccuaccugcuguacagcgacauccuccugaaguucuccccgaccgagaucaccgcccccacgaugccccuggacugcgcgaacgccagcaacgugcaggccgugaaccgcuccgccaccaagggcgucacccuccugcugcccgagcucgaguggaccuacccgcggcugagcugccccggguccacguuccagaaggcccugcucaucagcccccaccgcuucggcgagaccaaggggaacuccgcgccccugaucauccgggagccguucaucgccugcggccccaaggagugcaagcacuucgcccugaccuacuacgccgcgcagcccggcggguacuacaacggcacccgcggggaccggaacaagcuccgccaccugaucagcgugaagcugggcaagauccccacgguggagaacuccaucuuccacauggccgccuggagcggguccgccugccacgacggcaaggaguggaccuacaucggcgucgacgggccggacaacaacgcccuccugaagaucaaguacggcgaggcguacaccgacaccuaccacagcuacgccaacaacauccugcggacgcaggaguccgccugcaacugcaucgggggcaacugcuaccucaugaucaccgacggcagcgccagcgggaucuccgagugccgcuuccugaagauccgggagggccgcaucaucaaggagaucuuccccaccgggcgggugaagcacaccgaggagugcacgugcggcuucgccagcaacaagaccaucgagugcgcgugccgcgacaacuccuacaccgccaagcggcccuucgugaagcugaacgucgagaccgacacggccgagauccgccucaugugcaccgagaccuaccuggacacgccccggccggccgacgggagcaucaccggccccugcgaguccaacggcgacaaggggagcggcgggaucaagggcggguucgugcaccagcgcauggccuccaagaucggccggugguacagccgcaccauguccaagaccaagcggaugggcauggggcuguacgugaaguacgacggcgaccccugggcggacagcgacgcccucgcccuguccggggucauggugagcauggaggagcccggcugguacuccuucggguucgagaucaaggacaagaagugcgacgugccgugcaucggcaucgagaugguccacgacggcgggaaggagaccuggcacagcgccgccacggcgaucuacugccugaugggcuccgggcagcuccugugggacaccgugaccggcguggacauggcccuguga

SEQ ID NO: 93248 - RNA, 1401 nt, Artificial Sequence
  derived and/or modified CDS sequence (opt1) from neuraminidase__InfluenzaB__AGX17263
augcugcccagcaccauccagacccucacgcuguuccugaccuccggcggggugcuccugagccuguacgucuccgccagccucuccuaccugcuguacagcgacauccuccugaagcuguccccgaccgagaucaccgcccccacgaugccccucgacugcgcgaacgccagcaacgugcaggccgugaaccgcuccgccaccaagggcgucacccugcugcuccccgagccggaguggaccuacccccggcugagcugccccggguccacguuccagaaggcccugcucaucagcccccaccgcuucggcgagaccaaggggaacuccgcgccgcugaucauccgggagcccuucaucgccugcggccccaaggagugcaagcacuucgcccugacccacuacgccgcgcagcccggcggguacuacaacggcacccgcggggaccggaacaagcuccgccaccugaucagcgugaagcugggcaagaucccgacgguggagaacuccaucuuccacauggccgccuggagcggguccgccugccacgacggcaaggaguggaccuacaucggcgucgacgggcccgacaacaacgcccuccugaagaucaaguacggcgaggcguacaccgacaccuaccacagcuacgccaacaacauccugcggacgcaggaguccgccugcaacugcaucgggggcaacugcuaccucaugaucaccgacggcagcgccagcgggaucuccgagugccgcuuccugaagauccgggagggccgcaucaucaaggagaucuuccccaccgggcgggugaagcacaccgaggagugcacgugcggcuucgccagcaacaagaccaucgagugcgcgugccgcgacaacuccuacaccgccaagcggcccuucgugaagcugaacgucgagaccgacacggccgagauccgccucaugugcaccgagaccuaccuggacaccccgcggcccgacgacgggagcaucacgggccccugcgaguccaacggcgacaaggggagcggcgggaucaagggcggguucgugcaccagcgcauggccuccaagaucggccggugguacagccgcaccauguccaagaccaagcggaugggcauggggcuguacgugaaguacgacggcgaccccugggccgacagcgacgcgcucgcccuguccggggucauggugagcauggaggagccgggcugguacuccuucggguucgagaucaaggacaagaagugcgacgugcccugcaucggcaucgagaugguccacgacggcgggaaggagaccuggcacagcgccgccacggccaucuacugccugaugggcuccgggcagcuccugugggacaccgugaccggcguggacauggcgcuguga

SEQ ID NO: 93249 - RNA, 1401 nt, Artificial Sequence
  derived and/or modified CDS sequence (opt1) from neuraminidase__InfluenzaB__AGX17274
augcugcccagcaccauccagacccucacgcuguuccugaccuccggcggggugcuccugagccuguacgucuccgccagccucuccuaccugcuguacagcgacauccuccugaaguucuccccgaccgagaucaacgcccccaccaugccccuggacugcgcgaacgccagcaacgugcaggccgugaaccgcuccgccacgaagggcgucacccuccugcugcccgagccggaguggaccuacccccggcucagcugccccggguccaccuuccagaaggcccugcugaucagcccccaccgcuucggcgagacgaaggggaacuccgcgccgcucaucauccgggagcccuucaucgccugcggccccaaggagugcaagcacuucgcccugacccacuacgccgcgcagcccggcggguacuacaacggcacccgcggggaccggaacaagcugcgccaccucaucagcgugaagcugggcaagaucccgaccguggagaacuccaucuuccacauggccgccuggagcggguccgccugccacgacggcaaggaguggacguacaucggcgucgacgggcccgacaacaacgcccugcucaagaucaaguacggcgaggcguacaccgacaccuaccacagcuacgccaacaacauccugcggacccaggaguccgccugcaacugcaucgggggcaacugcuaccugaugaucacggacggcagcgccagcgggaucuccgagugccgcuuccucaagauccgggagggccgcaucaucaaggagaucuuccccaccgggcgggugaagcacaccgaggagugcacgugcggcuucgccagcaacaagaccaucgagugcgcgugccgcgacaacuccuacaccgccaagcggcccuucgugaagcugaacgucgagaccgacaccgccgagauccgccugaugugcacggagaccuaccucgacaccccgcggcccgacgacgggagcaucaccggccccugcgaguccaacggcgacaaggggagcggcgggaucaagggcggguucgugcaccagcgcauggccuccaagaucggccggugguacagccgcacgauguccaagaccaagcggaugggcauggggcuguacgugaaguacgacggcgaccccugggccgacagcgacgcgcuggcccucuccggggucauggugagcauggaggagccgggcugguacuccuucggguucgagaucaaggacaagaagugcgacgugcccugcaucggcaucgagaugguccacgacggcgggaaggagaccuggcacagcgccgccaccgccaucuacugccugaugggcuccgggcagcugcucugggacacggugaccggcguggacauggcgcuguga

SEQ ID NO: 93250 - RNA, 1401 nt, Artificial Sequence
  derived and/or modified CDS sequence (opt1) from neuraminidase__InfluenzaB__AGX17285
augcugcccagcaccauccagacccucacgcuguuccugaccuccggcggggugcuccugagccuguacauguccgccagccucuccuaccugcuguacagcgacauccuccugaaguucuccccgaccgagaucaccgcccccacgaugccccuggacugcgcgaacgccagcaacguccaggccgugaaccgcuccgccaccaagggcgugacccuccugcugcccgagccggaguggaccuacccccggcucagcugccccggguccacguuccagaaggcccugcugaucagcccccaccgcuucggcgagaccaaggggaacuccgcgccgcucaucauccgggagcccuucaucgccugcggccccaaggagugcaagcacuucgcccugacccacuacgccgcgcagcccggcggguacuacaacggcacccgcggggaccggaacaagcugcgccaccucaucagcgucaagcugggcaagaucccgacgguggagaacuccaucuuccacauggccgccuggagcggguccgccugccacgacggcaaggaguggaccuacaucggcguggacgggcccgacaacaacgcccugcucaagaucaaguacggcgaggcguacaccgacaccuaccacagcuacgccaacaacauccugcggacgcaggaguccgccugcaacugcaucgggggcaacugcuaccugaugaucaccgacggcagcgccagcgggaucuccgagugccgcuuccucaagauccgggagggccgcaucaucaaggagaucuuccccaccgggcgggucaagcacaccgaggagugcacgugcggcuucgccagcaacaagaccaucgagugcgcgugccgcgacaacuccuacaccgccaagcggcccuucgugaagcugaacguggagaccgacacggccgagauccgccugaugugcaccgagaccuaccucgacaccccgcggcccgacgacgggagcaucacgggccccugcgaguccaacggcgacaaggggagcggcgggaucaagggcggguucguccaccagcgcauggccuccaagaucggccggugguacagccgcaccauguccaagaccaagcggaugggcauggggcuguacgugaaguacgacggcgaccccugggccgacagcgacgcgcuggcccucuccggggugauggucagcauggaggagccgggcugguacuccuucggguucgagaucaaggacaagaagugcgacgugcccugcaucggcaucgagauggugcacgacggcgggaaggagaccuggcacagcgccgccacggccaucuacugccugaugggcuccgggcagcugcucugggacaccgucaccggcguggacauggcgcuguga

SEQ ID NO: 93251 - RNA, 1401 nt, Artificial Sequence
  derived and/or modified CDS sequence (opt1) from neuraminidase__InfluenzaB__AGX17296
augcugcccagcaccauccagacccucacgcuguuccugaccuccggcggggugcuccugagccuguacgucuccgccagccucuccuaccugcuguacagcgacauccuccugaaguucuccccgaccgagaucaccgcccccacgaugccccuggacugcgcgaacgccagcaacgugcaggccgugaaccgcuccgccaccaagggcgucacccuccugcugcccgagccggaguggaccuacccccggcucagcugccccggguccacguuccagaaggcccugcugaucagcccccaccgcuucggcgaggcgaaggggaacuccgccccgcucaucauccgggagcccuucaucgccugcggccccaaggagugcaagcacuucgcccugacccacuacgcggcccagcccggcggguacuacaacggcacccgcggggaccggaacaagcugcgccaccucaucagcgugaagcugggcaagaucccgaccguggagaacuccaucuuccacauggccgccuggagcggguccgccugccacgacggcaaggaguggacguacaucggcgucgacgggcccgacaacaacgcgcugcucaagaucaaguacggcgaggccuacaccgacaccuaccacagcuacgccaacaacauccugcggacccaggaguccgccugcaacugcaucgggggcaacugcuaccugaugaucacggacggcagcgccagcgggaucuccgagugccgcuuccucaagauccgggagggccgcaucaucaaggagaucuuccccaccgggcgggugaagcacaccgaggagugcacgugcggcuucgcgagcaacaagaccaucgagugcgccugccgcgacaacuccuacaccgccaagcggcccuucgugaagcugaacgucgagaccgacaccgccgagauccgccugaugugcacggagaccuaccucgacaccccgcggcccgacgacgggagcaucaccggccccugcgaguccaacggcgacaaggggagcggcgggaucaagggcggguucgugcaccagcgcauggccuccaagaucggccggugguacagccgcacgauguccaagaccaagcggaugggcauggggcuguacgugaaguacgacggcgaccccugggcggacagcgacgcccuggcccucuccggggucauggugagcauggaggagccgggcugguacuccuucggguucgagaucaaggacaagaagugcgacgugcccugcaucggcaucgagaugguccacgacggcgggaaggagaccuggcacagcgccgccaccgcgaucuacugccugaugggcuccgggcagcugcucugggacacggugaccggcguggacauggcccuguga

SEQ ID NO: 93252 - RNA, 1401 nt, Artificial Sequence; identical to SEQ ID NO: 93184
  derived and/or modified CDS sequence (opt1) from neuraminidase__InfluenzaB__AGX17307

SEQ ID NO: 93253 - RNA, 1401 nt, Artificial Sequence; identical to SEQ ID NO: 92638
  derived and/or modified CDS sequence (opt1) from neuraminidase__InfluenzaB__AGX17318

SEQ ID NO: 93254 - RNA, 1401 nt, Artificial Sequence
  derived and/or modified CDS sequence (opt1) from neuraminidase__InfluenzaB__AGX17329
augcugcccagcaccauccagacccucacgcuguuccugaccuccggcggggugcuccugagccuguacgucuccgccagccucuccuaccugcuguacagcgacaugcuccugaaguucuccccgaccgagaucaccgcccccacgaugccccuggacugcgcgaacgccagcaacgugcaggccgugaaccgcuccgccaccaagggcgucacccuccugcugcccgagccggaguggaccuacccccggcucagcugccccggguccacguuccagaaggcccugcugaucagcccccaccgcuucggcgagaccaaggggaacuccgcgccgcucaucauccgggagcccuucaucgccugcggccccaaggagugcaagcacuucgcccugacccacuacgccgcgcagcccggcggguacuacagcggcacccgcggggaccggaacaagcugcgccaccucaucuccgugaagcugggcaagaucccgacgguggagaacagcaucuuccacauggccgccugguccgggagcgccugccacgacggcaaggaguggaccuacaucggcgucgacgggcccgacaacaacgcccugcucaagaucaaguacggcgaggcguacaccgacaccuaccacuccuacgccaacaacauccugcggacgcaggagagcgccugcaacugcaucgggggcaacugcuaccugaugaucaccgacggcagcgccuccgggaucagcgagugccgcuuccucaagauccgggagggccgcaucaucaaggagaucuuccccaccgggcgggugaagcacaccgaggagugcacgugcggcuucgccuccaacaagaccaucgagugcgcgugccgcgacaacagcuacaccgccaagcggcccuucgugaagcugaacgucgagaccgacacggccgagauccgccugaugugcaccgagaccuaccucgacaccccgcggcccgacgacggguccaucacgggccccugcgagagcaacggcgacaagggguccggcgggaucaagggcggguucgugcaccagcgcauggccagcaagaucggccggugguacucccgcaccaugagcaagaacaagcggaugggcauggggcuguacgugaaguacgacggcgaccccugggccgacuccgacgcgcuggcccucagcggggucaugguguccauggaggagccgggcugguacagcuucggguucgagaucaaggacaagaagugcgacgugcccugcaucggcaucgagaugguccacgacggcgggaaggagaccuggcacuccgccgccaccgccaucuacugccugaugggcagcgggcagcugcucugggacacggugaccggcguggacauggcgcuguga

SEQ ID NO: 93255 - RNA, 1401 nt, Artificial Sequence; identical to SEQ ID NO: 93186
  derived and/or modified CDS sequence (opt1) from neuraminidase__InfluenzaB__AGX17340

SEQ ID NO: 93256 - RNA, 1401 nt, Artificial Sequence
  derived and/or modified CDS sequence (opt1) from neuraminidase__InfluenzaB__AGX17351
augcugcccagcaccauccagacccucacgcuguuccugaccuccggcggggugcuccugagccuguacgucuccgccagccucuccuaccugcuguacagcgacauccuccugaaguucuccccgaccgagaucaccgcccccacgaugccccuggacugcgcgaacgccagcaacgugcaggccgugaaccgcuccgccaccaagggcgucacccuccugcugcccgagccggaguggaccuacccccggcucagcugccccggguccacguuccagaaggcccugcugaucagcccccaccgcuucggcgagaccaaggggaacuccgcgccgcucaucauccgggagcccuucaucgccugcggccccaaggagugcaagcacuucgcccugacccacuacgccgcgcagcccggcggguacuacaacggcacccgcggggaccggaacaagcugcgccaccucaucagcgugaagcugggcaagaucccgacgguggagaacuccaucuuccacauggccgccuggagcggguccgccugccacgacggcaaggaguggaccuacaucggcgucgacgggcccgacaacaacgcccugcucaagaucaaguacggcgaggcguacaccgacaccuaccacagcuacgccaacaacauccugcggacgcaggaguccgccugcaacugcaucgggggcaacugcuaccugaugaucaccgacggcagcgccagcgggaucuccgagugccgcuuccucaagauccgggagggccgcaucaucaaggagaucuuccccaccgggcgggugaagcacaccgaggagugcacgugcggcuucgccagcaacaagaccaucgagugcgcgugccgcgacaacuccuacaccgccaagcggcccuucgugaagcugaacgucgagaccgacacggccgagauccgccugaugugcaccgagaccuaccucgacaccccgcggcccgacgacgggagcaucacgggccccugcgagaccaacggcgacaagggguccggcgggaucaagggcggguucgugcaccagcgcauggccagcaagaucggccggugguacucccgcaccaugagcaagaccaagcggaugggcauggggcuguacgugaaguacgacggcgaccccugggccgacuccgacgcgcuggcccucagcggggucaugguguccauggaggagccgggcugguacagcuucggguucgagaucaaggacaagaagugcgacgugcccugcaucggcaucgagaugguccacgacggcgggaaggagacguggcacuccgccgccaccgccaucuacugccugaugggcagcgggcagcugcucugggacaccgugaccggcguggacauggcgcuguga

SEQ ID NO: 93257 - RNA, 1401 nt, Artificial Sequence
  derived and/or modified CDS sequence (opt1) from neuraminidase__InfluenzaB__AGX17362
augcugcccagcaccauccagacccucacgcuguuccugaccuccggcggggugcuccugagccuguacgucuccgccagccucuccuaccugcuguacagcgacauccuccugaaguucuccccgaccgagaucaccgcccccacgaucccccuggacugcgcgaacgccagcaacauccaggccgugaaccgcuccgccaccaagggcgugacccuccugcugcccgagccggaguggaccuacccccggcucagcugccccggguccacguuccagaaggcccugcugaucagcccccaccgcuucggcgagaccaaggggaacuccgcgccgcucaucauccgggagcccuucaucgccugcggccccaaggagugcaagcacuucgcccugacccacuacgccgcgcagcccggcggguacuacaacggcacccgcggggaccggaacaagcugcgccaccucaucagcgucaagcugggcaagaucccgacgguggagaacuccaucuuccacauggccgccuggagcggguccgccugccacgacggcaaggaguggaccuacaucggcguggacgggcccgacaacaacgcccugcucaagaucaaguacggcgaggcguacaccgacaccuaccacagcuacgccaacaacauccugcggacgcaggaguccgccugcaacugcaucgggggcaacugcuaccugaugaucaccgacggcagcgccagcgggaucuccgagugccgcuuccucaagauccgggagggccgcaucaucaaggagaucuuccccaccgggcgggucaagcacaccgaggagugcacgugcggcuucgccagcaacaagaccaucgagugcgcgugccgcgacaacuccuacaccgccaagcggcccuucgugaagcugaacguggagaccgacacggccgagauccgccugaugugcaccgagaccuaccucgacaccccgcggcccgacgacgggagcaucacgggccccugcgaguccaacggcgacaaggggagcggcgggaucaagggcggguucguccaccagcgcauggccuccaagaucggccggugguacagccgcaccauguccaagaccaagcggaugggcauggggcuguacgugaaguacgacggcgaccccugggccgacagcgacgcgcuggcccucuccggggugauggucagcauggaggagccgggcugguacuccuucggguucgagaucaaggacaagaagugcgacgugcccugcaucggcaucgagauggugcacgacggcgggaaggagaccuggcacagcgccgccacggccaucuacugccugaugggcuccgggcagcugcucugggacaccgucaccggcguggacauggcgcuguga

SEQ ID NO: 93258 - RNA, 1401 nt, Artificial Sequence
  derived and/or modified CDS sequence (opt1) from neuraminidase__InfluenzaB__AGX17373
augcugcccagcaccauccagacccucacgcuguuccugaccuccggcggggugcuccugagccuguacgucuccgccagccucuccuaccugcuguacagcgacauccuccugaaguucuccccgaccgagaucaccgcccccacgaugccccuggacugcgcgaacgccagcaacgugcaggccgugaaccgcuccgccaccaagggcgucacccuccugcugcccgagccggaguggaccuacccccggcucagcugccccggguccacguuccagaaggcccugcugaucagcccccaccgcuucggcgagaccaaggggaacuccgcgccgcucaucauccgggagcccuucaucgccugcggccccaaggagugcaagcacuucgcccugacccacuacgccgcgcagcccggcggguacuacaacggcacccgcggggaccggaacaagcugcgccaccucaucagcgugaagcugggcaagaucccgacgguggagaacuccaucuuccacauggccgccuggagcggguccgccugccacgacggcaaggaguggaccuacaucggcgucgacgggcccgacaacaacgcccugcucaagaucaaguacggcgaggcguacaccgacaccuaccacagcuacgccaacaacauccugcggacgcaggaguccgccugcaacugcaucgggggcaacugcuaccugaugaucaccgacggcagcgccagcgggguguccgagugccgcuuccucaagauccgggagggccgcaucaucaaggagaucuuccccaccgggcgggugaagcacaccgaggagugcacgugcggcuucgccaacaacaagaccaucgagugcgcgugccgcgacaacagcuacaccgccaagcggcccuucgucaagcugaacguggagaccgacacggccgagauccgccugaugugcaccgagaccuaccucgacaccccgcggcccgacgacggguccaucacgggccccugcgagagcaacggcgacaagggguccggcgggaucaagggcggguucgugcaccagcgcauggccagcaagaucggccggugguacucccgcaccaugagcaagaccaagcggaugggcauggggcuguacgucaaguacgacggcgaccccugggccgacuccgacgcgcuggcccucagcggggugaugguguccauggaggagccgggcugguacagcuucggguucgagaucaaggacaagaagugcgacguccccugcaucggcaucgagauggugcacgacggcgggaaggagaccuggcacuccgccgccacggccaucuacugccugaugggcagcgggcagcugcucugggacaccgugaccggcgucaacauggcgcuguga

SEQ ID NO: 93259 - RNA, 1401 nt, Artificial Sequence; identical to SEQ ID NO: 92638
  derived and/or modified CDS sequence (opt1) from neuraminidase__InfluenzaB__AGX17384

SEQ ID NO: 93260 - RNA, 1401 nt, Artificial Sequence; identical to SEQ ID NO: 92706
  derived and/or modified CDS sequence (opt1) from neuraminidase__InfluenzaB__AGX17395

SEQ ID NO: 93261 - RNA, 1401 nt, Artificial Sequence
  derived and/or modified CDS sequence (opt1) from neuraminidase__InfluenzaB__AGX17404
augcugcccagcaccauccagacccucacgcuguuccugaccuccggcggggugcuccugagccuguacgucuccgccagccucuccuaccugcuguacagcgacauccuccugaaguucuccccgaccgagaucaccgcccccacgaugccccuggacugcgcgaacgccagcaacgugcaggccgugaaccgcuccgccaccaagggcgucacccuccugcugcccgagccggaguggaccuacccccggcucagcugccccggguccacguuccagaaggcccugcugaucagcccccaccgcuucggcgagaccaaggggaacuccgcgccgcucaucauccgggagcccuucaucgccugcggccccaaggagugcaagcacuucgcccugacccacuacgccgcgcagcccggcggguacuacaacggcacccgcggggaccggaacaagcugcgccaccucaucagcgugaagcugggcaagaucccgacgguggagaacuccaucuuccacauggccgccuggagcggguccgccugccacgacggcaaggaguggaccuacaucggcgucgacgggagcgacaacaacgcccugcucaagaucaaguacggcgaggcguacaccgacaccuaccacuccuacgccaacaacauccugcggacgcaggagagcgccugcaacugcaucgggggcaacugcuaccugaugaucaccgacggcagcgccuccgggaucagcgagugccgcuuccucaagauccgggagggccgcaucaucaaggagaucuuccccaccgggcgggugaagcacaccgaggagugcacgugcggcuucgccuccaacaagaccaucgagugcgcgugccgcgacaacagcuacaccgccaagcggcccuucgugaagcugaacgucgagaccgacacggccgagauccgccugaugugcaccgagaccuaccucgacacgccccggccggacgacggguccaucaccggccccugcgagagcaacggcgacaagggguccggcgggaucaagggcggguucgugcaccagcgcauggccagcaagaucggccggugguacucccgcaccaugagcaagaccaagcggaugggcauggggcuguacgugaaguacgacggcgaccccugggccgacuccgacgcgcuggcccucagcgggaucauggucuccauggaggagcccggcugguacagcuucggguucgagaucaaggacaagaagugcgacgugccgugcaucggcaucgagauggugcacgacggcgggaaggagaccuggcacuccgccgccacggccaucuacugccugaugggcagcgggcagcugcucugggacaccgucaccggcguggacauggcgcuguga

SEQ ID NO: 93262 - RNA, 1401 nt, Artificial Sequence
  derived and/or modified CDS sequence (opt1) from neuraminidase__InfluenzaB__AGX17415
augcugcccagcaccauccagacccucacgcuguuccugaccuccggcggggugcuccugagccuguacgucuccgccagccucuccuaccugcuguacagcgacauccuccugaaguucuccccgaccgagaucaccgcccccacgaugccccuggacugcgcgaacgccagcaacgugcaggccgugaaccgcuccgccaccaagggcgucacccuccugcugcccgagccggacuggaccuacccccggcucagcugccccggguccacguuccagaaggcccugcugaucagcccccaccgcuucggcgagaccaaggggaacuccgcgccgcucaucauccgggagcccuucaucgccugcggccccaaggagugcaagcacuucgcccugacccacuacgccgcgcagcccggcggguacuacaacggcacccgcggggaccggaacaagcugcgccaccucaucagcgugaagcugggcaagaucccgacgguggagaacuccaucuuccacauggccgccuggagcggguccgccugccacgacggcaaggaguggaccuacaucggcgucgacgggcccgacaacaacgcccugcucaagaucaaguacggcgaggcguacaccgacaccuaccacagcuacgccaacaacauccugcggacgcaggaguccgccugcaacugcaucgggggcaacugcuaccugaugaucaccgacggcagcgccagcgggaucuccgagugccgcuuccucaagauccgggagggccgcaucaucaaggagaucuuccccaccgggcgggugaagcacaccgaggagugcacgugcggcuucgccagcaacaagaccaucgagugcgcgugccgcgacaacuccuacaccgccaagcggcccuucgugaagcugaacgucgagaccgacacggccgagauccgccugaugugcaccgagaccuaccucgacaccccgcggcccgacgacgggagcaucacgggccccugcgaguccaacggcgacaaggggagcggcgggaucaagggcggguucgugcaccagcgcauggccuccaagaucggccggugguacagccgcaccauguccaagaccaagcggaugggcauggggcuguacgugaaguacgacggcgaccccugggccgacagcgacgcgcuggcccucuccggggucauggugagcauggaggagccgggcugguacuccuucggguucgagaucaaggacaagaagugcgacgugcccugcaucggcaucgagaugguccacgacggcgggaaggagaccuggcacagcgccgccacggccaucuacugccugaugggcuccgggcagcugcucugggacaccgugaccggcguggacauggcgcuguga

SEQ ID NO: 93263 - RNA, 1401 nt, Artificial Sequence
  derived and/or modified CDS sequence (opt1) from neuraminidase__InfluenzaB__AGX17426
augcugcccagcaccauccagacccucacgcuguuccugaccuccggcggggugcuccugagccuguacgucuccgccagccucuccuaccugcuguacagcgacauccuccugaaguucuccccgaccgagaucaccgcccccacgaugccccuggacugcgcgaacgccagcaacgugcaggccgugaaccgcuccgccaccaagggcgucaccuuccuccugcccgagccggaguggaccuacccccggcugagcugccccggguccacguuccagaaggcccuccugaucagcccccaccgcuucggcgagaccaaggggaacuccgcgccgcugaucauccgggagcccuucaucgccugcggccccaaggagugcaagcacuucgcccucacccacuacgccgcgcagcccggcggguacuacaacggcacccgcggggaccggaacaagcugcgccaccugaucagcgugaagcucggcaagaucccgacgguggagaacuccaucuuccacauggccgccuggagcggguccgccugccacgacggcaaggaguggaccuacaucggcgucgacgggcccgacaacaacgcccugcugaagaucaaguacggcgaggcguacaccgacaccuaccacagcuacgccaacaacauccuccggacgcaggaguccgccugcaacugcaucgggggcaacugcuaccugaugaucaccgacggcagcgccagcgggaucuccgagugccgcuuccugaagauccgggagggccgcaucaucaaggagaucuuccccaccgggcgggugaagcacaccgaggagugcacgugcggcuucgccagcaacaagaccaucgagugcgcgugccgcgacaacuccuacaccgccaagcggcccuucgugaagcucaacgucgagaccgacacggccgagauccgccugaugugcaccgagaccuaccuggacaccccgcggcccgacgacgggagcaucacgggccccugcgaguccaacggcgacaaggggagcggcgggaucaagggcggguucgugcaccagcgcauggccuccaagaucggccggugguacagccgcaccauguccaagaccaagcggaugggcauggggcucuacgugaaguacgacggcgaccccugggccgacagcgacgcgcuggcccuguccggggucauggugagcauggaggagccgggcugguacuccuucggguucgagauccgcgacaagaagugcgacgugcccugcaucggcaucgagaugguccacgacggcgggaaggagaccuggcacagcgccgccacggccaucuacugccucaugggcuccgggcagcugcugugggacaccgugaccggcguggacauggcgcucuga

SEQ ID NO: 93264 - RNA, 1401 nt, Artificial Sequence
  derived and/or modified CDS sequence (opt1) from neuraminidase__InfluenzaB__AGX17437
augcugcccagcaccauccagacccucacgcuguuccugaccuccggcggggugcuccugagccuguacgucuccgugagccucuccuaccugcuguacagcgacauccuccugaaguucuccccgaccgagaucaccgcccagacgaugccccuggacuucgccaacgcgagcaacgugcaggccgucaaccgcuccgccaccaagggcgugacccuccugcugcccgagcccgaguggaccuacccgcggcucagcugccccggguccacguuccagaaggcccugcugaucagcccccaccgcuucggcgagaccaaggggaacuccgcgccccucaucauccgggagccguucaucgccugcggccccaaggagugcaagcacuucgcccugacccacuacgccgcccagcccggcggguacuacaacggcacccgcggggaccggaacaagcugcgccaccucaucagcgugaagcugggcaagauccccacggucgagaacuccaucuuccacauggcggccuggagcggguccgccugccacgacggcaaggaguggaccuacaucggcguggacgggccggacaacaacgcccugcucaagaucaaguacggcgaggccuacaccgacaccuaccacagcuacgcgaacaacauccugcggacgcaggaguccgccugcaacugcaucgggggcaacugcuaccugaugaucaccgacggcagcgccagcgggaucuccgagugccgcuuccucaagauccgggagggccgcaucaucaaggagaucuuccccaccgggcgggugaagcacaccgaggagugcacgugcggcuucgccagcaacaagaccaucgagugcgccugccgcgacaacuccuacaccgcgaagcggcccuucgucaagcugaacguggagaccgacacggccgagauccgccugaugugcaccgagaccuaccucgacacgccccggccggacgacgggagcaucaccggccccugcgaguccaacggcgacaaggggagcggcgggaucaagggcggguucgugcaccagcgcauggccuccaagaucggccggugguacagccgcaccauguccaagaccaagcggaugggcauggggcuguacgucaaguacgacggcgaccccugggccgacagcgacgcccuggcgcucuccggggugauggugagcauggaggagcccggcugguacuccuucggguucgagauccgcgacaagaagugcgacgucccgugcaucggcaucgagauggugcacgacggcgggaaggagaccuggcacagcgccgccacggccaucuacugccugaugggcuccgggcagcugcucugggacaccgugaccggcgucgacauggcccuguga

SEQ ID NO: 93265 - RNA, 1401 nt, Artificial Sequence
  derived and/or modified CDS sequence (opt1) from neuraminidase__InfluenzaB__AGX17448
augcugcccagcaccauccagacccucacgcuguuccugaccuccggcggggugcuccugagccuguacgucuccgccagccucuccuaccugcuguacagcgacauccuccugaaguucuccccgaccgagaucaccgcccccacgaugccccuggacugcgcgaacgccagcaacgugcaggccgugaaccgcuccgccaccaagggcgucacccuccugcugcccgagccggaguggaccuacccccggcucagcugccccggguccacguuccagaaggcccugcugaucagcccccaccgcuucggcgagaccaaggggaacuccgcgccgcucaucauccgggagcccuucaucgccugcggccccaaggagugcaagcacuucgcccugacccacuacgccgcgcagcccggcggguacuacaacggcacccgcggggaccggaacaagcugcgccaccucaucagcgugaagcugggcaagaucccgacgguggagaacuccaucuuccacauggccgccuggagcggguccgccugccacgacggcaaggaguggaccuacaucggcgucgacgggcccgacaacaacgcccugcucaagaucaaguacggcgaggcguacaccgacaccuaccacagcuacgccaacaacauccugcggacgcaggaguccgccugcaacugcaucgggggcaacugcuaccugaugaucaccgacggcagcgccagcgggaucuccgagugccgcuuccucaagauccgggagggccgcaucaucaaggagaucuuccccaccgggcgggugaagcacaccgaggagugcacgugcggcuucgccagcaacaagaccaucgagugcgcgugccgcgacaacuccuacaccgccaagcggcccuucgugaagcugaacgucgagaccgacacggccgagauccgccugaugugcaccgagaccuaccucgacaccccgcggcccgacgacgggagcaucacgggccccugcgagaccaacggcgacaagggguccggcgggaucaagggcggguucgugcaccagcgcauggccagcaagaucggccggugguacucccgcaccaugagcaagaccaagcggaugggcauggggcuguacgugaaguacgacggcgaccccugggccgacuccgacgcgcugguccucagcggggugaugguguccauggaggagccgggcugguacagcuucggguucgagaucaaggacaagaagugcgacguccccugcaucggcaucgagauggugcacgacggcgggaaggagacguggcacuccgccgccaccgccaucuacugccugaugggcagcgggcagcugcucugggacaccgugaccggcgucgacauggcccuguga

SEQ ID NO: 93266 - RNA, 1401 nt, Artificial Sequence
  derived and/or modified CDS sequence (opt1) from neuraminidase__InfluenzaB__AGX17459
augcugcccagcaccauccagacccucacgcuguuccugaccuccggcggggugcuccugagccuguacgucuccgccagccucuccuaccugcuguacagcgacauccuccugaaguucuccccgaccgagaucaccgccagcacgaugccccuggacugcgcgaacgccuccaacgugcaggccgugaaccgcagcgccaccaagggcgucacccuccugcugcccgagcccgacuggaccuacccgcggcucuccugccccgggagcacguuccagaaggcccugcugaucagcccccaccgcuucggcgagaccaaggggaacuccgcgccccucaucauccgggagccguucaucgccugcggccccaaggagugcaagcacuucgcccugacccacuacgccgcgcagcccggcggguacuacaacggcacccgcggggaccggaacaagcugcgccaccucaucuccgugaagcugggcaagauccccacgguggagaacagcaucuuccacauggccgccugguccgggagcgccugccacgacggcaaggaguggaccuacaucggcgucgacgggccggacaacaacgcccugcucaagaucaaguacggcgaggcguacaccgacaccuaccacuccuacgccaacaacauccugcggacgcaggagagcgccugcaacugcaucgggggcaacugcuaccugaugaucaccgacggcagcgccuccgggaucagcgagugccgcuuccucaagauccgggagggccgcaucaucaaggagaucuuccccaccgggcgggugaagcacaccgaggagugcacgugcggcuucgccuccaacaagaccaucgagugcgcgugccgcgacaacagcuacaccgccaagcggcccuucgugaagcugaacgucgagaccgacacggccgagauccgccugaugugcaccgagaccuaccucgacacgccccggccggacgacggguccaucaccggccccugcgagagcaacggcgacaagggguccggcgggaucaagggcggguucgugcaccagcgcauggccagcaagaucggccggugguacucccgcaccaugagcaagaccaagcggaugggcauggggcuguacgugaaguacgacggcgaccccugggccgacuccgacgcgcuggcccucagcggggucaugguguccauggaggagcccggcugguacagcuucggguucgagaucaaggacaagaagugcgacgugccgugcaucggcaucgagaugguccacgacggcgggaaggagaccuggcacuccgccgccacggccaucuacugccugaugggcagcgggcagcugcucugggacaccgugaccggcguggacauggcgcuguga

SEQ ID NO: 93267 - RNA, 1401 nt, Artificial Sequence; identical to SEQ ID NO: 92638
  derived and/or modified CDS sequence (opt1) from neuraminidase__InfluenzaB__AGX17470

SEQ ID NO: 93268 - RNA, 1401 nt, Artificial Sequence
  derived and/or modified CDS sequence (opt1) from neuraminidase__InfluenzaB__AGX17481
augcugcccagcaccauccagacccucacgcuguuccugaccuccggcggggugcuccugagccuguacgucuccgccagccucuccuaccugcuguacagcgacauccuccugaaguucuccccgaccgagaucaccgcccccacgaugccccuggacugcgcgaacgccagcaacgugcaggccgugaaccgcuccgccaccaagggcgucacccucauccugcccgagccggaguggaccuacccccggcugagcugccccggguccacguuccagaaggcccuccugaucagcccccaccgcuucggcgagaccaaggggaacuccgcgccgcugaucauccgggagcccuucaucgccugcggccccaaggagugcaagcacuucgcccucacccacuacgccgcgcagcccggcggguacuacaacggcacccgcggggaccggaacaagcugcgccaccugaucagcgugaagcucggcaagaucccgacgguggagaacuccaucuuccacauggccgccuggagcggguccgccugccacgacggcaaggaguggaccuacaucggcgucgacgggcccgacaacaacgcccugcugaagaucaaguacggcgaggcguacaccgacaccuaccacagcuacgccaacaacauccuccggacgcaggaguccgccugcaacugcaucgggggcaacugcuaccugaugaucaccgacggcagcgccagcgggaucuccgagugccgcuuccugaagauccgggagggccgcaucaucaaggagaucuuccccaccgggcgggugaagcacaccgaggagugcacgugcggcuucgccagcaacaagaccaucgagugcgcgugccgcgacaacuccuacaccgccaagcggcccuucgugaagcucaacgucgagaccgacacggccgagauccgccugaugugcaccgagaccuaccuggacaccccgcggcccgacgacgggagcaucacgggccccugcgaguccaacggcgacaaggggagcggcgggaucaagggcggguucgugcaccagcgcauggccuccaagaucggccggugguacagccgcaccauguccaagaccaagcggaugggcauggggcucuacgugaaguacgacggcgaccccugggccgacagcgacgcgcuggcccuguccggggucauggugagcguggaggagccgggcugguacuccuucggguucgagaucaaggacaagaagugcgacguccccugcaucggcaucgagauggugcacgacggcgggaaggagaccuggcacagcgccgccacggccaucuacugccucaugggcuccgggcagcugcugugggacaccgugaccggcgucgacauggcgcucuga

SEQ ID NO: 93269 - RNA, 1401 nt, Artificial Sequence
  derived and/or modified CDS sequence (opt1) from neuraminidase__InfluenzaB__AGX17492
augcugcccagcaccauccagacccucacgcuguuccugaccuccggcggggugcuccugagccuguacgucuccgccagccucuccuaccugcuguacagcgacauccuccugaaguucuccccgaccgagaucaccgcccccacgaugccccuggacugcgcgaacgccagcaacgugcaggccgugaaccgcuccgccaccaagggcgucacccuccugcugcccgagccggaguggaccuacccccggcucagcugccccggguccacguuccagaaggcccugcugaucagcccccaccgcuucggcgagaccaaggggaacuccgcgccgcucaucauccgggagcccuucaucgccugcggccccaaggagugcaagcacuucgcccugacccacuacgccgcgcagcccggcggguacuacaacggcacccgcggggaccggaacaagcugcgccaccucaucagcgugaagcugggcaagaucccgacgguggagaacuccaucuuccacauggccgccuggagcggguccgccugccacgacggcaaggaguggaccuacaucggcgucgacgggcccgacaacaacgcccugcucaagaucaaguacggcgaggcguacaccgacaccuaccacagcuacgccaacaacauccugcggacgcaggaguccgccugcaacugcaucgggggcaacugcuaccugaugaucaccgacggcagcgccagcgggaucuccgagugccgcuuccucaagauccgggagggccgcaucaucaaggagaucuuccccaccgggcgggugaagcacaccgaggagugcacgugcggcuucgccagcaacaagaccaucgagugcgcgugccgcgacaacuccuacaccgccaagcggcccuucgugaagcugaacgucgagaccgacacggccgagauccgccugaugugcaccgagaccuaccucgacaccccgcggcccgacgacgggagcaucacgggccccugcgaguccaacggcgacaaggggagcggcgggaucaagggcggguucgugcaccagcgcauggccuccaagaucggccggugguacagccgcaccauguccaagaccaagcggaugggcauggggcuguacgugaaguacgacggcgaccccugggccgacagcgacgcgcuggcccucuccggggucauggugagcauggaggagccgggcugguacuccuucggguucgagaucaaggacaagaagugcgacgugcccugcaucggcaucgagaugguccacgacggcgggaaggagaccuggcacagcgccgccacggccaucuacugccugaugggcuccgggcagcugcucugggacaccgugaccggcguggacaucgcgcuguga

SEQ ID NO: 93270 - RNA, 1401 nt, Artificial Sequence
  derived and/or modified CDS sequence (opt1) from neuraminidase__InfluenzaB__AGX17503
augcugcccagcaccauccagacccucacgcuguuccugaccuccggcggggugcuccugagccuguacgucuccgccagccucuccuaccugcuguacagcgacauccuccugaaguucuccccgaccgagaucaccgcccccacgaugccccuggacugcgcgaacgccagcaacgugcaggccgugaaccgcuccgccaccaagggcgucacccuccugcugcccgagccggaguggaccuacccccggcucagcugccccgggcugacguuccagaaggcccugcucaucagcccccaccgcuucggcgagaccaaggggaacuccgcgccgcugaucauccgggagcccuucaucgccugcggccccaaggagugcaagcacuucgcccugacccacuacgccgcgcagcccggcggguacuacaacggcacccgcggggaccggaacaagcuccgccaccugaucuccgugaagcugggcaagaucccgacgguggagaacagcaucuuccacauggccgccugguccgggagcgccugccacgacggcaaggaguggaccuacaucggcgucgacgggcccgacaacaacgcccuccugaagaucaaguacggcgaggcguacaccgacaccuaccacuccuacgccaacaacauccugcggacgcaggagagcgccugcaacugcaucgggggcaacugcuaccucaugaucaccgacggcuccgccagcgggaucagcgagugccgcuuccugaagauccgggagggccgcaucaucaaggagaucuuccccaccgggcgggugaagcacaccgaggagugcacgugcggcuucgccuccaacaagaccaucgagugcgcgugccgcgacaacagcuacaccgccaagcggcccuucgugaagcugaacgucgagaccgacacggccgagauccgccucaugugcaccgagaccuaccuggacaccccgcggcccgacgacggguccaucacgggccccugcgagagcaacggcgacaagggguccggcgggaucaagggcggguucgugcaccagcgcauggccagcaagaucggccggugguacucccgcaccaugagcaagaccaagcggaugggcauggggcuguacgugaaguacgacggcgaccccugggccgacuccgacgcgcucgcccugagcggggucaugguguccauggaggagccgggcugguacagcuucggguucgagaucaaggacaagaagugcgacgugcccugcaucggcaucgagaugguccacgacggcgggaaggagaccuggcacuccgccgccacggccaucuacugccugaugggcagcgggcagcuccugugggacaccgugaccggcguggacauggcgcuguga

SEQ ID NO: 93271 - RNA, 1401 nt, Artificial Sequence; identical to SEQ ID NO: 92638
  derived and/or modified CDS sequence (opt1) from neuraminidase__InfluenzaB__AGX17514

SEQ ID NO: 93272 - RNA, 1401 nt, Artificial Sequence
  derived and/or modified CDS sequence (opt1) from neuraminidase__InfluenzaB__AGX17525
augcugcccagcaccauccagacccucacgcuguuccugaccuccggcggggugcuccugagccuguacgucuccgccagccucuccuaccugcuguacagcgacauccuccugaaguucuccccgaccgagaucaccgcccccacgaugccccuggacugcgcgaacgccagcaacgugcaggccgugaaccgcuccgccaccaagggcgucacccuccugcugcccgagccggaguggaccuacccccggcucagcugccccggguccacguuccagaaggcccugcugaucagcccccaccgcuucggcgagaccaaggggaacuccgcgccgcucaucauccgggagcccuucaucgccugcggccccaaggagugcaagcacuucgcccugacccacuacgccgcgcagcccggcggguacuacaacggcaagcgcggggaccggaacaagcugcgccaccucaucagcgugaagcugggcaagaucccgaccguggagaacuccaucuuccacauggccgccuggagcggguccgccugccacgacggcaaggaguggacguacaucggcgucgacgggcccgacaacaacgcccugcucaagaucaaguacggcgaggcguacaccgacaccuaccacagcuacgccaacaacauccugcggacccaggaguccgccugcaacugcaucgggggcaacugcuaccugaugaucacggacggcagcgccagcgggaucuccgagugccgcuuccucaagauccgggagggccgcaucaucaaggagaucuuccccaccgggcgggugaagcacaccgaggagugcacgugcggcuucgccagcaacaagaccaucgagugcgcgugccgcgacaacuccuacaccgccaagcggcccuucgugaagcugaacgucgagaccgacaccgccgagauccgccugaugugcacggagaccuaccucgacaccccgcggcccgacgacgggagcaucaccggccccugcgaguccaacggcgacaaggggagcggcgggaucaagggcggguucgugcaccagcgcauggccuccaagaucggccggugguacagccgcacgauguccaagaccaagcggaugggcauggggcuguacgugaaguacgacggcgaccccugggccgacagcgacgcgcuggcccucuccggggucauggugagcauggaggagccgggcugguacuccuucggguucgagauccgcgacaagaagugcgacgugcccugcaucggcaucgagaugguccacgacggcgggaaggagaccuggcacagcgccgccaccgccaucuacugccugaugggcuccgggcagcugcucugggacacggugaccggcguggacauggcgcuguga

SEQ ID NO: 93273 - RNA, 1401 nt, Artificial Sequence; identical to SEQ ID NO: 93217
  derived and/or modified CDS sequence (opt1) from neuraminidase__InfluenzaB__AGX17536

SEQ ID NO: 93274 - RNA, 1401 nt, Artificial Sequence; identical to SEQ ID NO: 93248
  derived and/or modified CDS sequence (opt1) from neuraminidase__InfluenzaB__AGX17547

SEQ ID NO: 93275 - RNA, 1401 nt, Artificial Sequence
  derived and/or modified CDS sequence (opt1) from neuraminidase__InfluenzaB__AGX17558
augcugcccagcaccauccagacccucacgcuguuccugaccuccggcggggugcuccugagccuguacgucuccgccagccucuccuaccugcuguacagcgacgugcuccugaaguucuccccggccgagaucaccgcgcccaccaugccccuggacugcgccaacgccagcaacgugcaggccgucaaccgcuccgccacgaagggcgugacccuccugcugcccgagccggaguggaccuacccccggcucagcugccccggguccaccuuccagaaggcgcugcugaucagcccccaccgcuucggcgagacgaaggggaacuccgccccgcucaucauccgggagcccuucaucgccugcggccccaaggagugcaagcacuucgcccugacccacuacgcggcccagcccggcggguacuacaacggcacccgcggggaccggaacaagcugcgccaccucaucagcgugaagcugggcaagaucccgaccgucgagaacuccaucuuccacauggccgccuggagcggguccgccugccacgacggcaaggaguggacguacaucggcguggacgggcccgacaacaacgcgcugcucaagaucaaguacggcgaggccuacaccgacaccuaccacagcuacgccaacaacauccugcggacccaggaguccgccugcaacugcaucgggggcaacugcuaccugaugaucacggacggcagcgccagcgggguguccgagugccgcuuccucaagauccgggagggccgcaucaucaaggagaucuuccccaccgggcgggucaagcacaccgaggagugcacgugcggcuucgcgagcaacaagaccaucgagugcgccugccgcgacaacuccuacaccgccaagcggcccuucgugaagcugaacguggagaccgacaccgccgagauccgccugaugugcacggagaccuaccucgacaccccgcggcccgacgacgggagcaucaccggccccugcgaguccaacggcgacaaggggagcggcgggaucaagggcggguucguccaccagcgcauggccuccaagaucggccggugguacagccgcacgauguccaagaccaagcggaugggcauggggcuguacgugaaguacgacggcgaccccugggcggacagcgacgcccuggcccucuccggggugauggucagcauggaggagccgggcugguacuccuucggguucgagaucaaggacaagaagugcgacgugcccugcaucggcaucgagauggugcacgacggcgggaaggagaccuggcacagcgccgccaccgcgaucuacugccugaugggcuccgggcagcugcucugggacacggucaccggcguggacauggcccuguga

SEQ ID NO: 93276 - RNA, 1401 nt, Artificial Sequence; identical to SEQ ID NO: 92767
  derived and/or modified CDS sequence (opt1) from neuraminidase__InfluenzaB__AGX17569

SEQ ID NO: 93277 - RNA, 1401 nt, Artificial Sequence; identical to SEQ ID NO: 92694
  derived and/or modified CDS sequence (opt1) from neuraminidase__InfluenzaB__AGX17580

SEQ ID NO: 93278 - RNA, 1401 nt, Artificial Sequence
  derived and/or modified CDS sequence (opt1) from neuraminidase__InfluenzaB__AGX17591
augcugcccagcaccauccagacccucacgcuguuccugaccuccggcggggugcuccugagccuguacgucuccgccagccucuccuaccugcuguacagcgacauccuccugaaguucccgcccaccgagaucaccgcccccacgaugccccuggacugcgcgaacgccuccaacgugcaggccgugaaccgcagcgccaccaagggcgucacccuccugcugccggagcccgaguggaccuacccccggcucuccugccccgggagcacguuccagaaggcccugcugaucuccccgcaccgcuucggcgagaccaaggggaacagcgcgccccucaucauccgggagcccuucaucgccugcggccccaaggagugcaagcacuucgcccugacccacuacgccgcgcagccgggcggguacuacaacggcacccgcggggaccggaacaagcugcgccaccucaucuccgugaagcugggcaagauccccacgguggagaacagcaucuuccacauggccgccugguccgggagcgccugccacgacggcaaggaguggaccuacaucggcgucgacgggcccgacaacaacgcccugcucaagaucaaguacggcgaggcguacaccgacaccuaccacuccuacgccaacaacauccugcggacgcaggagagcgccugcaacugcaucgggggcaacugcuaccugaugaucaccgacggcuccgccagcggggugagcgagugccgcuuccucaagauccgggagggccgcaucaucaaggagaucuuccccaccgggcgggugaagcacaccgaggagugcacgugcggcuucgccuccaacaagaccaucgagugcgcgugccgcgacaacagcuacaccgccaagcggccguucgucaagcugaacguggagaccgacacggccgagauccgccugaugugcaccgagaccuaccucgacacgccccggcccgacgacggguccaucaccggccccugcgagagcaacggcgacaagggguccggcgggaucaagggcggguucgugcaccagcgcauggccagcaagaucggccggugguacucccgcaccaugagcaagaccaagcggaugggcauggggcuguacgucaaguacgacggcgacccgugggccgacuccgacgcgcuggccuucagcggggugaugguguccauggaggagcccggcugguacagcuucggguucgagaucaaggacaagaagugcgacguccccugcaucggcaucgagauggugcacgacggcgggaaggagaccuggcacuccgccgccacggccaucuacugccucaugggcagcgggcagcugcugugggacaccgugaccggcgucaacauggcgcucuga

SEQ ID NO: 93279 - RNA, 1401 nt, Artificial Sequence; identical to SEQ ID NO: 92692
  derived and/or modified CDS sequence (opt1) from neuraminidase__InfluenzaB__AGX17602

SEQ ID NO: 93280 - RNA, 1401 nt, Artificial Sequence; identical to SEQ ID NO: 93278
  derived and/or modified CDS sequence (opt1) from neuraminidase__InfluenzaB__AGX17613

SEQ ID NO: 93281 - RNA, 1401 nt, Artificial Sequence; identical to SEQ ID NO: 92865
  derived and/or modified CDS sequence (opt1) from neuraminidase__InfluenzaB__AGX17624

SEQ ID NO: 93282 - RNA, 1401 nt, Artificial Sequence
  derived and/or modified CDS sequence (opt1) from neuraminidase__InfluenzaB__AGX17635
augcugcccagcaccauccagacccucacgcuguuccugaccuccggcggggugcuccugagccuguacgucuccgccagccucuccuaccugcuguacagcgacauccuccugaaguucccgcccaccgagaucaccgcccccacgaugccccuggacugcgcgaacgccuccaacgugcaggccgugaaccgcagcgccaccaagggcgucacccuccugcugccggagcccgaguggaccuacccccggcucuccugccccgggagcacguuccagaaggcccugcugaucuccccgcaccgcuucggcgagaccaaggggaacagcgcgccccucaucauccgggagcccuucaucgccugcggccccaaggagugcaagcacuucgcccugacccacuacgccgcgcagccgggcggguacuacaacggcacccgcggggaccggaacaagcugcgccaccucaucuccgugaagcugggcaagauccccacgguggagaacagcaucuuccacauggccgccugguccgggagcgccugccacgacggcaaggaguggaccuacaucggcgucgacgggcccgacaacaacgcccugcucaagaucaaguacggcgaggcguacaccgacaccuaccacuccuacgccaacaacauccugcggacgcaggagagcgccugcaacugcaucgggggcaacugcuaccugaugaucaccgacggcuccgccagcgggaucagcgagugccgcuuccucaagauccgggagggccgcaucaucaaggagaucuuccccaccgggcgggugaagcacaccgaggagugcacgugcggcuucgccuccaacaagaccaucgagugcgcgugccgcgacaacagcuacaccgccaagcggccguucgugaagcugaacgucgagaccgacacggccgagauccgccugaugugcaccgagaccuaccucgacacgccccggcccgacgacggguccaucaccggccccugcgagagcaacggcgacaagggguccggcgggaucaagggcggguucgugcaccagcgcauggccagcaagaucggccggugguacucccgcaccaugagcaagaccaagcggaugggcauggggcuguacgugaaguacgacggcgacccgugggccgacuccgacgcgcuggccuucagcggggucaugguguccauggaggagcccggcugguacagcuucggguucgagaucaaggacaagaagugcgacgugcccugcaucggcaucgagaugguccacgacggcgggaaggagaccuggcacuccgccgccacggccaucuacugccucaugggcagcgggcagcugcugugggacaccgugaccggcgugaacauggcgcucuga

SEQ ID NO: 93283 - RNA, 1401 nt, Artificial Sequence; identical to SEQ ID NO: 92865
  derived and/or modified CDS sequence (opt1) from neuraminidase__InfluenzaB__AGX17657

SEQ ID NO: 93284 - RNA, 1401 nt, Artificial Sequence; identical to SEQ ID NO: 93278
  derived and/or modified CDS sequence (opt1) from neuraminidase__InfluenzaB__AGX17668

SEQ ID NO: 93285 - RNA, 1401 nt, Artificial Sequence
  derived and/or modified CDS sequence (opt1) from neuraminidase__InfluenzaB__AGX17679
augcugcccagcaccauccagacccucacgcuguuccugaccuccggcggggugcuccugagccuguacgucuccgccagccucuccuaccugcuguacagcgacauccuccugaaguucuccccgaccgagaucaccgcccccacgaugccccuggacugcgcgaacgccagcaacgugcaggccgugaaccgcuccgccaccaagggcgucacccuccugcugcccgagccggaguggaccuacccccggcucagcugccccggguccacguuccagaaggcccugcugaucagcccccaccgcuucggcgagaccaaggggaacuccgcgccgcucaucauccgggagcccuucaucgccugcggccccaacgagugcaagcacuucgcccugacccacuacgccgcgcagcccggcggguacuacaacggcacccgcggggaccggaacaagcugcgccaccucaucagcgugaagcugggcaagaucccgacgguggagaacuccaucuuccacauggccgccuggagcggguccgccugccacgacggcaaggaguggaccuacaucggcgucgacgggcccgacaacaacgcccugcucaagaucaaguacggcgaggcguacaccgacaccuaccacagcuacgccaacaacauccugcggacgcaggaguccgccugcaacugcaucgggggcaacugcuaccugaugaucaccgacggcagcgccagcgggguguccgagugccgcuuccucaagauccgggagggccgcaucaucaaggagaucuuccccaccgggcgggugaagcacaccgaggagugcacgugcggcuucgccagcaacaagaccaucgagugcgcgugccgcgacaacuccuacaccgccaagcggcccuucgucaagcugaacguggagaucgacaccgccgagauccgccugaugugcacggacaccuaccucgacaccccgcggcccgacgacgggagcaucaccggccccugcgaguccaacggcgacaaggggagcggcgggaucaagggcggguucgugcaccagcgcauggccuccaagaucggccggugguacagccgcacgauguccaagaccgagcggaugggcauggggcuguacgucaaguacgacggcgaccccugggccgacagcgacgcgcuggccuucuccggggugauggugagcaugaaggagccgggcugguacuccuucggguucgagaucaaggacaagaagugcgacguccccugcaucggcaucgagauggugcacgacggcgggaaggagaccuggcacagcgccgccaccgccaucuacugccucaugggcuccgggcagcugcugugggacacggugaccggcgucgacauggcgcucuga

SEQ ID NO: 93286 - RNA, 1401 nt, Artificial Sequence; identical to SEQ ID NO: 92865
  derived and/or modified CDS sequence (opt1) from neuraminidase__InfluenzaB__AGX17690

SEQ ID NO: 93287 - RNA, 1401 nt, Artificial Sequence
  derived and/or modified CDS sequence (opt1) from neuraminidase__InfluenzaB__AGX17701
augcugcccagcaccauccagacccucacgcuguuccugaccuccggcggggugcuccugagccuguacgucuccgccagccucuccuaccugcuguacagcgacauccuccugaaguucccgcccaccgagaucaccgcccccacgaugccccuggacugcgcgaacgccuccaacgugcaggccgugaaccgcagcgccaccaagggcgucacccuccugcugccggagcccgaguggaccuacccccggcucuccugccccgggagcacguuccagaaggcccugcugaucuccccgcaccgcuucggcgagaccaaggggaacagcgcgccccucaucauccgggagcccuucaucgccugcggccccaaggagugcaagcacuucgcccugacccacuacgccgcgcagccgggcggguacuacaacggcaagcgcggggaccggaacaagcugcgccaccucaucuccgugaagcugggcaagauccccaccguggagaacagcaucuuccacauggccgccugguccgggagcgccugccacgacggcaaggaguggacguacaucggcgucgacgggcccgacaacaacgcccugcucaagaucaaguacggcgaggcguacaccgacaccuaccacuccuacgccaacaacauccugcggacccaggagagcgccugcaacugcaucgggggcaacugcuaccugaugaucacggacggcuccgccagcggggugagcgagugccgcuuccucaagauccgggagggccgcaucaucaaggagaucuuccccaccgggcgggugaagcacaccgaggagugcacgugcggcuucgccuccaacaagaccaucgagugcgcgugccgcgacaacagcuacaccgccaagcggccguucgucaagcugaacguggagaccgacaccgccgagauccgccugaugugcacggagaccuaccucgacacgccccggcccgacgacggguccaucaccggccccugcgagagcaacggcgacaagggguccggcgggaucaagggcggguucgugcaccagcgcauggccagcaagaucggccggugguacucccgcaccaugagcaagaccaagcggaugggcauggggcuguacgucaaguacgacggcgacccgugggccgacuccgacgcgcuggccuucagcggggugaugguguccauggaggagcccggcugguacagcuucggguucgagaucaaggacaagaagugcgacguccccugcaucggcaucgagauggugcacgacggcgggaaggagaccuggcacuccgccgccaccgccaucuacugccucaugggcagcgggcagcugcugugggacacggugaccggcgucaacauggcgcucuga

SEQ ID NO: 93288 - RNA, 1401 nt, Artificial Sequence; identical to SEQ ID NO: 92865
  derived and/or modified CDS sequence (opt1) from neuraminidase__InfluenzaB__AGX17723

SEQ ID NO: 93289 - RNA, 1401 nt, Artificial Sequence; identical to SEQ ID NO: 93285
  derived and/or modified CDS sequence (opt1) from neuraminidase__InfluenzaB__AGX17734

SEQ ID NO: 93290 - RNA, 1401 nt, Artificial Sequence
  derived and/or modified CDS sequence (opt1) from neuraminidase__InfluenzaB__AGX17745
augcugcccagcaccauccagacccucacgcuguuccugaccuccggcggggugcuccugagccuguacgucuccgccagccucuccuaccugcuguacagcgacauccuccugaaguucccgcccaccgagaucaccgcccccacgaugccccuggacugcgcgaacgccuccaacgugcaggccgugaaccgcagcgccaccaagggcgucacccuccugcugccggagcccgaguggaccuacccccggcucuccugcagcggguccacguuccagaaggcccugcugaucagcccccaccgcuucggcgagaucaaggggaacuccgcgccgcucaucauccgggagcccuucaucgccugcggccccaaggagugcaagcacuucgcccugacccacuacgccgcgcagcccggcggguacuacaacggcacccgcggggaccggaacaagcugcgccaccucaucagcgugaagcugggcaagaucccgaccguggagaacuccaucuuccacauggccgccuggagcggguccgccugccacgacggcaaggaguggacguacaucggcgucgacgggcccgacaacaacgcccugcucaagaucaaguacggcgaggcguacaccgacaccuaccacagcuacgccaacaacauccugcggacccaggaguccgccugcaacugcaucgggggcaacugcuaccugaugaucacggacggcagcgccagcgggguguccgagugccgcuuccucaagauccgggagggccgcaucaucaaggagaucuuccccaccgggcgggugaagcacaccgaggagugcacgugcggcuucgccagcaacaagaccaucgagugcgcgugccgcgacaacuccuacaccgccaagcggcccuucgucaagcugaacguggagaccgacaccgccgagauccgccugaugugcacggagaccuaccucgacaccccgcggcccgacgacgggagcaucaccggccccugcgaguccaacggcgacaaggggagcggcgggaucaagggcggguucgugcaccagcgcauggccuccaagaucggccggugguacagccgcacgauguccaagaccaagcggaugggcauggggcuguacgucaaguacgacggcgaccccugggccgacagcgacgcgcuggccuucuccggggugauggugagcauggaggagccgggcugguacuccuucggguucgagaucaaggacaagaagugcgacguccccugcaucggcaucgagauggugcacgacggcgggaaggagaccuggcacagcgccgccaccgccaucuacugccucaugggcuccgggcagcugcugugggacacggugaccggcgucaacauggcgcucuga

SEQ ID NO: 93291 - RNA, 1401 nt, Artificial Sequence
  derived and/or modified CDS sequence (opt1) from neuraminidase__InfluenzaB__AGX17756
augcugcccagcaccauccagacccucacgcuguuccugaccuccggcggggugcuccugagccuguacgucuccgccagccucuccuaccugcuguacagcgacauccuccugaaguucuccccgaccgagaucaccgcccccacgaugccccuggacugcgcgaacgccagcaacgugcacgccgugaaccgcuccgccaccaagggcgucacccuccugcugcccgagccggaguggaccuacccccggcucagcugccccggguccacguuccagaaggcccugcugaucagcccccaccgcuucggcgagaccaaggggaacuccgcgccgcucaucauccgggagcccuucaucgccugcggccccaacgagugcaagcacuucgcccugacccacuacgccgcgcgccccggcggguacuacaacggcacccgcggggaccggaacaagcugcggcaccucaucagcgugaagcugggcaagaucccgacgguggagaacuccaucuuccacauggccgccuggagcggguccgccugccacgacggcaaggaguggaccuacaucggcgucgacgggcccgacaacaacgcccugcucaagaucaaguacggcgaggcguacaccgacaccuaccacagcuacgccaacaacauccugcgcacgcaggaguccgccugcaacugcaucgggggcaacugcuaccugaugaucaccgacggcagcgccagcgggguguccgagugccgguuccucaagauccgcgagggccggaucaucaaggagaucuuccccaccgggcgcgugaagcacaccgaggagugcacgugcggcuucgccagcaacaagaccaucgagugcgcgugccgggacaacuccuacaccgccaagcgccccuucgucaagcugaacguggagaccgacacggccgagauccggcugaugugcaccgacaccuaccucgacaccccgcgccccgacgacgggagcaucacgggccccugcgaguccaacggcgacaaggggagcggcgggaucaagggcggguucgugcaccagcggauggccuccaagaucggccgcugguacagccggaccauguccaagaccgagcgcaugggcauggggcuguacgucaaguacgacggcgaccccugggccgacagcgacgcgcuggccuucuccggggugauggugagcaugaaggagccgggcugguacuccuucggguucgagaucaaggacaagaagugcgacguccccugcaucggcaucgagauggugcacgacggcgggaaggagaccuggcacagcgccgccacggccaucuacugccucaugggcuccgggcagcugcugugggacaccgugaccggcgucgacauggcgcucuga

SEQ ID NO: 93292 - RNA, 1401 nt, Artificial Sequence; identical to SEQ ID NO: 92912
  derived and/or modified CDS sequence (opt1) from neuraminidase__InfluenzaB__AGX17767

SEQ ID NO: 93293 - RNA, 1401 nt, Artificial Sequence
  derived and/or modified CDS sequence (opt1) from neuraminidase__InfluenzaB__AGX17778
augcugcccagcaccauccagacccucacgcuguuccugaccuccggcggggugcuccugagccuguacgucuccgccagccucuccuaccugcuguacagcgacauccuccugaaguucuccccgaccgagaucaccgcccccacgaugccccuggacugcgcgaacgccagcaacgugcacgccgugaaccgcuccgccaccaagggcgucacccuccugcugcccgagccggaguggaccuacccccggcucagcugccccggguccacguuccagaaggcccugcugaucagcccccaccgcuucggcgagaccaaggggaacuccgcgccgcucaucauccgggagcccuucaucgccugcggccccaacgagugcaagcacuucgcccugacccacuacgccgcgcagcccggcggguacuacaacggcacccgcggggaccggaacaagcugcgccaccucaucagcgugaagcugggcaagaucccgacgguggagaacuccaucuuccacauggccgccuggagcggguccgccugccacgacggcaaggaguggaccuacaucggcgucgacgggcccgacaacaacgcccugcucaagaucaaguacggcgaggcguacaccgacaccuaccacagcuacgccaacaacauccugcggacgcaggaguccgccugcaacugcaucgggggcaacugcuaccugaugaucaccgacggcagcgccagcgggguguccgagugccgcuuccucaagauccgggagggccgcaucaucaaggagaucuuccccaccgggcgggugaagcacaccgaggagugcacgugcggcuucgccagcaacaagaccaucgagugcgcgugccgcgacaacuccuacaccgccaagcggcccuucgucaagcugaacguggagaccgacacggccgagauccgccugaugugcaccgacaccuaccucgacaccccgcggcccgacgacgggagcaucacgggccccugcgaguccaacggcgacaaggggagcggcgggaucaagggcggguucgugcaccagcgcauggccuccaagaucggccggugguacagccgcaccauguccaagaccgagcggaugggcauggggcuguacgucaaguacgacggcgaccccugggccgagagcgacgcgcuggccuucuccggggugauggugagcaugaaggagccgggcugguacuccuucggguucgagaucaaggacaagaagugcgacguccccugcaucggcaucgagauggugcacgacggcgggaaggagaccuggcacagcgccgccacggccaucuacugccucaugggcuccgggcagcugcugugggacaccgugaccggcgucgacauggcgcucuga

SEQ ID NO: 93294 - RNA, 1401 nt, Artificial Sequence
  derived and/or modified CDS sequence (opt1) from neuraminidase__InfluenzaB__AGX17789
augcugcccagcaccauccagacccucacgcuguuccugaccuccggcggggugcuccugagccuguacgucuccgccagccucuccuaccugcuguacagcgacauccuccugaaguucuccccgaccgagaucaccgcccccacgaugccccuggacugcgcgaacgccagcaacgugcaggccgugaaccgcuccgccaccaagggcgucacccuccugcugcccgagccggaguggaccuacccccggcucagcugccccggguccacguuccagaaggcccugcugaucagcccccaccgcuucggcgagaccaaggggaacuccgcgccgcucaucauccgggagcccuucaucgccugcggccccaacgagugcaagcacuucgcccugacccacuacgccgcgcagcccggcggguacuacaacggcacccgcggggaccggaacaagcugcgccaccucaucagcgugaagcugggcaagaucccgacgguggagaacuccaucuuccacauggccgccuggagcggguccgccugccacgacggcaaggaguggaccuacaucggcgucgacgggcccgacaacaacgcccugcucaagaucaaguacggcgaggcguacaccgacaccuaccacagcuacgccaacaacauccugcggacgcaggaguccgccugcaacugcaucgggggcaacugcuaccugaugaucaccgacggcagcgccagcgggguguccgagugccgcuuccucaagauccgggagggccgcaucaucaaggagaucuuccccaccgggcgggugaagcacaccgaggagugcacgugcggcuucgccagcaacaagaccaucgagugcgcgugccgcgacaacuccuacaccgccaagcggcccuucgucaagcugaacguggagaucgacaccgccgagauccgccugaugugcacggacaccuaccucgacaccccgcggcccgacgacgggagcaucaccggccccugcgaguccaacggcgacaaggggagcggcgggaucaagggcggguucgugcaccagcgcauggccuccaagaucggccggugguacagccgcacgauguccaagaccgagcggaugggcauggggcuguacgucaaguacgacggcgaccccugggccgacagcgacgcgcugguguucuccggggugauggucagcaugaaggagccgggcugguacuccuucggguucgagaucaaggacaagaagugcgacgugcccugcaucggcaucgagauggugcacgacggcgggaaggagaccuggcacagcgccgccaccgccaucuacugccucaugggcuccgggcagcugcugugggacacggucaccggcguggacauggcccucuga

SEQ ID NO: 93295 - RNA, 1401 nt, Artificial Sequence; identical to SEQ ID NO: 92865
  derived and/or modified CDS sequence (opt1) from neuraminidase__InfluenzaB__AGX17800

SEQ ID NO: 93296 - RNA, 1401 nt, Artificial Sequence
  derived and/or modified CDS sequence (opt1) from neuraminidase__InfluenzaB__AGX17811
augcugcccagcaccauccagacccucacgcuguuccugaccuccggcggggugcuccugagccuguacgucuccgccagccucuccuaccugcuguacagcgacauccuccugaaguucccgcccaccgagaucaccgcccccacgaugccccuggacugcgcgaacgccuccaacgugcaggccgugaaccgcagcgccaccaagggcgucacccuccugcugccggagcccgaguggaccuacccccggcucuccugccccgggagcacguuccagaaggcccugcugaucuccccgcaccgcuucggcgagaccaaggggaacagcgcgccccucaucauccgggagcccuucaucgccugcggccccaaggagugcaagcacuucgcccugacccacuacgccgcgcagccgggcggguacuacaacggcacccgcggggaccggaacaagcugcgccaccucaucuccgugaagcugggcaagauccccacgguggagaacagcaucuuccacauggccgccugguccgggagcgccugccacgacggcaaggaguggaccuacaucggcgucgacgggcccgacaacaacgcccugcucaagaucaaguacggcgaggcguacaccgacaccuaccacuccuacgccaacaacauccugcggacgcaggagagcgccugcaacugcaucgggggcaacugcuaccugaugaucaccgacggcuccgccagcggggugagcgagugccgcuuccucaagauccgggagggccgcaucaucaaggagaucuuccccaccgggcgggugaagcacaccgaggagugcacgugcggcuucgccuccaacaagaccaucgagugcgcgugccgcgacaacagcuacaccgccaagcggccguucgucaagcugaacguggagaccgacacggccgagauccgccugaugugcaccgagaccuaccucgacacgccccggcccgacgacggguccaucaccggccccugcgagagcaacggcgacaagggguccggcgggaucaagggcggguucgugcaccagcgcauggccagcaagaucggccggugguacucccgcaccaugagcaagaccaagcggaugggcauggggcuguacgucaaguacgacggcgacccgugggccgacuccgacgcgcuggccuucagcggggugaugguguccauggaggagcccggcugguacagcuucggguucgagaucaaggacaagaagugcgacguccccugcaucggcaucgagauggugcacgacggcgggaaggagaccuggcacuccgccgccacggccaucuacugccucaugggcagcgggcagcugcugugggacaccgugaccggcgucaacauggcgcaguga

SEQ ID NO: 93297 - RNA, 1401 nt, Artificial Sequence; identical to SEQ ID NO: 93278
  derived and/or modified CDS sequence (opt1) from neuraminidase__InfluenzaB__AGX17822

SEQ ID NO: 93298 - RNA, 1401 nt, Artificial Sequence
  derived and/or modified CDS sequence (opt1) from neuraminidase__InfluenzaB__AGX17833
augcugcccagcaccauccagacccucacgcuguuccugaccuccggcggggugcuccugagccuguacgucuccgccagccucuccuaccugcuguacagcgacauccuccugaaguucccgcccaccgagaucaccgcccccacgaugccccuggacugcgcgaacgccuccaacgugcaggccgugaaccgcagcgccaccaagggcgucacccuccugcugccggagcccgaguggaccuacccccggcucuccugccccgggagcacguuccagaaggcccugcugaucuccccgcaccgcuucggcgagaccaaggggaacagcgcgccccucaucauccgggagcccuucaucgccugcggccccaaggagugcaagcacuucgcccugacccacuacgccgcgcagccgggcggguacuacaacggcacccgcggggaccggaacaagcugcgccaccucaucuccaucaagcugggcaagauccccacgguggagaacagcaucuuccacauggccgccugguccgggagcgccugccacgacggcaaggaguggaccuacaucggcguggacgggcccgacaacaacgcccugcucaagaucaaguacggcgaggcguacaccgacaccuaccacuccuacgccaacaacauccugcggacgcaggagagcgccugcaacugcaucgggggcaacugcuaccugaugaucaccgacggcuccgccagcggggucagcgagugccgcuuccucaagauccgggagggccgcaucaucaaggagaucuuccccaccgggcgggugaagcacaccgaggagugcacgugcggcuucgccuccaacaagaccaucgagugcgcgugccgcgacaacagcuacaccgccaagcggccguucgugaagcugaacgucgagaccgacacggccgagauccgccugaugugcaccgagaccuaccucgacacgccccggcccgacgacggguccaucaccggccccugcgagagcaacggcgacaagggguccggcgggaucaagggcggguucgugcaccagcgcauggccagcaagaucggccggugguacucccgcaccaugagcaagaccaagcggaugggcauggggcuguacgugaaguacgacggcgacccgugggccgacuccgacgcgcuggccuucagcggggucaugguguccauggaggagcccggcugguacagcuucggguucgagaucaaggacaagaagugcgacgugcccugcaucggcaucgagaugguccacgacggcgggaaggagaccuggcacuccgccgccacggccaucuacugccucaugggcagcgggcagcugcugugggacaccgugaccggcgugaacauggcgcucuga

SEQ ID NO: 93299 - RNA, 1401 nt, Artificial Sequence; identical to SEQ ID NO: 93285
  derived and/or modified CDS sequence (opt1) from neuraminidase__InfluenzaB__AGX17844

SEQ ID NO: 93300 - RNA, 1401 nt, Artificial Sequence; identical to SEQ ID NO: 93293
  derived and/or modified CDS sequence (opt1) from neuraminidase__InfluenzaB__AGX17855

SEQ ID NO: 93301 - RNA, 1401 nt, Artificial Sequence; identical to SEQ ID NO: 92912
  derived and/or modified CDS sequence (opt1) from neuraminidase__InfluenzaB__AGX17866

SEQ ID NO: 93302 - RNA, 1401 nt, Artificial Sequence; identical to SEQ ID NO: 93278
  derived and/or modified CDS sequence (opt1) from neuraminidase__InfluenzaB__AGX17877

SEQ ID NO: 93303 - RNA, 1401 nt, Artificial Sequence; identical to SEQ ID NO: 93285
  derived and/or modified CDS sequence (opt1) from neuraminidase__InfluenzaB__AGX17888

SEQ ID NO: 93304 - RNA, 1401 nt, Artificial Sequence; identical to SEQ ID NO: 93278
  derived and/or modified CDS sequence (opt1) from neuraminidase__InfluenzaB__AGX17899

SEQ ID NO: 93305 - RNA, 1401 nt, Artificial Sequence; identical to SEQ ID NO: 93285
  derived and/or modified CDS sequence (opt1) from neuraminidase__InfluenzaB__AGX17910

SEQ ID NO: 93306 - RNA, 1401 nt, Artificial Sequence; identical to SEQ ID NO: 93285
  derived and/or modified CDS sequence (opt1) from neuraminidase__InfluenzaB__AGX17921

SEQ ID NO: 93307 - RNA, 1401 nt, Artificial Sequence; identical to SEQ ID NO: 92912
  derived and/or modified CDS sequence (opt1) from neuraminidase__InfluenzaB__AGX17932

SEQ ID NO: 93308 - RNA, 1401 nt, Artificial Sequence
  derived and/or modified CDS sequence (opt1) from neuraminidase__InfluenzaB__AGX17943
augcugcccagcaccauccagacccucacgcuguuccugaccuccggcggggugcuccugagccuguacgucuccgccagccucuccuaccugcuguacagcgacauccuccugaaguucccgcccaccgagaucaccgcccccacgaugccccuggacugcgcgaacgccuccaacgugcaggccgugaaccgcagcgccaccaagggcgucacccuccugcugccggagcccgaguggaccuacccccggcucuccugccccgggagcacguuccagaaggcccugcugaucuccccgcaccgcuucggcgagaccaaggggaacagcgcgccccucaucauccgggagcccuucaucgccugcggccccaaggagugcaagcacuucgcccugacccacuacgccgcgcagccgggcggguacuacaacggcacccgcggggaccggaacaagcugcgccaccucaucuccgugcggcugggcaagauccccacgguggagaacagcaucuuccacauggccgccugguccgggagcgccugccacgacggcaaggaguggaccuacaucggcgucgacgggcccgacaacaacgcccugcucaagaucaaguacggcgaggcguacaccgacaccuaccacuccuacgccaacaacauccugcgcacgcaggagagcgccugcaacugcaucgggggcaacugcuaccugaugaucaccgacggcuccgccagcggggugagcgagugccgguuccucaagauccgcgagggccggaucaucaaggagaucuuccccaccgggcgcgugaagcacaccgaggagugcacgugcggcuucgccuccaacaagaccaucgagugcgcgugccgggacaacagcuacaccgccaagcgcccguucgucaagcugaacguggagaccgacacggccgagauccggcugaugugcaccgagaccuaccucgacacgccccgccccgacgacggguccaucaccggccccugcgagagcaacggcgacaagggguccggcgggaucaagggcggguucgugcaccagcggauggccagcaagaucggccgcugguacucccggaccaugagcaagaccaagcgcaugggcauggggcuguacgucaaguacgacggcgacccgugggccgacuccgacgcgcuggccuucagcggggugaugguguccauggaggagcccggcugguacagcuucggguucgagaucaaggacaagaagugcgacguccccugcaucggcaucgagauggugcacgacggcgggaaggagaccuggcacuccgccgccacggccaucuacugccucaugggcagcgggcagcugcugugggacaccgugaccggcgucaacauggcgcucuga

SEQ ID NO: 93309 - RNA, 1401 nt, Artificial Sequence; identical to SEQ ID NO: 93278
  derived and/or modified CDS sequence (opt1) from neuraminidase__InfluenzaB__AGX17954

SEQ ID NO: 93310 - RNA, 1401 nt, Artificial Sequence
  derived and/or modified CDS sequence (opt1) from neuraminidase__InfluenzaB__AGX17976
augcugcccagcaccauccagacccucacgcuguuccugaccuccggcggggugcuccugagccuguacgucuccgccagccucuccuaccugcuguacagcgacauccuccugaaguucuccccgaccgagaucaccgcccccacgaugccccuggacugcgcgaacgccagcaacgugcacgccgugaaccgcuccgccaccaagggcgucacgccccuccugccggagcccgaguggaccuacccccggcugagcugccccggguccaccuuccagaaggcccuccugaucagcccgcaccgcuucggcgagaccaaggggaacuccgcgccccugaucauccgggagcccuucaucgccugcggccccaacgagugcaagcacuucgcccucacccacuacgccgcgcagccgggcggguacuacaacggcacccgcggggaccggaacaagcugcgccaccugaucagcgugaagcucggcaagauccccacgguggagaacuccaucuuccacauggccgccuggagcggguccgccugccacgacggcaaggaguggaccuacaucggcgucgacgggcccgacaacaacgcccugcugaagaucaaguacggcgaggcguacaccgacaccuaccacagcuacgccaacaacauccuccggacgcaggaguccgccugcaacugcaucgggggcaacugcuaccugaugaucaccgacggcagcgccagcgggguguccgagugccgcuuccugaagauccgggagggccgcaucaucaaggagaucuuccccaccgggcgggugaagcacaccgaggagugcacgugcggcuucgccagcaacaagaccaucgagugcgcgugccgcgacaacuccuacaccgccaagcggccguucgucaagcucaacguggagaccgacacggccgagauccgccugaugugcaccgacaccuaccuggacacgccccggcccgacgacgggagcaucaccggccccugcgaguccaacggcgacaaggggagcggcgggaucaagggcggguucgugcaccagcgcauggccuccaagaucggccggugguacagccgcaccauguccaagaccgagcggaugggcauggggcucuacgucaaguacgacggcgacccgugggccgacagcgacgcgcuggccuucuccggggugauggugagcaugaaggagcccggcugguacuccuucggguucgagaucaaggacaagaagugcgacguccccugcaucggcaucgagauggugcacgacggcgggaaggagaccuggcacagcgccgccacggccaucuacugccugaugggcuccgggcagcuccugugggacaccgugaccggcgucgacauggcgcuguga

SEQ ID NO: 93311 - RNA, 1401 nt, Artificial Sequence
  derived and/or modified CDS sequence (opt1) from neuraminidase__InfluenzaB__AGX17987
augcugcccagcaccauccagacccucacgcuguuccugaccuccggcggggugcuccugagccuguacgucuccgugagccucuccuaccugcuguacagcgacauccuccugaaguucccgcccaccgagaucaccgcccccacgaugccccuggacugcgccaacgcguccaacgugcaggccgucaaccgcagcgccaccaagggcgugacccuccugcugccggagcccgaguggaccuacccccggcucuccugccccgggagcacguuccagaaggcccugcugaucuccccgcaccgcuucggcgagaccaaggggaacagcgcgccccucaucauccgggagcccuucaucgccugcggccccaaggagugcaagcacuucgcccugacccacuacgccgcccagccgggcggguacuacaacggcacccgcggggaccggaacaagcugcgccaccucaucuccgugaagcugggcaagauccccacggucgagaacagcaucuuccacauggcggccugguccgggagcgccugccacgacggcaaggaguggaccuacaucggcguggacgggcccgacaacaacgcccugcucaagaucaaguacggcgaggccuacaccgacaccuaccacuccuacgcgaacaacauccugcggacgcaggagagcgccugcaacugcaucgggggcaacugcuaccugaugaucaccgacggcuccgccagcggggugagcgagugccgcuuccucaagauccgggagggccgcaucaucaaggagaucuuccccaccgggcgggucaagcacaccgaggagugcacgugcggcuucgccuccaacaagaccaucgagugcgccugccgcgacaacagcuacaccgcgaagcggccguucgugaagcugaacguggagaccgacacggccgagauccgccugaugugcaccgagaccuaccucgacacgccccggcccgacgacggguccaucaccggccccugcgagagcaacggcgacaagggguccggcgggaucaagggcggguucguccaccagcgcauggccagcaagaucggccggugguacucccgcaccaugagcaagaccaagcggaugggcauggggcuguacgugaaguacgacggcgacccgugggccgacuccgacgcccuggcguucagcggggugauggucuccauggaggagcccggcugguacagcuucggguucgagaucaaggacaagaagugcgacgugcccugcaucggcaucgagauggugcacgacggcgggaaggagaccuggcacuccgccgccacggccaucuacugccucaugggcagcgggcagcugcugugggacaccgucaccggcgugaacauggcccucuga

SEQ ID NO: 93312 - RNA, 1401 nt, Artificial Sequence; identical to SEQ ID NO: 93285
  derived and/or modified CDS sequence (opt1) from neuraminidase__InfluenzaB__AGX17998

SEQ ID NO: 93313 - RNA, 1401 nt, Artificial Sequence; identical to SEQ ID NO: 93278
  derived and/or modified CDS sequence (opt1) from neuraminidase__InfluenzaB__AGX18009

SEQ ID NO: 93314 - RNA, 1401 nt, Artificial Sequence; identical to SEQ ID NO: 93311
  derived and/or modified CDS sequence (opt1) from neuraminidase__InfluenzaB__AGX18020

SEQ ID NO: 93315 - RNA, 1401 nt, Artificial Sequence; identical to SEQ ID NO: 93278
  derived and/or modified CDS sequence (opt1) from neuraminidase__InfluenzaB__AGX18031

SEQ ID NO: 93316 - RNA, 1401 nt, Artificial Sequence
  derived and/or modified CDS sequence (opt1) from neuraminidase__InfluenzaB__AGX18042
augcugcccagcaccauccagacccucacgcuguuccugaccuccggcggggugcuccugagccuguacgucuccgccagccucuccuaccugcuguacagcgacauccuccugaaguucuccccgaccgagaucaccgcccccacgaugccccugaacugcgcgaacgccagcaacgugcaggccgugaaccgcuccgccaccaagggcgucacccuccugcugcccgagccggaguggaccuacccccggcucagcugccccggguccacguuccagaaggcccugcugaucagcccccaccgcuucggcgagaccaaggggaacuccgcgccgcucaucauccgggagcccuucaucgccugcggccccaacgagugcaagcacuucgcccugacccacuacgccgcgcagcccggcggguacuacaacggcacccgcggggaccggaacaagcugcgccaccucaucagcgugaagcugggcaagaucccgacgguggagaacuccaucuuccacauggccgccuggagcggguccgccugccacgacggcaaggaguggaccuacaucggcgucgacgggcccgacaacaacgcccugcucaagaucaaguacggcgaggcguacaccgacaccuaccacagcuacgccaacaacauccugcggacgcaggaguccgccugcaacugcaucgggggcaacugcuaccugaugaucaccgacggcagcgccagcgggguguccgagugccgcuuccucaagauccgggagggccgcaucaucaaggagaucuuccccaccgggcgggugaagcacaccgaggagugcacgugcggcuucgccagcaacaagaccaucgagugcgcgugccgcgacaacuccuacaccgccaagcggcccuucgucaagcugaacguggagaucgacaccgccgagauccgccugaugugcacggacaccuaccucgacaccccgcggcccgacgacgggagcaucaccggccccugcgaguccaacggcgacaaggggagcggcgggaucaagggcggguucgugcaccagcgcauggccuccaagaucggccggugguacagccgcacgauguccaagaccgagcggaugggcauggggcuguacgucaaguacgacggcgaccccugggccgacagcgacgcgcuggccuucuccggggugauggugagcaugaaggagccgggcugguacuccuucggguucgagaucaaggacaagaagugcgacguccccugcaucggcaucgagauggugcacgacggcgggaaggagaccuggcacagcgccgccaccgccaucuacugccucaugggcuccgggcagcugcugugggacacggugaccggcgucgacauggcgcucuga

SEQ ID NO: 93317 - RNA, 1401 nt, Artificial Sequence; identical to SEQ ID NO: 93285
  derived and/or modified CDS sequence (opt1) from neuraminidase__InfluenzaB__AGX18053

SEQ ID NO: 93318 - RNA, 1401 nt, Artificial Sequence; identical to SEQ ID NO: 93285
  derived and/or modified CDS sequence (opt1) from neuraminidase__InfluenzaB__AGX18064

SEQ ID NO: 93319 - RNA, 1401 nt, Artificial Sequence
  derived and/or modified CDS sequence (opt1) from neuraminidase__InfluenzaB__AGX18075
augcugcccagcaccauccagacccucacgcuguuccugaccuccggcggggugcuccugagccuguacgucuccgccagccucuccuaccugcuguacagcgacauccuccugaaguucccgcccaccgagaucaccgcccccacgaugccccuggacugcgcgaacgccuccaacgugcaggccgugaaccgcagcgccaccaagggcgucacccuccugcugccggagcccgaguggaccuacccccggcucuccugccccgggagcacguuccagaaggcccugcugaucuccccgcaccgcuucggcgagaccaaggggaacagcgcgccccucaucauccgggagcccuucaucgccugcggccccaaggagugcaagcacuucgcccugacccacuacgccgcgcagccgggcggguacuacaacggcacccgcggggaccggaacaagcugcgccaccucaucuccgugaagcugggcaagauccccacgguggagaacagcaucuuccacauggccgccugguccgggagcuccugccacgacggcaaggaguggaccuacaucggcgucgacgggcccgacaacaacgcccugcucaagaucaaguacggcgaggccuacaccgacaccuaccacagcuacgcgaacaacauccugcggacgcaggaguccgccugcaacugcaucgggggcaacugcuaccugaugaucaccgacggcagcgccagcgggguguccgagugccgcuuccucaagauccgggagggccgcaucaucaaggagaucuuccccaccgggcgggugaagcacaccgaggagugcacgugcggcuucgccagcaacaagaccaucgagugcgccugccgcgacaacuccuacaccgcgaagcggccguucgucaagcugaacguggagaccgacacggccgagauccgccugaugugcaccgagaccuaccucgacacgccccggcccgacgacgggagcaucaccggccccugcgaguccaacggcgacaaggggagcggcgggaucaagggcggguucgugcaccagcgcauggccuccaagaucggccggugguacagccgcaccauguccaagaccaagcggaugggcauggggcuguacgucaaguacgacggcgacccgugggccgacagcgacgcccuggcguucuccggggugauggugagcauggaggagcccggcugguacuccuucggguucgagaucaaggacaagaagugcgacguccccugcaucggcaucgagauggugcacgacggcgggaaggagaccuggcacagcgccgccacggccaucuacugccucaugggcuccgggcagcugcugugggacaccgugaccggcgucaacauggcccucuga

SEQ ID NO: 93320 - RNA, 1401 nt, Artificial Sequence; identical to SEQ ID NO: 92912
  derived and/or modified CDS sequence (opt1) from neuraminidase__InfluenzaB__AGX18086

SEQ ID NO: 93321 - RNA, 1401 nt, Artificial Sequence; identical to SEQ ID NO: 92912
  derived and/or modified CDS sequence (opt1) from neuraminidase__InfluenzaB__AGX18097

SEQ ID NO: 93322 - RNA, 1401 nt, Artificial Sequence; identical to SEQ ID NO: 92865
  derived and/or modified CDS sequence (opt1) from neuraminidase__InfluenzaB__AGX18108

SEQ ID NO: 93323 - RNA, 1401 nt, Artificial Sequence
  derived and/or modified CDS sequence (opt1) from neuraminidase__InfluenzaB__AGX18119
augcugcccagcaccauccagacccucacgcuguuccugaccuccggcggggugcuccugagccuguacgucuccgccagccucuccuaccugcuguacagcgacauccuccugaaguucuccccgaccgagaucaccgcccccacgaugccccuggacugcgcgaacaccagcaacgugcaggccgugaaccgcuccgccaccaagggcgucacccuccugcugcccgagccggaguggacguacccccggcucagcugccccggguccaccuuccagaaggcccugcugaucagcccccaccgcuucggcgagaccaaggggaacuccgccccgcucaucauccgggagcccuucaucgcgugcggccccaacgagugcaagcacuucgcccugacccacuacgccgcccagcccggcggguacuacaacggcacgcgcggggaccggaacaagcugcgccaccucaucagcgugaagcugggcaagaucccgaccguggagaacuccaucuuccacauggcggccuggagcggguccgccugccacgacggcaaggaguggaccuacaucggcgucgacgggcccgacaacaacgcccugcucaagaucaaguacggcgaggccuacaccgacacguaccacagcuacgcgaacaacauccugcggacccaggaguccgccugcaacugcaucgggggcaacugcuaccugaugaucaccgacggcagcgccagcgggguguccgagugccgcuuccucaagauccgggagggccgcaucaucaaggagaucuuccccaccgggcgggugaagcacacggaggagugcacgugcggcuucgccagcaacaagaccaucgagugcgccugccgcgacaacuccuacaccgcgaagcggcccuucgucaagcugaacauggagaccgacaccgccgagaucaagcugaugugcaccgacaccuaccucgacacgccgcgccccgacgacgggagcaucaccggccccugcgaguccaacggcgacaaggggagcggcgggaucaagggcggguucgugcaccagcggauggccuccaagaucggccgcugguacagccggaccauguccaagaccgagcgcaugggcauggggcuguacgugaaguacgacggcgaccccugggccgacagcgacgcccuggcguucuccggggucauggugagcaugaaggagccgggcugguacuccuucggguucgagaucaaggacaagaagugcgacgugcccugcaucggcaucgagaugguccacgacggcgggaaggagacguggcacagcgccgccaccgccaucuacugccucaugggcuccgggcagcugcugugggacaccgugaccggcguggacauggcccucuga

SEQ ID NO: 93324 - RNA, 1401 nt, Artificial Sequence
  derived and/or modified CDS sequence (opt1) from neuraminidase__InfluenzaB__AGX18130
augcugcccagcaccauccagacccucacgcuguuccugaccuccggcggggugcuccugagccuguacgucuccgccagccucuccuaccugcuguacagcgacauccuccugaaguucuccccgaccgagaucaccgcccccacgaugccccuggacugcgcgaacgccagcaacgugcaggccgugaaccgcuccgccaccaagggcgucacccuccugcugcccgagccggaguggaccuacccccggcucagcugccccggguccacguuccagaaggcccugcugaucagcccccaccgcuucggcgagaccaaggggaacuccgcgccgcucaucauccgggagcccuucaucgccugcggccccaacgagugcaagcacuucgcccugacccacuacgccgcgcagcccggcggguacuacaacggcacccgcggggaccggaacaagcugcgccaccucaucagcgugaagcugggcaagaucccgacgguggagaacuccaucuuccacauggccgccuggagcggguccgccugccacgacggcaaggaguggaccuacaucggcgucgacgggcccgacaacaacgcccugcucaagaucaaguacggcgaggcguacaccgacaccuaccacagcuacgccaacaacauccugcggacgcaggaguccgccugcaacugcaucgggggcaacugcuaccugaugaucaccgacggcagcgccagcgggguguccgagugccgcuuccucaagauccgggagggccgcaucaucaaggagaucuuccccaccgggcgggugaagcacaccgaggagugcacgugcggcuucgccagcaacaagaccaucgagugcgcgugccgcgacaacuccuacaccgccaagcggcccuucgucaagcugaacguggagaucgacaccgccgagauccgccugaugugcacggacaccuaccucgacaccccgcggcccgacgacgggagcaucaccggccccugcgaguccaacggcgacaaggggagcggcgggaucaagggcggguucgugcaccagcgcauggccuccaagaucggccggugguacagccgcacgaugucccggaccgagcgcaugggcauggggcuguacgucaaguacgacggcgaccccugggccgacagcgacgcgcuggccuucuccggggugauggugagcaugaaggagccgggcugguacuccuucggguucgagaucaaggacaagaagugcgacguccccugcaucggcaucgagauggugcacgacggcgggaaggagaccuggcacagcgccgccaccgccaucuacugccucaugggcuccgggcagcugcugugggacacggugaccggcgucgacauggcgcucuga

SEQ ID NO: 93325 - RNA, 1401 nt, Artificial Sequence
  derived and/or modified CDS sequence (opt1) from neuraminidase__InfluenzaB__AGX18141
augcugcccagcaccauccagacccucacgcuguuccugaccuccggcggggugcuccugagccuguacgucuccgccagccucuccuaccugcuguacagcgacauccuccugaaguucccguccaccgagaucaccgcccccacgaugccccuggacugcgcgaacgccagcaacgugcaggccgugaaccgcuccgccaccaagggcaugacccuccugcugcccgagccggaguggaccuacccccggcucagcugccccggguccacguuccagaaggcccugcugaucagcccccaccgcuucggcgagaccaaggggaacuccgcgccgcucaucauccgggagcccuucaucgccugcggccccaaggagugcaagcacuucgcccugacccacuacgccgcgcagcccggcggguacuacaacggcacccgcggggaccggaacaagcugcgccaccucaucagcgucaagcugggcaagaucccgacgguggagaacuccaucuuccacauggccgccuggagcggguccgccugccacgacggcaaggaguggaccuacaucggcguggacgggcccgacaacaacgcccugcucaagaucaaguacggcgaggcguacaccgacaccuaccacagcuacgccaacaacauccugcggacgcaggaguccgccugcaacugcaucgggggcaacugcuaccugaugaucaccgacggcagcgccagcggggucuccgagugccgcuuccucaagauccgggagggccgcaucaucaaggagaucuuccccaccgggcggaucaagcacaccgaggagugcacgugcggcuucgccagcaacaagaccaucgagugcgcgugccgcgacaacuccuacaccgccaagcggcccuucgugaagcugaacguggagaccgacacggccgagauccgccugaugugcaccgagaccuaccucgacaccccgcggcccgacgacgggagcaucacgggccccugcgaguccaacggcgacaaggggagcggcgggaucaagggcggguucguccaccagcgcauggccuccaagaucggccggugguacagccgcaccauguccaagaccgagcggaugggcauggggcuguacgugaaguacgacggcgaccccugggccgagagcgacgcgcuggccuucuccggggugauggucagcauggaggagccgggcugguacuccuucggguucgagaucaaggacaagaagugcgacgugcccugcaucggcaucgagauggugcacgacggcgggaaggagaccuggcacagcgccgccacggccaucuacugccucaugggcuccgggcagcugcugugggacaccgucaccggcgugaacauggcgcucuga

SEQ ID NO: 93326 - RNA, 1401 nt, Artificial Sequence; identical to SEQ ID NO: 92912
  derived and/or modified CDS sequence (opt1) from neuraminidase__InfluenzaB__AGX18152

SEQ ID NO: 93327 - RNA, 1401 nt, Artificial Sequence
  derived and/or modified CDS sequence (opt1) from neuraminidase__InfluenzaB__AGX18163
augcugcccagcaccauccagacccucacgcuguuccugaccuccggcggggugcuccugagccuguacgucuccgccagccucuccuaccugcuguacagcgacauccuccugaaguucccguccaccgagaucaccgcccccacgaugccccuggacugcgcgaacgccagcaacgugcaggccgugaaccgcuccgccaccaagggcgucacccuccugcugcccgagccggaguggaccuacccccggcucagcugccccggguccacguuccagaaggcccugcugaucagcccccaccgcuucggcgagaccaaggggaacuccgcgccgcucaucauccgggagcccuucaucgccugcggccccaaggagugcaagcacuucgcccugacccacuacgccgcgcagcccggcggguacuacaacggcaagcgcggggaccggaacaagcugcgccaccucaucagcgugaagcugggcaagaucccgaccguggagaacuccaucuuccacauggccgccuggagcggguccgccugccacgacggcaaggaguggacguacaucggcgucgacgggcccgacaacaacgcccugcucaagaucaaguacggcgaggcguacaccgacaccuaccacagcuacgccaacaacauccugcggacccaggaguccgccugcaacugcaucgggggcaacugcuaccugaugaucacggacggcagcgccagcgggguguccgagugccgcuuccucaagauccgggagggccgcaucaucaaggagaucuuccccaccgggcggaucaagcacaccgaggagugcacgugcggcuucgccagcaacaagaccaucgagugcgcgugccgcgacaacuccuacaccgccaagcggcccuucgugaagcugaacgucgagaccgacaccgccgagauccgccugaugugcacggagaccuaccucgacaccccgcggcccgacgacgggagcaucaccggccccugcgaguccaacggcgacaaggggagcggcgggaucaagggcggguucgugcaccagcgcauggccuccaagaucggccggugguacagccgcacgauguccaagaccgagcggaugggcauggggcuguacgugaaguacgacggcgaccccugggccgacagcgacgcgcuggccuucuccggggucauggugagcauggaggagccgggcugguacuccuucggguucgagaucaaggacaagaagugcgacgugcccugcaucggcaucgagaugguccacgacggcgggaaggagaccuggcacagcgccgccaccgccaucuacugccucaugggcuccgggcagcugcugugggacacggugaccggcgugaacauggcgcucuga

SEQ ID NO: 93328 - RNA, 1401 nt, Artificial Sequence; identical to SEQ ID NO: 93278
  derived and/or modified CDS sequence (opt1) from neuraminidase__InfluenzaB__AGX18174

SEQ ID NO: 93329 - RNA, 1401 nt, Artificial Sequence; identical to SEQ ID NO: 92912
  derived and/or modified CDS sequence (opt1) from neuraminidase__InfluenzaB__AGX18185

SEQ ID NO: 93330 - RNA, 1401 nt, Artificial Sequence; identical to SEQ ID NO: 92865
  derived and/or modified CDS sequence (opt1) from neuraminidase__InfluenzaB__AGX18196

SEQ ID NO: 93331 - RNA, 1401 nt, Artificial Sequence
  derived and/or modified CDS sequence (opt1) from neuraminidase__InfluenzaB__AGX18207
augcugcccagcaccauccagacccucacgcuguuccugaccuccggcggggugcuccugagccuguacgucuccgccagccucuccuaccugcuguacagcgacauccuccugaaguucccgcccaccgagaucaccgcccccacgaugccccuggacugcgcgaacgccuccaacgugcaggccgugaaccgcagcgccaccaagggcgucacccuccugcugccggagcccgaguggaccuacccccggcucuccugccccgggagcacguuccagaaggcccugcugaucuccccgcaccgcuucggcgagaccaaggggaacagcgcgccccucaucauccgggagcccuucaucgccugcggccccaaggagugcaagcacuucgcccugacccacuacgccgcgcagccgggcggguacuacaacggcacccgcggggaccggaacaagcugcgccaccucaucuccgugaagcugggcaagauccccacgguggagaccagcaucuuccacauggccgccugguccgggagcgccugccacgacggcaaggaguggaccuacaucggcgucgacgggcccgacaacaacgcccugcucaagaucaaguacggcgaggcguacaccgacacguaccacuccuacgccaacaacauccugcggacccaggagagcgccugcaacugcaucgggggcaacugcuaccugaugaucaccgacggcuccgccagcggggugagcgagugccgcuuccucaagauccgggagggccgcaucaucaaggagaucuuccccaccgggcgggugaagcacacggaggagugcacgugcggcuucgccuccaacaagaccaucgagugcgcgugccgcgacaacagcuacaccgccaagcggccguucgucaagcugaacguggagaccgacaccgccgagauccgccugaugugcaccgagaccuaccucgacacgccccggcccgacgacggguccaucaccggccccugcgagagcaacggcgacaagggguccggcgggaucaagggcggguucgugcaccagcgcauggccagcaagaucggccggugguacucccgcaccaugagcaagaccaagcggaugggcauggggcuguacgucaaguacgacggcgacccgugggccgacuccgacgcgcuggccuucagcggggugaugguguccauggaggagcccggcugguacagcuucggguucgagaucaaggacaagaagugcgacguccccugcaucggcaucgagauggugcacgacggcgggaaggagacguggcacuccgccgccaccgccaucuacugccucaugggcagcgggcagcugcugugggacaccgugaccggcgucaacauggcgcucuga

SEQ ID NO: 93332 - RNA, 1401 nt, Artificial Sequence
  derived and/or modified CDS sequence (opt1) from neuraminidase__InfluenzaB__AGX18218
augcugcccagcaccauccagacccucacgcuguuccugaccuccggcggggugcuccugagccuguacgucuccgccagccucuccuaccugcuguacagcgacauccuccugaagcuguccccgaccgagaucaccgcccccacgaugccccucgacugcgcgaacaccagcaacgugcaggccgugaaccgcuccgccaccaagggcgucacccugcugcuccccgagccggaguggacguacccccggcugagcugccccggguccaccuuccagaaggcccugcucaucagcccccaccgcuucggcgagaccaaggggaacuccgccccgcugaucauccgggagcccuucaucgcgugcggccccaacgagugcaagcacuucgcccugacccacuacgccgcccagcccggcggguacuacaaccgcacgcggggcgaccgcaacaagcuccggcaccugaucagcgugaagcuggggaagaucccgaccguggagaacuccaucuuccacauggcggccuggagcggcuccgccugccacgacgggaaggaguggaccuacaucggcgucgacggccccgacaacaacgcccuccugaagaucaaguacggggaggccuacaccgacacguaccacagcuacgcgaacaacauccugcgcacccaggaguccgccugcaacugcaucggcgggaacugcuaccucaugaucaccgacggcagcgccagcggcguguccgagugccgguuccugaagauccgcgaggggcggaucaucaaggagaucuuccccaccggccgcgugaagcacacggaggagugcacgugcggguucgccagcaacaagaccaucgagugcgccugccgggacaacuccuacaccgcgaagcgccccuucgucaagcugaacauggagaccgacaccgccgagauccggcucaugugcaccgacaccuaccuggacacgccgcgccccgacgacggcagcaucaccgggcccugcgaguccaacggcgacaagggcagcgggggcaucaagggcggguucgugcaccagcggauggccuccaagaucgggcgcugguacagccggaccauguccaagaccgagcgcaugggcaugggccuguacgugaaguacgacggggaccccugggccgacagcgacgcccucgcguucuccggcgucauggugagcaugaaggagccggggugguacuccuucggcuucgagaucaaggacaagaagugcgacgugcccugcaucgggaucgagaugguccacgacggcggcaaggagacguggcacagcgccgccaccgccaucuacugccugaugggguccggccagcugcucugggacaccgugaccgggguggacauggcccuguga

SEQ ID NO: 93333 - RNA, 1401 nt, Artificial Sequence; identical to SEQ ID NO: 93285
  derived and/or modified CDS sequence (opt1) from neuraminidase__InfluenzaB__AGX18229

SEQ ID NO: 93334 - RNA, 1401 nt, Artificial Sequence
  derived and/or modified CDS sequence (opt1) from neuraminidase__InfluenzaB__AGX18240
augcugcccagcaccauccagacccucacgcuguuccugaccuccggcggggugcuccugagccuguacgucuccgccagccucuccuaccugcuguacagcgacauccuccugaaguucuccccgaccgagaucaccgcccccacgaugccccuggacugcgcgaacgccagcaacgugcagaccgugaaccgcuccgccaccaagggcgucacccuccugcugcccgagccggaguggacguacccccggcucagcugccccggguccaccuuccagaaggcccugcugaucagcccccaccgcuucggcgagaccaaggggaacuccgccccgcucaucauccgggagcccuucaucgcgugcggccccaacgagugcaagcacuucgcccugacccacuacgccgcccagcccggcggguacuacaacggcacgcgcggggaccggaacaagcugcgccaccucaucagcgugaagcugggcaagaucccgaccguggagaacuccaucuuccacauggcggccuggagcggguccgccugccacgacggcaaggaguggaccuacaucggcgucgacgggcccgacaacaacgcccugcucaagaucaaguacggcgaggccuacaccgacacguaccacagcuacgcgaacaacauccugcggacccaggaguccgccugcaacugcaucgggggcaacugcuaccugaugaucaccgacggcagcgccagcgggguguccgagugccgcuuccucaagauccgggagggccgcaucaucaaggagaucuuccccaccgggcgggugaagcacacggaggagugcacgugcggcuucgccagcaacaagaccaucgagugcgccugccgcgacaacuccuacaccgcgaagcggcccuucgucaagcugaacguggagaucgacaccgccgagauccgccugaugugcaccgacaccuaccucgacaccccgcggcccgacgacgggagcaucacgggccccugcgaguccaacggcgacaaggggagcggcgggaucaagggcggguucgugcaccagcgcauggccuccaagaucggccggugguacagccgcaccauguccaagaccgagcggaugggcauggggcuguacgucaaguacgacggcgaccccugggccgacagcgacgcccuggcguucuccggggugauggugagcaugaaggagccgggcugguacuccuucggguucgagaucaaggacaagaagugcgacguccccugcaucggcaucgagauggugcacgacggcgggaaggagaccuggcacagcgccgccacggccaucuacugccucaugggcuccgggcagcugcugugggacaccgugaccggcgucgacauggcccucuga

SEQ ID NO: 93335 - RNA, 1401 nt, Artificial Sequence; identical to SEQ ID NO: 93278
  derived and/or modified CDS sequence (opt1) from neuraminidase__InfluenzaB__AGX18251

SEQ ID NO: 93336 - RNA, 1401 nt, Artificial Sequence
  derived and/or modified CDS sequence (opt1) from neuraminidase__InfluenzaB__AGX18262
augcugcccagcaccauccagacccucacgcuguuccugaccuccggcggggugcuccugagccuguacgucuccgccagccucuccuaccugcuguacagcaacauccuccugaaguucuccccgaccgagaucaccgcccccacgaugccccuggacugcgcgaacgccagcaacgugcaggccgugaaccgcuccgccaccaagggcgucacccuccugcugcccgagccggaguggaccuacccccggcucagcugccccggguccacguuccagaaggcccugcugaucagcccccaccgcuucggcgagaccaaggggaacuccgcgccgcucaucauccgggagcccuucaucgccugcggccccaacgagugcaagcacuucgcccugacccacuacgccgcgcagcccggcggguacuacaacggcacccgcggggaccggaacaagcugcgccaccucaucagcgugaagcugggcaagaucccgacgguggagaacuccaucuuccacauggccgccuggagcggguccgccugccacgacggcaaggaguggaccuacaucggcgucgacgggcccgacaacaacgcccugcucaagaucaaguacggcgaggcguacaccgacaccuaccacagcuacgccaacaacauccugcggacgcaggaguccgccugcaacugcaucgggggcaacugcuaccugaugaucaccgacggcagcgccagcgggguguccgagugccgcuuccucaagauccgggagggccgcaucaucaaggagaucuuccccaccgggcgggugaagcacaccgaggagugcacgugcggcuucgccagcaacaagaccaucgagugcgcgugccgcgacaacuccuacaccgccaagcggcccuucgucaagcugaacguggagaccgacacggccgagauccgccugaugugcaccgacaccuaccucgacaccccgcggcccgacgacgggagcaucacgggccccugcgaguccaacggcgacaaggggagcggcgggaucaagggcggguucgugcaccagcgcauggccuccaaggucggccggugguacagccgcaccauguccaagaccgagcggaugggcauggggcuguacgugaaguacgacggcgaccccugggccgacagcgacgcgcuggccuucuccggggugauggucagcaugaaggagccgggcugguacuccuucggguucgagaucaaggacaagaagugcgacgugcccugcaucggcaucgagauggugcacgacggcgggaaggagaccuggcacagcgccgccacggccaucuacugccucaugggcuccgggcagcugcugugggacaccgucaccggcguggacauggcgcucuga

SEQ ID NO: 93337 - RNA, 1401 nt, Artificial Sequence; identical to SEQ ID NO: 93285
  derived and/or modified CDS sequence (opt1) from neuraminidase__InfluenzaB__AGX18273

SEQ ID NO: 93338 - RNA, 1401 nt, Artificial Sequence; identical to SEQ ID NO: 93310
  derived and/or modified CDS sequence (opt1) from neuraminidase__InfluenzaB__AGX18284

SEQ ID NO: 93339 - RNA, 1401 nt, Artificial Sequence; identical to SEQ ID NO: 93285
  derived and/or modified CDS sequence (opt1) from neuraminidase__InfluenzaB__AGX18295

SEQ ID NO: 93340 - RNA, 1401 nt, Artificial Sequence; identical to SEQ ID NO: 92912
  derived and/or modified CDS sequence (opt1) from neuraminidase__InfluenzaB__AGX18306

SEQ ID NO: 93341 - RNA, 1401 nt, Artificial Sequence
  derived and/or modified CDS sequence (opt1) from neuraminidase__InfluenzaB__AGX18317
augcugcccagcaccauccagacccucacgcuguuccugaccuccggcggggugcuccugagccuguacgucuccgccagccucuccuaccugcuguacagcgacauccuccugaaguucccguccaccgagaucaccgcccccacgaugccccuggacugcgcgaacgccagcaacgugcaggccgugaaccgcuccgccaccaagggcgucacccuccugcugcccgagccggaguggaccuacccccggcucagcugccccggguccacguuccagaaggcccugcugaucagcccccaccgcuucggcgagaccaaggggaacuccgcgccgcucaucauccgggagcccuucaucgccugcggccccaaggagugcaagcacuucgcccugacccacuacgccgcgcagcccggcggguacuacaacgagacccgcggcgaccggaacaagcugcgccaccucaucagcgugaagcuggggaagaucccgacgguggagaacuccaucuuccacauggccgccuggagcggcuccgccugccacgacgggaaggaguggaccuacaucggcgucgacggccccgacaacaacgcccugcucaagaucaaguacggggaggcguacaccgacaccuaccacagcuacgccaacaacauccugcggacgcaggaguccgccugcaacugcaucggcgggaacugcuaccugaugaucaccgacggcagcgccagcggcguguccgagugccgcuuccucaagauccgggaggggcgcaucaucaaggagaucuuccccaccggccggaucaagcacaccgaggagugcacgugcggguucgccagcaacaagaccaucgagugcgcgugccgcgacaacuccuacaccgccaagcggcccuucgugaagcugaacgucgagaccgacacggccgagauccgccugaugugcaccgagaccuaccucgacaccccgcggcccgacgacggcagcaucacggggcccugcgaguccaacggcgacaagggcagcgggggcaucaagggcggguucgugcaccagcgcauggccuccaagaucgggcggugguacagccgcaccauguccaagaccaagcggaugggcaugggccuguacgugaaguacgacggggaccccugggccgacagcgacgcgcuggccuucuccggcgucauggugagcauggaggagccggggugguacuccuucggcuucgagaucaaggacaagaagugcgacgugcccugcaucgggaucgagaugguccacgacggcggcaaggagaccuggcacagcgccgccacggccaucuacugccucaugggguccggccagcugcugugggacaccgugaccggggugaacauggcgcucuga

SEQ ID NO: 93342 - RNA, 1401 nt, Artificial Sequence; identical to SEQ ID NO: 93285
  derived and/or modified CDS sequence (opt1) from neuraminidase__InfluenzaB__AGX18328

SEQ ID NO: 93343 - RNA, 1401 nt, Artificial Sequence
  derived and/or modified CDS sequence (opt1) from neuraminidase__InfluenzaB__AGX18339
augcugcccagcaccauccagacccucacgcuguuccugaccuccggcggggugcuccugagccuguacgucuccgccagccucuccuaccugcuguacagcgacauccuccugaaguucuccccgaccgagaucaccgcccccacgaugccccuggacugcgcgaacgccagcaacgugcaggccgugaaccgcuccgccaccaagggcgucacccuccugcugcccgagccggaguggaccuacccccggcucagcugccccggguccacguuccagaaggcccugcugaucagcccccaccgcuucggcgagaccaaggggaacuccgcgccgcucaucauccgggagcccuucaucgccugcggccccaacgagugcaagcacuucgcccugacccacuacgccgcgcagcccggcggguacuacaacggcacccgcggggaccggaacaagcugcgccaccucaucagcgugaagcugggcaagaucccgacgguggagaacuccaucuuccacauggccgccuggagcggguccgccugccacgacggcaaggaguggaccuacaucggcgucgacgggcccgacaacaacgcccugcucaagaucaaguacggcgaggcguacaccgacaccuaccacagcuacgccaacaacauccugcggacgcaggaguccgccugcaacugcaucgggggcaacugcuaccugaugaucaccgacggcagcgccagcgggguguccgagugccgcuuccucaagauccgggagggccgcaucaucaaggagaucuuccccaccgggcgggugaagcacaccgaggagugcacgugcggcuucgccagcaacaagaccaucgagugcgcgugccgcgacaacuccuacaccgccaagcggcccuucgucaagcugaacguggagaccgacacggccgagauccgccugaugugcaccgacaccuaccucgacaccccgcggcccgacgacgggagcaucacgggccccugcgaguccaacggcgacaaggggagcggcgggaucaagggcggguucgugcaccagcgcauggccuccaaggucggccggugguacagccgcaccauguccaagaccgagcggaugggcauggggcuguacgugaaguacgacggcgaccccugggccgacagcgacgcgcuggccuucgggggcgugauggucuccaugaaggagccggggugguacagcuucggcuucgagaucaaggacaagaagugcgacgugcccugcaucggcaucgagauggugcacgacgggggcaaggagaccuggcacuccgccgccacggccaucuacugccucauggggagcggccagcugcugugggacaccgucaccggcguggacauggcgcucuga

SEQ ID NO: 93344 - RNA, 1401 nt, Artificial Sequence
  derived and/or modified CDS sequence (opt1) from neuraminidase__InfluenzaB__AGX18350
augcugcccagcaccauccagacccucacgcuguuccugaccuccggcggggugcuccugagccuguacgucuccgccagccucuccuaccugcuguacagcgacauccuccugaaguucuccccgaccgagaucaccgcccccacgaugccccuggacugcgcgaacgccagcaacgugcaggccaugaaccgcuccgccaccaagggcgugacccuccugcugcccgagccggaguggaccuacccccggcucagcugccccggguccacguuccagaaggcccugcugaucagcccccaccgcuucggcgagaccaaggggaacuccgcgccgcucaucauccgggagcccuucaucgccugcggccccaacgagugcaagcacuucgcccugacccacuacgccgcgcagcccggcggguacuacaacggcacccgcggggaccggaacaagcugcgccaccucaucagcgucaagcugggcaagaucccgacgguggagaacuccaucuuccacauggccgccuggagcggguccgccugccacgacggcaaggaguggaccuacaucggcguggacgggcccgacaacaacgcccugcucaagaucaaguacggcgaggcguacaccgacaccuaccacagcuacgccaacaacauccugcggacgcaggaguccgccugcaacugcaucgggggcaacugcuaccugaugaucaccgacggcagcgccagcggggucuccgagugccgcuuccucaagauccgggagggccgcaucaucaaggagaucuuccccaccgggcgggugaagcacaccgaggagugcacgugcggcuucgccagcaacaagaccaucgagugcgcgugccgcgacaacuccuacaccgccaagcggcccuucgugaagcugaacgucgagaucgacaccgccgagauccgccugaugugcacggacaccuaccucgacaccccgcggcccgacgacgggagcaucaccggccccugcgaguccaacggcgacaaggggagcggcgggaucaagggcggguucgugcaccagcgcauggccuccaagaucggccggugguacagccgcacgauguccaagaccgagcggaugggcauggggcuguacgugaaguacgacggcgaccccugggccgacagcgacgcgcuggccuucuccggggucauggugagcaugaaggagccgggcugguacuccuucggguucgagaucaaggacaagaagugcgacgugcccugcaucggcaucgagaugguccacgacggcgggaaggagaccuggcacagcgccgccaccgccaucuacugccucaugggcuccgggcagcugcugugggacacggugaccggcguggacauggcgcucuga

SEQ ID NO: 93345 - RNA, 1401 nt, Artificial Sequence; identical to SEQ ID NO: 93310
  derived and/or modified CDS sequence (opt1) from neuraminidase__InfluenzaB__AGX18361

SEQ ID NO: 93346 - RNA, 1401 nt, Artificial Sequence
  derived and/or modified CDS sequence (opt1) from neuraminidase__InfluenzaB__AGX18383
augcugcccagcaccauccagacccucacgcuguuccugaccuccggcggggugcuccugagccuguacgucuccgccagccucuccuaccugcuguacagcgacauccuccugaaguucuccccgaccgagaucaccgcccccacgaugccccuggacugcgcgaacaccagcaacgugcaggccgugaaccgcuccgccaccaagggcgucacccuccugcugcccgagccggaguggacguacccccggcucagcugccccggguccaccuuccagaaggcccugcugaucagcccccaccgcuucggcgagaccaaggggaacuccgccccgcucaucauccgggagcccuucaucgcgugcggccccaacgagugcaagcacuucgcccugacccacuacgccgcccagcccggcggguacuacaacggcacgcgcggggaccggaacaagcugcgccaccucaucagcgugaagcugggcaagaucccgaccguggagaacuccaucuuccacauggcggccuggagcggguccgccugccacgacggcaaggaguggaccuacaucggcgucgacgggcccgacaacaacgcccugcucaagaucaaguacggcgaggccuacaccgacacguaccacagcuacgcgaacaacauccugcggacccaggaguccgccugcaacugcaucgggggcaacugcuaccugaugaucaccgacggcagcgccagcgggguguccgagugccgcuuccucaagauccgggagggccgcaucaucaaggagaucuuccccaccgggcgggugaagcacacggaggagugcacgugcggcuucgccagcaacaagaccaucgagugcgccugccgcgacaacuccuacaccgcgaagcggcccuucgucaagcugaacauggagaccgacaccgccgagauccgccugaugugcaccgacaccuaccucgacacgccgcggcccgacgacgggagcaucaccggccccugcgaguccaacggcgacaaggggagcggcgggaucaagggcggguucgugcaccagcgcauggccuccaagaucggccggugguacagccgcaccauguccaagaccgagcggaugggcauggggcuguacgugaaguacgacggcgaccccugggccgacagcgacgcccuggucuucuccggggugauggugagcaugaaggagccgggcugguacuccuucggguucgagaucaaggacaagaagugcgacguccccugcaucggcaucgagauggugcacggcgggggcaaggagacguggcacagcgcggccaccgccaucuacugccucaugggguccggccagcugcugugggacaccgugaccggcgucgacauggcccucuga

SEQ ID NO: 93347 - RNA, 1401 nt, Artificial Sequence; identical to SEQ ID NO: 92912
  derived and/or modified CDS sequence (opt1) from neuraminidase__InfluenzaB__AGX18394

SEQ ID NO: 93348 - RNA, 1401 nt, Artificial Sequence
  derived and/or modified CDS sequence (opt1) from neuraminidase__InfluenzaB__AGX18405
augcugcccagcaccauccagacccucacgcuguuccugaccuccggcggggugcuccugagccuguacgucuccgccagccucuccuaccugcuguacagcgacauccuccugaaguucuccccgaccgagaucaccgcccccacgaugccccuggacugcgcgaacgccagcaacgugcacgccgugaaccgcuccgccaccaagggcgucacgccccuccugccggagcccgaguggaccuacccccggcugagcugccccggguccaccuuccagaaggcccuccugaucagcccgcaccgcuucggcgagaccaaggggaacuccgcgccccugaucauccgggagcccuucaucgccugcggccccaacgagugcaagcacuucgcccucacccacuacgccgcgcagccgggcggguacuacaacggcacccgcggggaccggaacaagcugcgccaccugaucagcgugaagcucggcaagauccccacgguggagaacuccaucuuccacauggccgccuggagcggguccgccugccacgacggcaaggaguggaccuacaucggcgucgacgggcccgacaacaacgcccugcugaagaucaaguacggcgaggcguacaccgacaccuaccacagcuacgccaacaacauccuccggacgcaggaguccgccugcaacugcaucgggggcaacugcuaccugaugaucaccgacggcagcgccagcgggguguccgagugccgcuuccugaagauccgggagggccgcaucaucaaggagaucuuccccaccgggcgggugaagcacaccgaggagugcacgugcggcuucgccagcaacaagaccaucgagugcgucugccgcgacaacuccuacaccgcgaagcggccguucgugaagcucaacguggagaccgacacggccgagauccgccugaugugcaccgacaccuaccuggacacgccccggcccgacgacgggagcaucaccggccccugcgaguccaacggcgacaaggggagcggcgggaucaagggcggguucguccaccagcgcauggccuccaagaucggccggugguacagccgcaccauguccaagaccgagcggaugggcauggggcucuacgugaaguacgacggcgacccgugggccgacagcgacgcccuggcguucuccggggugauggucagcaugaaggagcccggcugguacuccuucggguucgagaucaaggacaagaagugcgacgugcccugcaucggcaucgagauggugcacgacggcgggaaggagaccuggcacagcgccgccacggccaucuacugccugaugggcuccgggcagcuccugugggacaccgucaccggcguggacauggcccuguga

SEQ ID NO: 93349 - RNA, 1401 nt, Artificial Sequence
  derived and/or modified CDS sequence (opt1) from neuraminidase__InfluenzaB__AGX18416
augcugcccagcaccauccagacccucacgcuguuccugaccuccggcggggugcuccugagccuguacgucuccgccagccucuccuaccugcuguacagcgacauccuccugaaguucuccccgaccgagaucaccgcccccacgaugccccuggacugcgcgaacgccagcaacgugcaggccgugaaccgcuccgccaccaagggcgucacccuccugcugcccgagccggaguggaccuacccccggcucagcugccccggguccacguuccagaaggcccugcugaucagcccccaccgcuucggcgagaccaaggggaacuccgcgccgcucaucauccgggagcccuucaucgccugcggccccaacgagugcaagcacuucgcccugacccacuacgccgcgcagcccggcggguacuacaacggcacccgcggggaccggaacaagcugcgccaccucaucagcgugaagcugggcaagaucccgacgguggagaacuccaucuuccacauggccgccuggagcggguccgccugccacgacggcaaggaguggaccuacaucggcgucgacgggcccgacaacaacgcccugcucaagaucaaguacggcgaggcguacaccgacaccuaccacagcuacgccaacaacauccugcggacgcaggaguccgccugcaacugcaucgggggcaacugcuaccugaugaucaccgacggcagcgccagcgggguguccgagugccgcuuccucaagauccgggagggccgcaucaucaaggagaucuuccccaccgggcgggugaagcacaccgaggagugcacgugcggcuucgccagcaacaagaccaucgagugcgcgugccgcgacaacuccuacaccgccaagcggcccuucgucaagcugaacguggagaucgacaccgccgagauccgccugaugugcacggacaccuaccucgacaccccgcggcccgacgacgggagcaucaccggcuccugcgagagcaacggcgacaagggguccggcgggaucaagggcggguucgugcaccagcgcauggccagcaagaucggccggugguacucccgcacgaugagcaagaccgagcggaugggcauggggcuguacgucaaguacgacggcgaccccugggccgacuccgacgcgcuggccuucagcggggugaugguguccaugaaggagcccggcugguacagcuucggguucgagaucaaggacaagaagugcgacgucccgugcaucggcaucgagauggugcacgacggcgggaaggagaccuggcacuccgccgccaccgccaucuacugccucaugggcagcgggcagcugcugugggacacggugaccggcgucgacauggcgcucuga

SEQ ID NO: 93350 - RNA, 1401 nt, Artificial Sequence
  derived and/or modified CDS sequence (opt1) from neuraminidase__InfluenzaB__AGX18428
augcugcccagcaccauccagacccucacgcuguuccugaccuccggcggggugcuccugagccuguacgucuccgccagccucuccuaccugcuguacagcgacauccuccugaaguucuccaccaccgagaucacggccccgaccaugccccuggacugcgcgaacgccagcaacgugcaggccgugaaccgcuccgccaccaagggcgucacccuccugcugcccgagcccgaguggacguacccgcggcucagcugccccggguccaccuuccagaaggcccugcugaucagcccccaccgcuucggcgagaccaaggggaacuccgcgccccucaucauccgggagccguucaucgccugcggccccaaggagugcaagcacuucgcccugacccacuacgccgcgcagcccggcggguacuacaacggcacgcgcgaggaccggaacaagcugcgccaccucaucagcgugaagcuggggaagauccccaccguggagaacuccaucuuccacauggccgccuggagcggcuccgccugccacgacgggaaggaguggaccuacaucggcgucgacggcccggacagcaacgcccugcucaagaucaaguacggggaggcguacaccgacacguaccacuccuacgccaacaacauccugcggacccaggagagcgccugcaacugcaucggcgggaacugcuaccugaugaucaccgacggcagcgccuccggcaucagcgagugccgcuuccucaagauccgggaggggcgcaucaucaaggagaucuuccccaccggccgggugaagcacacggaggagugcacgugcggguucgccuccaacaagaccaucgagugcgcgugccgcgacaacagcuacaccgccaagcggcccuucgugaagcugaacgucgagaccgacaccgccgagauccgccugaugugcaccgagaccuaccucgacacgccccggccggacgacggcuccaucaccgggcccugcgagagcaacggcaacaagggcuccgggggcaucaagggcggguucgugcaccagcgcauggccagcaagaucgggcggugguacucccgcaccaugagcaagaccaagcggaugggcaugggccuguacgugaaguacgacggggaccccuggaucgacuccgacgcccuggcgcucagcggcgucaugguguccauggaggagcccgggugguacagcuucggcuucgagaucaaggacaagaagugcgacgugccgugcaucgggaucgagaugguccacgacggcggcaaggagacguggcacuccgccgccaccgccaucuacugccugauggggagcggccagcugcucugggacaccgugaccgggguggacauggcccuguga

SEQ ID NO: 93351 - RNA, 1401 nt, Artificial Sequence
  derived and/or modified CDS sequence (opt1) from neuraminidase__InfluenzaB__AGX18439
augcugcccagcaccauccagacccucacgcuguuccugaccuccggcggggugcuccugagccuguacgucuccgccagccucuccuaccugcuguacagcgacauccuccugaaguucuccccgaccgagaucaccgcccccacgaugccccuggacugcgcgaacgccagcaacgugcaggccgugaaccgcuccgccaccaagggcgucacccuccugcugcccgagccggaguggaccuacccccggcucagcugccccggguccacguuccagaaggcccugcugaucagcccccaccgcuucggcgagaccaaggggaacuccgcgccgcucaucauccgggagcccuucaucgccugcggccccaacgagugcaagcacuucgcccugacccacuacgccgcgcagcccggcggguacuacaacggcacccgcggggaccggaacaagcugcgccaccucaucagcgugaagcugggcaagaucccgacgguggagaacuccaucuuccacauggccgccuggagcggguccgccugccacgacggcaaggaguggaccuacaucggcgucgacgggcccgacaacaacgcccugcucaagaucaaguacggcgaggcguacaccgacaccuaccacagcuacgccaacaacauccugcggacgcaggaguccgccugcaacugcaucgggggcaacugcuaccugaugaucaccgacggcagcgccagcgggguguccgagugccgcuuccucaagauccgggagggccgcaucaucaaggagaucuuccccaccgggcgggugaagcacaccgaggagugcacgugcggcuucgccagcaacaagaccaucgagugcgcgugccgcgacaacuccuacaccgccaagcggcccuucgucaagcugaacguggagaucgacaccgccgagauccgccugaugugcacggacaccuaccucgacaccccgcggcccgacgacgggagcaucaccggccccugcgaguccaacggcgacaaggggagcggcgggaucaagggcggguucgugcaccagcgcauggccuccaagaucggccggugguacagccgcacgauguccaagaccgagcggaugggcauggggcuguacgucaaguacgacggcgaccccugggccgacagcgacgcgcuggccuucuccgggcucauggugagcaugaaggagccgggcugguacuccuucggguucgagaucaaggacaagaagugcgacgugcccugcaucggcaucgagaugguccacgacggcgggaaggagaccuggcacagcgccgccaccgccaucuacugccugaugggcuccgggcagcugcucugggacacggugaccggcguggacauggcgcuguga

SEQ ID NO: 93352 - RNA, 1401 nt, Artificial Sequence
  derived and/or modified CDS sequence (opt1) from neuraminidase__InfluenzaB__AGX18450
augcugcccagcaccauccagacccucacgcuguuccugaccuccggcggggugcuccugagccuguacgucuccgccagccucuccuaccugcuguacagcgacauccuccugaaguucuccccgaccgagaucaccgccagcacgaugccccuggacugcgcgaacgccuccaacgugcaggccgugaaccgcagcgccaccaagggcgucacccuccugcugcccgagcccgaguggaccuacccgcggcucuccugccccgggagcacguuccagaaggcccugcugaucagcccccaccgcuucggcgagaccaaggggaacuccgcgccccucaucauccgggagccguucaucgccugcggccccaacgagugcaagcacuucgcccugacccacuacgccgcgcagcccggcggguacuacaacggcacccgcggggaccggaacaagcugcgccaccucaucuccgugaagcugggcaagauccccacgguggagaacagcaucuuccacauggccgccugguccgggagcgccugccacgacggcaaggaguggaccuacaucggcgucgacgggccggacaacaacgcccugcucaagaucaaguacggcgaggcguacaccgacaccuaccacuccuacgccaacaacauccugcggacgcaggagagcgccugcaacugcaucgggggcaacugcuaccugaugaucaccgacggcagcgccuccggggugagcgagugccgcuuccucaagauccgggagggccgcaucaucaaggagaucuuccccaccgggcgggugaagcacaccgaggagugcacgugcggcuucgccuccaacaagaccaucgagugcgcgugccgcgacaacagcuacaccgccaagcggcccuucgucaagcugaacguggagaucgacaccgccgagauccgccugaugugcacggacaccuaccucgacacgccccggccggacgacggguccaucaccggccccugcgagagcaacggcgacaagggguccggcgggaucaagggcggguucgugcaccagcgcauggccagcaagaucggccggugguacucccgcaccaugagcaagaccgagcggaugggcauggggcuguacgucaaguacgacggcgaccccugggccgacuccgacgcgcuggccuucagcggggugaugguguccaugaaggagcccggcugguacagcuucggguucgagaucaaggacaagaagugcgacgucccgugcaucggcaucgagauggugcacgacggcgggaaggagaccuggcacuccgccgccaccgccaucuacugccucaugggcagcgggcagcugcugugggacacggugaccggcgucgacauggcgcucuga

SEQ ID NO: 93353 - RNA, 1401 nt, Artificial Sequence; identical to SEQ ID NO: 92912
  derived and/or modified CDS sequence (opt1) from neuraminidase__InfluenzaB__AGX18461

SEQ ID NO: 93354 - RNA, 1401 nt, Artificial Sequence
  derived and/or modified CDS sequence (opt1) from neuraminidase__InfluenzaB__AGX18472
augcugcccagcaccauccagacccucacgcuguuccugaccuccggcggggugcuccugagccuguacgucuccgccagccucuccuaccugcuguacagcgacauccuccugaaguucuccccgaccgagaucaccgcccccacgaugccccuggacugcgcgaacgccagcaacgugcacgccgugaaccacuccgccaccaagggcgucacgccccuccugccggagcccgaguggaccuacccccgccugagcugccccggguccaccuuccagaaggcccuccugaucagcccgcaccgguucggcgagaccaaggggaacuccgcgccccugaucauccgcgagcccuucaucgccugcggccccaacgagugcaagcacuucgcccucacccacuacgccgcgcagccgggcggguacuacaacggcacccgcggggaccggaacaagcugcggcaccugaucagcgugaagcucggcaagauccccacgguggagaacuccaucuuccacauggccgccuggagcggguccgccugccacgacggcaaggaguggaccuacaucggcgucgacgggcccgacaacaacgcccugcugaagaucaaguacggcgaggcguacaccgacaccuaccacagcuacgccaacaacauccuccgcacgcaggaguccgccugcaacugcaucgggggcaacugcuaccugaugaucaccgacggcagcgccagcgggguguccgagugccgguuccugaagauccgcgagggccggaucaucaaggagaucuuccccaccgggcgcgugaagcacaccgaggagugcacgugcggcuucgccagcaacaagaccaucgagugcgcgugccgggacaacuccuacaccgccaagcgcccguucgucaagcucaacguggagaccgacacggccgagauccggcugaugugcaccgacaccuaccuggacacgccccgccccgacgacgggagcaucaccggccccugcgaguccaacggcgacaaggggagcggcgggaucaagggcggguucgugcaccagcggauggccuccaagaucggccgcugguacagccggaccauguccaagaccgagcgcaugggcauggggcucuacgucaaguacgacggcgacccgugggccgacagcgacgcgcuggccuucuccggggugauggugagcaugaaggagcccggcugguacuccuucggguucgagaucaaggacaagaagugcgacguccccugcaucggcaucgagauggugcacgacggcgggaaggagaccuggcacagcgccgccacggccaucuacugccugaugggcuccgggcagcuccugugggacaccgugaccggcgucgacauggcgcuguga

SEQ ID NO: 93355 - RNA, 1401 nt, Artificial Sequence; identical to SEQ ID NO: 92912
  derived and/or modified CDS sequence (opt1) from neuraminidase__InfluenzaB__AGX18483

SEQ ID NO: 93356 - RNA, 1401 nt, Artificial Sequence; identical to SEQ ID NO: 92659
  derived and/or modified CDS sequence (opt1) from neuraminidase__InfluenzaB__AGX18494

SEQ ID NO: 93357 - RNA, 1401 nt, Artificial Sequence
  derived and/or modified CDS sequence (opt1) from neuraminidase__InfluenzaB__AGX18505
augcugcccagcaccauccagacccucacgcuguuccugaccuccggcggggugcuccugagccuguacgucuccgccagccucuccuaccugcuguacagcgacauccuccugaaguucuccccgaccgagaucaccgcccccacgaugccccuggacugcgcgaacgccagcaacgugcaggccgugaaccgcuccgccaccaagggcgucacccuccugcugcccgagccggaguggaccuacccccggcucagcugccccggguccacguuccagaaggcccugcugaucagcccccaccgcuucggcgagaccaaggggaacuccgcgccgcucaucauccgggagcccuucaucgccugcggccccaacgagugcaagcacuucgcccugacccacuacgccgcgcagcccggcggguacuacaacggcacccgcggggaccggaacaagcugcgccaccucaucagcgugaagcugggcaagaucccgacgguggagaacuccaucuuccacauggccgccuggagcggguccgccugccacgacggcaaggaguggaccuacaucggcgucgacgggcccgacaacaacgcccugcucaagaucaaguacggcgaggcguacaccgacaccuaccacagcuacgccaacaagauccugcggacgcaggaguccgccugcaacugcaucgggggcaacugcuaccugaugaucaccgacggcagcgccagcgggguguccgagugccgcuuccucaagauccgggagggccgcaucaucaaggagaucuuccccaccgggcgggugaagcacaccgaggagugcacgugcggcuucgccagcaacaagaccaucgagugcgcgugccgcgacaacuccuacaccgccaagcggcccuucgucaagcugaacguggagaccgacacggccgagauccgccugaugugcaccgacaccuaccucgacaccccgcggcccgacgacgggagcaucacgggccccugcgaguccaacggcgacaaggggagcggcgggaucaagggcggguucgugcaccagcgcauggccuccaagaucggccggugguacagccgcaccaucuccaagaccgagcggaugggcauggggcuguacgucaaguacgacggcgaccccugggccgacagcgacgcgcuggccuucuccggggugauggugagcaugaaggagccgggcugguacuccuucggguucgagaucaaggacaagaagugcgacguccccugcaucggcaucgagauggugcacgacggcgggaaggagaccuggcacagcgccgccacggccaucuacugccucaugggcuccgggcagcugcugugggacaccgugaccggcgucgacauggcgcucuga

SEQ ID NO: 93358 - RNA, 1401 nt, Artificial Sequence
  derived and/or modified CDS sequence (opt1) from neuraminidase__InfluenzaB__AGX18516
augcugcccagcaccauccagacccucacgcuguuccugaccuccggcggggugcuccugagccuguacgucuccgccagccucuccuaccugcuguacagcgacauccuccugaaguucuccccgaccgagaucaccgcccccacgaugccccuggacugcgcgaacgccagcaacgugcaggccgugaaccgcuccgccaccaagggcgucacccuccugcugcccgagccggaguggaccuacccccggcucagcugccccggguccacguuccagaaggcccugcugaucagcccccaccgcuucggcgagaccaaggggaacuccgcgccgcucaucauccgggagcccuucaucgccugcggccccaacgagugcaagcacuucgcccugacccacuacgccgcgcagcccggcggguacuacaacggcacccgcggggaccggaacaagcugcgccaccucaucagcgugaagcugggcaagaucccgacgguggagaacuccaucuuccacauggccgccuggagcggguccgccugccacgacggcaaggaguggaccuacaucggcgucgacgggcccgacaacaacgcccugcucaagaucaaguacggcgaggcguacaccgacaccuaccacagcuacgccaacaagauccugcggacgcaggaguccgccugcaacugcaucgggggcaacugcuaccugaugaucaccgacggcagcgccagcgggguguccgagugccgcuuccucaagauccgggagggccgcaucaucaaggagaucuuccccaccgggcgggugaagcacaccgaggagugcacgugcggcuucgccagcaacaagaccaucgagugcgcgugccgcgacaacuccuacaccgccaagcggcccuucgucaagcugaacguggagaccgacacggccgagauccgccugaugugcaccgacaccuaccucgacaccccgcggcccgacgacgggagcaucacgggccccugcgaguccaacggcgacaaggggagcggcgggaucaagggcggguucgugcaccagcgcauggccuccaagaucggccggugguacagccgcaccaucuccaagaccgagcggaugggcauggggcuguacgucaaguacgacggcgaccccugggccgacagcgacgcgcuggccuucuccggggugauggugagcaugaaggagccgggcugguacuccuucggguucgagaucaaggacaagaagugcgacguccccugcaucggcaucgagauggugcacggcgggggcaaggagaccuggcacagcgccgccacggccaucuacugccucaugggguccggccagcugcugugggacaccgugaccggcgucgacauggcgcucuga

SEQ ID NO: 93359 - RNA, 1401 nt, Artificial Sequence; identical to SEQ ID NO: 92659
  derived and/or modified CDS sequence (opt1) from neuraminidase__InfluenzaB__AGX18527

SEQ ID NO: 93360 - RNA, 1401 nt, Artificial Sequence; identical to SEQ ID NO: 92659
  derived and/or modified CDS sequence (opt1) from neuraminidase__InfluenzaB__AGX18538

SEQ ID NO: 93361 - RNA, 1401 nt, Artificial Sequence; identical to SEQ ID NO: 92659
  derived and/or modified CDS sequence (opt1) from neuraminidase__InfluenzaB__AGX18549

SEQ ID NO: 93362 - RNA, 1401 nt, Artificial Sequence; identical to SEQ ID NO: 92659
  derived and/or modified CDS sequence (opt1) from neuraminidase__InfluenzaB__AGX18560

SEQ ID NO: 93363 - RNA, 1401 nt, Artificial Sequence; identical to SEQ ID NO: 92659
  derived and/or modified CDS sequence (opt1) from neuraminidase__InfluenzaB__AGX18571

SEQ ID NO: 93364 - RNA, 1401 nt, Artificial Sequence
  derived and/or modified CDS sequence (opt1) from neuraminidase__InfluenzaB__AGX18582
augcugcccagcaccauccagacccucacgcuguuccugaccuccggcggggugcuccugagccuguacguccucgccucccugagcuaccugcucuacuccgacauccugcugaaguucagcccgaccgagaucaccgcccccacgaugccccucgacugcgcgaacgccuccaacgugcacgccgugaaccgcagcgccaccaagggcgucacccugcugcuccccgagccggagugggccuacccccggcuguccugccccgggagcaccuuccagaaggcgcugcucaucagcccccaccgcuucggcgagacgaaggggaacuccgccccgcugaucauccgggagcccuucaucgccugcggccccaacgagugcaagcacuucgcccugacccacuacgcggcccagcccggcggguacuacaacggcacccgcggggaccggaacaagcuccgccaccugaucuccgugaagcugggcaagaucccgaccguggagaacagcaucuuccacauggccgccugguccgggagcgccugccacgacggcaaggaguggacguacaucggcgucgacgggcccgacaacaacgcgcuccugaagaucaaguacggcgaggccuacaccgacaccuaccacuccuacgccaacaacauccugcggacccaggagagcgccugcaacugcaucgggggcaacugcuaccucaugaucacggacggcuccgccagcggggugagcgagugccgcuuccugaagauccgggagggccgcaucaucaaggagaucuuccccaccgggcgggugaagcacaccgaggagugcacgugcggcuucgcguccaacaagaccaucgagugcgccugccgcgacaacagcuacaccgccaagcggcccuucgucaagcugaacguggagaccgacaccgccgagauccgccucaugugcacggacaccuaccuggacaccccgcggcccgacgacggguccaucaccggccccugcgagagcaacggcgacaagggguccggcgggaucaagggcggguucgugcaccagcgcauggccagcaagaucggccggugguacucccgcacgaugagcaagaccgagcggaugggcauggggcuguacgucaaguacgacggcgaccccugggcggacuccgacgcccucgccuucagcggggugaugguguccaugaaggagccgggcugguacagcuucggguucgagaucaaggacaagaagugcgacguccccugcaucggcaucgagauggugcacgacggcgggaaggagaccuggcacuccgccgccaccgcgaucuacugccugaugggcagcgggcagcugcucugggacacggugaccggcgucgacauggcccuguga

SEQ ID NO: 93365 - RNA, 1401 nt, Artificial Sequence; identical to SEQ ID NO: 92659
  derived and/or modified CDS sequence (opt1) from neuraminidase__InfluenzaB__AGX18593

SEQ ID NO: 93366 - RNA, 1401 nt, Artificial Sequence; identical to SEQ ID NO: 92659
  derived and/or modified CDS sequence (opt1) from neuraminidase__InfluenzaB__AGX18604

SEQ ID NO: 93367 - RNA, 1401 nt, Artificial Sequence
  derived and/or modified CDS sequence (opt1) from neuraminidase__InfluenzaB__AGX18615
augcugcccagcaccauccagacccucacgcuguuccugaccuccggcggggugcuccugagccuguacgucuccgccagccucuccuaccugcuguacagcgacauccuccugaaguucuccccgaccgagaucaccgcccccacgaugccccuggacugcgcgaacgccagcaacgugcaggccgugaaccgcuccgccaccaagggcgucacccuccugcugcccgagccggaguggaccuacccccggcucagcugccccggguccacguuccagaaggcccugcugaucagcccccaccgcuucggcgagaccaaggggaacuccgcgccgcucaucauccgggagcccuucaucgccugcggccccaacgagugcaagcacuucgcccugacccacuacgccgcgcagcccggcggguacuacaacggcacccgcggggaccggaacaagcugcgccaccucaucagcgugaagcugggcaagaucccgacgguggagaacuccaucuuccacauggccgccuggagcggguccgccugccacgacggcaaggaguggaccuacaucggcgucgacgggcccgacaacaacgcccugcucaagaucaaguacggcgaggcguacaccgacaccuaccacagcuacgccaacaagauccugcggacgcaggaguccgccugcaacugcaucgggggcaacugcuaccugaugaucaccgacggcagcgccagcgggguguccgagugccgcuuccucaagauccgggagggccgcaucaucaaggagaucuuccccaccgggcgggugaagcacaccgaggagugcacgugcggcuucgccagcaacaagaccaucgagugcgcgugccgcgacaacuccuacaccgccaagcggcccuucgucaagcugaacguggagaccgacacggccgagauccgccugaugugcaccgacaccuaccucgacaccccgcggcccgacgacgggagcaucacgggccccugcgaguccaacggcaacaaggggagcggcgggaucaagggcggguucgugcaccagcgcauggccuccaagaucggccggugguacagccgcaccauguccaagaccgagcggaugggcauggggcuguacgucaaguacgacggcgaccccugggccgacagcgacgcgcuggccuucuccggggugauggugagcaugaaggagccgggcugguacuccuucggguucgagaucaaggacaagaagugcgacguccccugcaucggcaucgagauggugcacgacggcgggaaggagaccuggcacagcgccgccacggccaucuacugccucaugggcuccgggcagcugcugugggacaccgugaccggcgucgacauggcgcucuga

SEQ ID NO: 93368 - RNA, 1401 nt, Artificial Sequence
  derived and/or modified CDS sequence (opt1) from neuraminidase__InfluenzaB__AGX18626
augcugcccagcaccauccagacccucacgcuguuccugaccuccggcggggugcuccugagccuguacgucuccgccagccucuccuaccugcuguacagcgacauccuccugaaguucuccccgaccgagaucaccgcccccacgaugccccuggacugcgcgaacgccagcaacgugcaggccgugaaccgcuccgccaccaagggcgucacccuccugcugcccgagccggaguggaccuacccccggcucagcugccccggguccacguuccagaaggcccugcugaucagcccccaccgcuucggcgagaccaaggggaacuccgcgccgcucauccugcgggagcccuucaucgccugcggccccaacgagugcaagcacuucgcccugacccacuacgccgcgcagcccggcggguacuacaacggcacccgcggggaccggaacaagcuccgccaccugaucagcgugaagcugggcaagaucccgacgguggagaacuccaucuuccacauggccgccuggagcggguccgccugccacgacggcaaggaguggaccuacaucggcgucgacgggcccgacaacaacgcccuccugaagaucaaguacggcgaggcguacaccgacaccuaccacagcuacgccaacaagauccugcggacgcaggaguccgccugcaacugcaucgggggcaacugcuaccucaugaucaccgacggcagcgccagcgggguguccgagugccgcuuccugaagauccgggagggccgcaucaucaaggagaucuuccccaccgggcgggugaagcacaccgaggagugcacgugcggcuucgccagcaacaagaccaucgagugcgcgugccgcgacaacuccuacaccgccaagcggcccuucgucaagcugaacguggagaccgacacggccgagauccgccucaugugcaccgacaccuaccuggacaccccgcggcccgacgacgggagcaucacgggccccugcgaguccaacggcgacaaggggagcggcgggaucaagggcggguucgugcaccagcgcauggccuccaagaucggccggugguacagccgcaccauguccaagaccgagcggaugggcauggggcuguacgucaaguacgacggcgaccccugggccgacagcgacgcgcucgccuucuccggggugauggugagcaugaaggagccgggcugguacuccuucggguucgagaucaaggacaagaagugcgacguccccugcaucggcaucgagauggugcacgacggcgggaaggagaccuggcacagcgccgccacggccaucuacugccugaugggcuccgggcagcugcucugggacaccgugaccggcgucgacauggcgcuguga

SEQ ID NO: 93369 - RNA, 1401 nt, Artificial Sequence; identical to SEQ ID NO: 92659
  derived and/or modified CDS sequence (opt1) from neuraminidase__InfluenzaB__AGX18637

SEQ ID NO: 93370 - RNA, 1401 nt, Artificial Sequence; identical to SEQ ID NO: 92659
  derived and/or modified CDS sequence (opt1) from neuraminidase__InfluenzaB__AGX18648

SEQ ID NO: 93371 - RNA, 1401 nt, Artificial Sequence; identical to SEQ ID NO: 92659
  derived and/or modified CDS sequence (opt1) from neuraminidase__InfluenzaB__AGX18659

SEQ ID NO: 93372 - RNA, 1401 nt, Artificial Sequence; identical to SEQ ID NO: 92659
  derived and/or modified CDS sequence (opt1) from neuraminidase__InfluenzaB__AGX18670

SEQ ID NO: 93373 - RNA, 1401 nt, Artificial Sequence
  derived and/or modified CDS sequence (opt1) from neuraminidase__InfluenzaB__AGX18681
augcugcccagcaccauccagacccucacgcuguuccugaccuccggcggggugcuccugagccuguacgucuccgccagccucuccuaccugcuguacagcgacauccuccugaaguucuccccgaccgagaucaccgcccccacgaugccccuggacugcgcgaacgccagcaacgugcaggccgugaaccgcuccgccaccaagggcgucacccuccugcugcccgagccggaguggaccuacccccggcucagcugccccggguccacguuccagaaggcccugcugaucagcccccaccgcuucggcgagaccaaggggaacuccgcgccgcucaucgugcgggagcccuucaucgccugcggccccaacgagugcaagcacuucgcccugacccacuacgccgcgcagcccggcggguacuacaacggcacccgcggggaccggaacaagcugcgccaccucaucagcgugaagcugggcaagaucccgacggucgagaacuccaucuuccacauggccgccuggagcggguccgccugccacgacggcaaggaguggaccuacaucggcguggacgggcccgacaacaacgcccugcucaagaucaaguacggcgaggcguacaccgacaccuaccacagcuacgccaacaagauccugcggacgcaggaguccgccugcaacugcaucgggggcaacugcuaccugaugaucaccgacggcagcgccagcgggguguccgagugccgcuuccucaagauccgggagggccgcaucaucaaggagaucuuccccaccgggcgggucaagcacaccgaggagugcacgugcggcuucgccagcaacaagaccaucgagugcgcgugccgcgacaacuccuacaccgccaagcggcccuucgugaagcugaacguggagaccgacacggccgagauccgccugaugugcaccgacaccuaccucgacaccccgcggcccgacgacgggagcaucacgggccccugcgaguccaacggcgacaaggggagcggcgggaucaagggcggguucguccaccagcgcauggccuccaagaucggccggugguacagccgcaccauguccaagaccgagcggaugggcauggggcuguacgugaaguacgacggcgaccccugggccgacagcgacgcgcuggccuucuccggggugauggucagcaugaaggagccgggcugguacuccuucggguucgagaucaaggacaagaagugcgacgugcccugcaucggcaucgagauggugcacgacggcgggaaggagaccuggcacagcgccgccacggccaucuacugccucaugggcuccgggcagcugcugugggacaccgucaccggcguggacauggcgcucuga

SEQ ID NO: 93374 - RNA, 1401 nt, Artificial Sequence; identical to SEQ ID NO: 92659
  derived and/or modified CDS sequence (opt1) from neuraminidase__InfluenzaB__AGX18692

SEQ ID NO: 93375 - RNA, 1401 nt, Artificial Sequence
  derived and/or modified CDS sequence (opt1) from neuraminidase__InfluenzaB__AGX18703
augcugcccagcaccauccagacccucacgcuguuccugaccuccggcggggugcuccugagccuguacgucuccgccagccucuccuaccugcuguacagcgacauccuccugaaguucccguccaccgagaucaccgcccccacgaugccccuggacugcgcgaacgccagcaacgugcaggccgugaaccucuccgccaccaagggcgucacccugcugcuccccgagccggaguggaccuacccccgccugagcugccccggguccacguuccagaaggcccugcucaucagcccccaccgguucggcgagaccaaggggaacuccgcgccgcugaucauccgcgagcccuucaucgccugcggccccaaggagugcaagcacuucgcccugacccacuacgccgcgcagcccggcggguacuacaacggcacccgcggggaccggaacaagcuccggcaccugaucagcgugaagcugggcaagaucccgacgguggagaacuccaucuuccacauggccgccuggagcggguccgccugccacgacggcaaggaguggaccuacaucggcgucgacgggcccgacaacaacgcccuccugaagaucaaguacggcgaggcguacaccgacaccuaccacagcuacgccaacaacauccugcgcacgcaggaguccgccugcaacugcaucgggggcaacugcuaccucaugaucaccgacggcagcgccagcgggguguccgagugccgguuccugaagauccgcgagggccggaucaucaaggagaucuuccccaccgggcgcaucaagcacaccgaggagugcacgugcggcuucgccagcaacaagaccaucgagugcgcgugccgggacaacuccuacaccgccaagcgccccuucgugaagcugaacgucgagaccgacacggccgagauccggcucaugugcaccgagaccuaccuggacaccccgcgccccgacgacgggagcaucacgggccccugcgaguccaacggcgacaaggggagcggcgggaucaagggcggguucgugcaccagcggauggccuccaagaucggccgcugguacagccggaccauguccaagaccgagcgcaugggcauggggcuguacgugaaguacgacggcgaccccugggccgacagcgacgcgcucgccuucuccggggucauggugagcauggaggagccgggcugguacuccuucggguucgagaucaaggacaagaagugcgacgugcccugcaucggcaucgagaugguccacgacggcgggaaggagaccuggcacagcgccgccacggccaucuacugccugaugggcuccgggcagcugcucugggacaccgugaccggcgugaacauggcgcuguga

SEQ ID NO: 93376 - RNA, 1401 nt, Artificial Sequence; identical to SEQ ID NO: 92659
  derived and/or modified CDS sequence (opt1) from neuraminidase__InfluenzaB__AGX18714

SEQ ID NO: 93377 - RNA, 1401 nt, Artificial Sequence; identical to SEQ ID NO: 92659
  derived and/or modified CDS sequence (opt1) from neuraminidase__InfluenzaB__AGX18725

SEQ ID NO: 93378 - RNA, 1401 nt, Artificial Sequence
  derived and/or modified CDS sequence (opt1) from neuraminidase__InfluenzaB__AGX18736
augcugcccagcaccauccagacccucacgcuguuccugaccuccggcggggugcuccugagccuguacgucuccgccagccucuccuaccugcuguacagcgacauccuccugaaguucuccccgaccgagaucaccgcccccacgaugccccuggacugcgcgaacgccagcaacgugcaggccgugaaccgcuccgccaccaagggcgucacccuccugcugcccgagccggaguggaccuacccccggcucagcugccccggguccacguuccagaaggcccugcugaucagcccccaccgcuucggcgagaccaaggggaacuccgcgccgcucaucauccgggagcccuucaucgccugcggccccaacgagugcaagcacuucgcccugacccacuacgccgcgcagcccggcggguacuacaacggcaccgggggcgaccgcaacaagcugcggcaccucaucagcgugaagcuggggaagaucccgacgguggagaacuccaucuuccacauggccgccuggagcggcuccgccugccacgacggcaaggaguggaccuacaucggggucgacggccccgacaacaacgcccugcucaagaucaaguacggggaggcguacaccgacaccuaccacagcuacgccaacaagauccugcgcacgcaggaguccgccugcaacugcaucggcggcaacugcuaccugaugaucaccgacgggagcgccagcggcguguccgagugccgguuccucaagauccgcgaggggcggaucaucaaggagaucuuccccaccggccgcgugaagcacaccgaggagugcacgugcggguucgccagcaacaagaccaucgagugcgcgugccgggacaacuccuacaccgccaagcgccccuucgucaagcugaacguggagaccgacacggccgagauccggcugaugugcaccgacaccuaccucgacaccccgcgccccgacgacggcagcaucacgggccccugcgaguccaacggggacaagggcagcgggggcaucaagggcggguucgugcaccagcggauggccuccaagaucggccgcugguacagccggaccauguccaagaccgagcgcauggggaugggccuguacgucaaguacgacggggaccccugggccgacagcgacgcgcuggccuucuccggcgugauggugagcaugaaggagccggggugguacuccuucggcuucgagaucaaggacaagaagugcgacguccccugcaucggcaucgagauggugcacgacgggggcaaggagaccuggcacagcgccgccacggccaucuacugccucaugggguccggccagcugcugugggacaccgugaccggcgucgacauggcgcucuga

SEQ ID NO: 93379 - RNA, 1401 nt, Artificial Sequence; identical to SEQ ID NO: 92659
  derived and/or modified CDS sequence (opt1) from neuraminidase__InfluenzaB__AGX18758

SEQ ID NO: 93380 - RNA, 1401 nt, Artificial Sequence; identical to SEQ ID NO: 92659
  derived and/or modified CDS sequence (opt1) from neuraminidase__InfluenzaB__AGX18769

SEQ ID NO: 93381 - RNA, 1401 nt, Artificial Sequence; identical to SEQ ID NO: 93118
  derived and/or modified CDS sequence (opt1) from neuraminidase__InfluenzaB__AGX18780

SEQ ID NO: 93382 - RNA, 1401 nt, Artificial Sequence; identical to SEQ ID NO: 92659
  derived and/or modified CDS sequence (opt1) from neuraminidase__InfluenzaB__AGX18791

SEQ ID NO: 93383 - RNA, 1401 nt, Artificial Sequence; identical to SEQ ID NO: 92659
  derived and/or modified CDS sequence (opt1) from neuraminidase__InfluenzaB__AGX18802

SEQ ID NO: 93384 - RNA, 1401 nt, Artificial Sequence
  derived and/or modified CDS sequence (opt1) from neuraminidase__InfluenzaB__AGX18813
augcugcccagcaccauccagacccucacgcuguuccugaccuccggcggggugcuccugagccuguacgucuccgccagccucuccuaccugcuguacagcgacauccuccugaaguucccguccaccgagaucaccgcccccacgaugccccuggacugcgcgaacgccagcaacgugcaggccgugaaccgcuccgccaccaagggcgucacccuccugcugcccgagccggaguggaccuacccccggcucagcugccccggguccacguuccagaaggcccugcugaucagcccccaccgcuucggcgagaccaaggggaacuccgcgccgcucaucauccgggagcccuucaucgccugcggccccaaggagugcaagcacuucgcccugacccacuacgccgcgcagcccggcggguacuacaacggcacccgcggggaccggaacaagcugcgccaccucaucagcgugaagcugggcaagaucccgacgguggagaacuccaucuuccacauggccgccuggagcggguccgccugccacgacggcaaggaguggaccuacaucggcgucgacgggcccgacaacaacgcccugcucaagaucaaguacggcgaggcguacaccgacaccuaccacagcuacgccaacaacauccugcggacgcaggaguccgccugcaacugcaucgggggcaacugcuaccugaugaucaccgacggcagcgccagcgggguguccgagugccgcuuccucaagauccgggagggccgcaucaucaaggagaucuuccccaccgggcggaucaagcacaccgaggagugcacgugcggcuucgccagcaacaagaccaucgagugcgcgugccgcgacaacuccuacaccgccaagcggcccuucgugaagcugaacgucgagaccgacacggccgagauccgccugaugugcaccgagaccuaccucgacaccccgcggcccgacgacgggagcaucacgggccccugcgaguccaacggcgacaaggggagcggcgggaucaagggcggguucgugcaccagcgcauggccuccaagaucggccggugguacagccgcaccauguccaagaccgagcggaugggcauggggcuguacgugaaguacgacggcgaccccugggccgacagcgacgcgcuggucuucuccggggugauggugagcauggaggagccgggcugguacuccuucggguucgagaucaaggacaagaagugcgacguccccugcaucggcaucgagauggugcacgacggcgggaaggagaccuggcacagcgccgccacggccaucuacugccucaugggcuccgggcagcugcugugggacaccgugaccggcgucaacauggcccucuga

SEQ ID NO: 93385 - RNA, 1401 nt, Artificial Sequence; identical to SEQ ID NO: 93118
  derived and/or modified CDS sequence (opt1) from neuraminidase__InfluenzaB__AGX18824

SEQ ID NO: 93386 - RNA, 1401 nt, Artificial Sequence
  derived and/or modified CDS sequence (opt1) from neuraminidase__InfluenzaB__AGX18846
augcugcccagcaccauccagacccucacgcuguuccugaccuccggcggggugcuccugagccuguacgucuccgccagccucuccuaccugcuguacagcgacauccuccugaaguucuccccgaccgagaucaccgcccccacgaugccccuggacugcgcgaacgccagcaacgugcaggccgugaaccgcuccgccaccaagggcgucacccuccugcugagcgagcccgaguggaccuacccgcggcucuccugccccgggagcacguuccagaaggcccugcugaucagcccccaccgcuucggcgagaccaaggggaacuccgcgccccucaucauccgggagccguucaucgccugcggccccaacgagugcaagcacuucgcccugacccacuacgccgcgcagcccggcggguacuacaacggcacccgcggggaccggaacaagcugcgccaccucaucuccgugaagcugggcaagauccccacgguggagaacagcaucuuccacauggccgccugguccgggagcgccugccacgacggcaaggaguggaccuacaucggcgucgacgggccggacaacaacgcccugcucaagaucaaguacggcgaggcguacaccgacaccuaccacuccuacgccaacaagauccugcggacgcaggagagcgccugcaacugcaucgggggcaacugcuaccugaugaucaccgacggcagcgccuccggggugagcgagugccgcuuccucaagauccgggagggccgcaucaucaaggagaucuuccccaccgggcgggugaagcacaccgaggagugcacgugcggcuucgccuccaacaagaccaucgagugcgcgugccgcgacaacagcuacaccgccaagcggcccuucgucaagcugaacguggagaccgacacggccgagauccgccugaugugcaccgacaccuaccucgacacgccccggccggacgacggguccaucaccggccccugcgagagcaacggcgacaagggguccggcgggaucaagggcggguucgugcaccagcgcauggccagcaagaucggccggugguacucccgcaccaugagcaagaccgagcggaugggcauggggcuguacgucaaguacgacggcgaccccugggccgacuccgacgcgcuggccuucagcggggugaugguguccaugaaggagcccggcugguacagcuucggguucgagaucaaggacaagaagugcgacgucccgugcaucggcaucgagauggugcacgacggcgggaaggagaccuggcacuccgccgccacggccaucuacugccucaugggcagcgggcagcugcugugggacaccgugaccggcgucgacauggcgcucuga

SEQ ID NO: 93387 - RNA, 1401 nt, Artificial Sequence; identical to SEQ ID NO: 92659
  derived and/or modified CDS sequence (opt1) from neuraminidase__InfluenzaB__AGX18857

SEQ ID NO: 93388 - RNA, 1401 nt, Artificial Sequence; identical to SEQ ID NO: 93386
  derived and/or modified CDS sequence (opt1) from neuraminidase__InfluenzaB__AGX18868

SEQ ID NO: 93389 - RNA, 1401 nt, Artificial Sequence; identical to SEQ ID NO: 93386
  derived and/or modified CDS sequence (opt1) from neuraminidase__InfluenzaB__AGX18879

SEQ ID NO: 93390 - RNA, 1401 nt, Artificial Sequence
  derived and/or modified CDS sequence (opt1) from neuraminidase__InfluenzaB__AGX18890
augcugcccagcaccauccagacccucacgcuguuccugaccuccggcggggugcuccugagccuguacgucuccgccagccucuccuaccugcuguacagcgacauccuccugaaguucccguccaccgagaucaccgcccccacgaugccccuggacugcgcgaacgccagcaacgugcaggccgugaaccgcuccgccaccaagggcgucacccuccugcugcccgagccggaguggaccuacccccggcucagcugccccggguccacguuccagaaggcccugcugaucagcccccaccgcuucggcgagaccaaggggaacuccgcgccgcucaucauccgggagcccuucaucgccugcggccccaaggagugcaagcacuucgcccugacccacuacgccgcgcagcccggcggguacuacaacggcacccgcggggaccggaacaagcugcgccaccucaucagcgugaagcugggcaagaucccgacgguggagaacuccaucuuccacauggccgccuggagcggguccgccugccacgacggcaaggaguggaccuacaucggcgucgacgggcccgacaacaacgcccugcucaagaucaaguacggcgaggcguacaccgacaccuaccacagcuacgccaacaacauccugcggacgcaggaguccgccugcaacugcaucgggggcaacugcuaccugaugaucaccgacggcagcgccagcgggguguccgagugccgcuuccucaagauccgggagggccgcaucaucaaggagaucuuccccaccgggcggaucaagcacaccgaggagugcacgugcggcuucgccagcaacaagaccaucgagugcgcgugccgcgacaacuccuacaccgccaagcggcccuucgugaagcugaacgucgagaccgacacggccgagauccgccugaugugcaccgagaccuaccucgacaccccgcggcccgacgacgggagcaucacgggccccugcgaguccaacggcgacaaggggagcggcgggaucaagggcggguucgugcaccagcgcauggccuccaagaucggccggugguacagccgcaccauguccaagaccgagcggaugggcauggggcuguacgugaaguacgacggcgaccccugggccgacagcgacgcgcuggccuucuccggggucauggugagcauggaggagccgggcugguacuccuucggguucgagaucaaggacaagaagugcgacgugcccugcaucggcaucgagaugguccacgacggcgggaaggagaccuggcacagcgccgccacgaccaucuacugccucaugggcuccgggcagcugcugugggacaccgugaccggcgugaacauggcccucuga

SEQ ID NO: 93391 - RNA, 1401 nt, Artificial Sequence; identical to SEQ ID NO: 92659
  derived and/or modified CDS sequence (opt1) from neuraminidase__InfluenzaB__AGX18912

SEQ ID NO: 93392 - RNA, 1401 nt, Artificial Sequence
  derived and/or modified CDS sequence (opt1) from neuraminidase__InfluenzaB__AGX18923
augcugcccagcaccauccagacccucacgcuguuccugaccuccggcggggugcuccugagccuguacgucuccgccagccucuccuaccugcuguacagcgacauccuccugaaguucuccccgaccgagaucaccgcccccacgaugccccuggacugcgcgaacgccagcaacgugcaggccgugaaccgcuccgccaccaagggcgucacccuccugcugcccgagccggaguggaccuacccccggcucagcugccccggguccacguuccagaaggcccugcugaucagcccccaccgcuucggcgagaccaaggggaacuccgcgccgcucaucauccgggagcccuucaucgccugcggccccaacgagugcaagcacuucgcccugacccacuacgccgcgcagcccggcggguacuacaaccgcacccggggcgaccgcaacaagcugcggcaccucaucagcgugaagcuggggaagaucccgacgguggagaacuccaucuuccacauggccgccuggagcggcuccgccugccacgacgggaaggaguggaucuacaucggcgucgacggccccgacaacaacgcccugcucaagaucaaguacggggaggcguacaccgacaccuaccacagcuacgccaacaagauccugcgcacccaggaguccgccugcaacugcaucggcgggaacugcuaccugaugaucacggacggcagcgccagcggcguguccgagugccgguuccucaagauccgcgaggggcggaucaucaaggagaucuuccccaccggccgcgugaagcacaccgaggagugcacgugcggguucgccagcaacaagaccaucgagugcgcgugccgggacaacuccuacaccgccaagcgccccuucgucaagcugaacguggagaccgacaccgccgagauccggcugaugugcacggacaccuaccucgacaccccgcgccccgacgacggcagcaucaccgggcccugcgaguccaacggcgacaagggcagcgggggcaucaagggcggguucgugcaccagcggauggccuccaagaucgggcgcugguacagccggacgauguccaagaccgagcgcaugggcaugggccuguacgucaaguacgacggggaccccugggccgacagcgacgcgcuggccuucuccggcgugauggugagcaugaaggagccggggugguacuccuucggcuucgagaucaaggacaagaagugcgacguccccugcaucgggaucgagauggugcacgacggcggcaaggagaccuggcacagcgccgccaccgccaucuacugccucaugggguccggccagcugcugugggacacggugaccggggucgacauggcgcucuga

SEQ ID NO: 93393 - RNA, 1401 nt, Artificial Sequence; identical to SEQ ID NO: 92659
  derived and/or modified CDS sequence (opt1) from neuraminidase__InfluenzaB__AGX18934

SEQ ID NO: 93394 - RNA, 1401 nt, Artificial Sequence
  derived and/or modified CDS sequence (opt1) from neuraminidase__InfluenzaB__AGX18956
augcugcccagcaccauccagacccucacgcuguuccugaccuccggcggggugcuccugagccuguacgucuccgccagccucuccuaccugcuguacagcgacauccuccugaaguucuccccgaccgagaucaccgcccccacgaugccccuggacugcgcgaacgccagcaacgugcaggccgugaaccgcuccgccaccaagggcgucacccuccugcugcccgagccggaguggaccuacccccggcucagcugccccggguccacguuccagaaggcccugcugaucagcccccaccgcuucggcgagaccaaggggaacuccgcgccgcucaucauccgggagcccuucaucgccugcggccccaacgagugcaagcacuucgcccugacccacuacgccgcgcagcccggcggguacuacaacggcacccgcggggaccggaacaagcugcgccaccucaucagcgugaagcugggcaagaucccgacgguggagaacuccaucuuccacgucgccgccuggagcggguccgccugccacgacggcaaggaguggaccuacaucggcguggacgggcccgacaacaacgcccugcucaagaucaaguacggcgaggcguacaccgacaccuaccacagcuacgccaacaagauccugcggacgcaggaguccgccugcaacugcaucgggggcaacugcuaccugaugaucaccgacggcagcgccagcgggguguccgagugccgcuuccucaagauccgggagggccgcaucaucaaggagaucuuccccaccgggcgggucaagcacaccgaggagugcacgugcggcuucgccagcaacaagaccaucgagugcgcgugccgcgacaacuccuacaccgccaagcggcccuucgugaagcugaacguggagaccgacacggccgagauccgccugaugugcaccgacaccuaccucgacaccccgcggcccgacgacgggagcaucacgggccccugcgaguccaacggcgacaaggggagcggcgggaucaagggcggguucguccaccagcgcauggccuccaagaucggccggugguacagccgcaccauguccaagaccgagcggaugggcauggggcuguacgugaaguacgacggcgaccccugggccgacagcgacgcgcuggccuucuccggggugauggucagcaugaaggagccgggcugguacuccuucggguucgagaucaaggacaagaagugcgacgugcccugcaucggcaucgagauggugcacgacggcgggaaggagaccuggcacagcgccgccacggccaucuacugccucaugggcuccgggcagcugcugugggacaccgucaccggcguggacauggcgcucuga

SEQ ID NO: 93395 - RNA, 1401 nt, Artificial Sequence
  derived and/or modified CDS sequence (opt1) from neuraminidase__InfluenzaB__AGX18967
augcugcccagcaccauccagacccucacgcuguuccugaccuccggcggggugcuccugagccuguacgucuccgccagccucuccuaccugcuguacagcgacauccuccugaaguucuccccgaccgagaucaccgcccccacgaugccccuggacugcgcgaacgccagcaacgugcaggccgugaaccgcuccgccaccaagggcgucacgccccuccugccggagcccgaguggaccuacccccggcugagcugccccggguccaccuuccagaaggcccuccugaucagcccgcaccgcuucggcgagaccaaggggaacuccgcgccccugaucauccgggagcccuucaucgccugcggccccaacgagugcaagcacuucgcccucacccacuacgccgcgcagccgggcggguacuacaacggcacccgcggggaccggaacaagcugcgccaccugaucagcgugaagcucggcaagauccccacgguggagaacuccaucuuccacauggccgccuggagcggguccgccugccacgacggcaaggaguggaccuacaucggcgucgacgggcccgacaacaacgcccugcugaagaucaaguacggcgaggcguacaccgacaccuaccacagcuacgccaacaagauccuccggacgcaggaguccgccugcaacugcaucgggggcaacugcuaccugaugaucaccgacggcagcgccagcgggguguccgagugccgcuuccugaagauccgggagggccgcaucaucaaggagaucuuccccaccgggcgggugaagcacaccgaggagugcacgugcggcuucgccagcaacaagaccaucgagugcgcgugccgcgacaacuccuacaccgccaagcggccguucgucaagcucaacguggagaccgacacggccgagauccgccugaugugcaccgacaccuaccuggacacgccccggcccgacgacgggagcaucaccggccccugcgaguccaacggcgacaaggggagcggcgggaucaagggcggguucgugcaccagcgcauggccuccaagaucggccggugguacagccgcaccauguccaagaccgagcggaugggcauggggcucuacgucaaguacgacggcgacccgugggccgacagcgacgcgcuggccuucuccggggugauggugagcaugaaggagcccggcugguacuccuucggguucgagaucaaggacaagaagugcgacguccccugcaucggcaucgagauggugcacgacggcgggaaggagaccuggcacagcgccgccacggccaucuacugccugaugggcuccgggcagcuccugugggacaccgugaccggcgucgacauggcgcuguga

SEQ ID NO: 93396 - RNA, 1401 nt, Artificial Sequence; identical to SEQ ID NO: 93118
  derived and/or modified CDS sequence (opt1) from neuraminidase__InfluenzaB__AGX18978

SEQ ID NO: 93397 - RNA, 1401 nt, Artificial Sequence
  derived and/or modified CDS sequence (opt1) from neuraminidase__InfluenzaB__AGX18989
augcugcccagcaccauccagacccucacgcuguuccugaccuccggcggggugcuccugagccuguacgucuccgccagccucuccuaccugcuguacagcgacauccuccugaaguucuccccgaccgagaucaccgcccccacgaugccccuggacuacgcgaacgccagcaacgugcaggccgugaaccgcuccgccaccaagggcgucacccuccugcugcccgagccggaguggaccuacccccggcucagcugccccggguccacguuccagaaggcccugcugaucagcccccaccgcuucggcgagaccaaggggaacuccgcgccgcucaucauccgggagcccuucaucgccugcggccccaacgagugcaagcacuucgcccugacccacuacgccgcgcagcccggcggguacuacaacggcacccgcggggaccggaacaagcugcgccaccucaucagcgugaagcugggcaagaucccgacgguggagaacuccaucuuccacauggccgccuggagcggguccgccugccacgacggcaaggaguggaccuacaucggcgucgacgggcccgacaacaacgcccugcucaagaucaaguacggcgaggcguacaccgacaccuaccacagcuacgccaacaagauccugcggacgcaggaguccgccugcaacugcaucgggggcaacugcuaccugaugaucaccgacggcagcgccagcgggguguccgagugccgcuuccucaagauccgggagggccgcaucaccaaggagaucuuccccaccgggcgggugaagcacacggaggagugcacgugcggcuucgccagcaacaagaccaucgagugcgcgugccgcgacaacuccuacaccgccaagcggcccuucgucaagcugaacguggagaccgacaccgccgagauccgccugaugugcaccgacaccuaccucgacacgccgcggcccgacgacgggagcaucaccggccccugcgaguccaacggcgacaaggggagcggcgggaucaagggcggguucgugcaccagcgcauggccuccaagaucggccggugguacagccgcaccauguccaagaccgagcggaugggcauggggcuguacgucaaguacgacggcgaccccugggccgacagcgacgcgcuggccuucuccggggugauggugagcaugaaggagccgggcugguacuccuucggguucgagaucaaggacaagaagugcgacguccccugcaucggcaucgagauggugcacgacggcgggaaggagacguggcacagcgccgccaccgccaucuacugccucaugggcuccgggcagcugcugugggacaccgugaccggcgucgacauggcgcucuga

SEQ ID NO: 93398 - RNA, 1401 nt, Artificial Sequence
  derived and/or modified CDS sequence (opt1) from neuraminidase__InfluenzaB__AGX19000
augcugcccagcaccauccagacccucacgcuguuccugaccuccggcggggugcuccugagccuguacgucuccgccagccucuccuaccugcuguacagcgacauccuccugaaguucuccccgaccgagaucaccgcccccacgaugccccuggacugcgcgaacgccagcaacgugcacgccgugaaccgcuccgccaccaagggcgucacccuccugcugcccgagccggaguggaccuacccccggcucagcugccccggguccacguuccagaaggcccugcugaucagcccccaccgcuucggcgagaccaaggggaacuccgcgccgcucaucauccgggagcccuucaucgccugcggccccaacgagugcaagcacuucgcccugaccuacuacgccgcgcagcccggcggguacuacaacggcacccgcggggaccggaacaagcugcgccaccucaucagcgugaagcugggcaagaucccgacgguggagaacuccaucuuccacauggccgccuggagcggguccgccugccacgacggcaaggaguggaccuacaucggcgucgacgggcccgacaacaacgcccugcucaagaucaaguacggcgaggcguacaccgacaccuaccacagcuacgccaacaacauccugcggacgcaggaguccgccugcaacugcaucgggggcaacugcuaccugaugaucaccgacggcagcgccagcgggguguccgagugccgcuuccucaagauccgggagggccgcaucaucaaggagaucuuccccaccgggcgggugaagcacaccgaggagugcacgugcggcuucgccagcaacaagaccaucgagugcgcgugccgcgacaacuccuacaccgccaagcggcccuucgucaagcugaacguggagaccgacacggccgagauccgccugaugugcaccgacaccuaccucgacaccccgcggcccgacgacgggagcaucacgggccccugcgaguccaacggcgacaaggggagcggcgggaucaagggcggguucgugcaccagcgcauggccuccaagaucggccggugguacagccgcaccauguccaagaccgagcggaugggcauggggcuguacgucaaguacgacggcgaccccugggccgacagcgacgcgcuggccuucuccggggugauggugagcaugaaggagccgggcugguacuccuucggguucgagaucaaggacaagaagugcgacguccccugcaucggcaucgagauggugcacgacggcgggaaggagaccuggcacagcgccgccacggccaucuacugccucaugggcuccgggcagcugcugugggacaccgugaccggcgucgacauggcgcucuga

SEQ ID NO: 93399 - RNA, 1401 nt, Artificial Sequence; identical to SEQ ID NO: 92659
  derived and/or modified CDS sequence (opt1) from neuraminidase__InfluenzaB__AGX19011

SEQ ID NO: 93400 - RNA, 1401 nt, Artificial Sequence; identical to SEQ ID NO: 92659
  derived and/or modified CDS sequence (opt1) from neuraminidase__InfluenzaB__AGX19022

SEQ ID NO: 93401 - RNA, 1401 nt, Artificial Sequence
  derived and/or modified CDS sequence (opt1) from neuraminidase__InfluenzaB__AGX19033
augcugcccagcaccauccagacccucacgcuguuccugaccuccggcggggugcuccugagccuguacgucuccgccagccucuccuaccugcuguacagcgacauccuccugaaguucccguccaccgagaucaccgcccccacgaugccccugaacugcgcgaacgccagcaacgugcaggccgugaaccgcuccgccaccaagggcgucacccuccugcugcccgagccggaguggaccuacccccggcucagcugccccggguccacguuccagaaggcccugcugaucagcccccaccgcuucggcgagaccaaggggaacuccgcgccgcucaucauccgggagcccuucaucgccugcggccccaaggagugcaagcacuucgcccugacccacuacgccgcgcagcccggcggguacuacaacggcacccgcggggaccggaacaagcugcgccaccucaucagcgugaagcugggcaagaucccgacgguggagaacuccaucuuccacauggccgccuggagcggguccgccugccacgacggcaaggaguggaccuacaucggcgucgacgggcccgacaacaacgcccugcucaagaucaaguacggcgaggcguacaccgacaccuaccacagcuacgccaacaacauccugcggacgcaggaguccgccugcaacugcaucgggggcaacugcuaccugaugaucaccgacggcagcgccagcgggguguccgagugccgcuuccucaagauccgggagggccgcaucaucaaggagaucuuccccaccgggcggaucaagcacaccgaggagugcacgugcggcuucgccagcaacaagaccaucgagugcgcgugccgcgacaacuccuacaccgccaagcggcccuucgugaagcugaacgucgagaccgacacggccgagauccgccugaugugcaccgagaccuaccucgacaccccgcggcccgacgacgggagcaucacgggccccugcgaguccaacggcgacaaggggagcgagggcaucaagggcggguucgugcaccagcgcauggccuccaagaucgggcggugguacagccgcaccauguccaagaccgagcggaugggcaugggccuguacgugaaguacgacggggaccccugggccgacagcgacgcgcuggccuucuccggcgucauggugagcauggaggagccggggugguacuccuucggcuucgagaucaaggacaagaagugcgacgugcccugcaucgggaucgagaugguccacgacggcggcaaggagaccuggcacagcgccgccacggccaucuacugccucaugggguccggccagcugcugugggacaccgugaccggggugaacauggcgcucuga

SEQ ID NO: 93402 - RNA, 1401 nt, Artificial Sequence; identical to SEQ ID NO: 92659
  derived and/or modified CDS sequence (opt1) from neuraminidase__InfluenzaB__AGX19044

SEQ ID NO: 93403 - RNA, 1401 nt, Artificial Sequence; identical to SEQ ID NO: 92659
  derived and/or modified CDS sequence (opt1) from neuraminidase__InfluenzaB__AGX19055

SEQ ID NO: 93404 - RNA, 1401 nt, Artificial Sequence
  derived and/or modified CDS sequence (opt1) from neuraminidase__InfluenzaB__AGX19066
augcugcccagcaccauccagacccucacgcuguuccugaccuccggcggggugcuccugagccuguacgucuccgccagccucuccuaccugcuguacagcgacauccuccugaaguucuccccgaccgagaucaccgcccccacgaugccccuggacugcgcgaacgccagcaacgugcaggccgugaaccgcuccgccaccaagggcgucacccuccugcugcccgagccggaguggaccuacccccggcucagcugccccggguccacguuccagaaggcccugcugaucagcccccaccgcuucggcgagaccaaggggaacuccgcgccgcucaucauccgggagcccuucaucgccugcggccccaacgagugcaagcacuucgcccugacccacuacgccgcgcagcccggcggguacuacaacggcacccgcggggaccggaacaagcugcgccaccucaucagcgugaagcugggcaagaucccgacgguggagaacuccaucuuccacauggccgccuggagcggguccgccugccacgacggcaaggaguggaucuacaucggcgucgacgggcccgacaacaacgcccugcucaagaucaaguacggcgaggcguacaccgacaccuaccacagcuacgccaacaagauccugcggacccaggaguccgccugcaacugcaucgggggcaacugcuaccugaugaucacggacggcagcgccagcgggguguccgagugccgcuuccucaagauccgggagggccgcaucaucaaggagaucuuccccaccgggcgggugaagcacaccgaggagugcacgugcggcuucgccagcaacaagaccaucgagugcgcgugccgcgacaacuccuacaccgccaagcggcccuucgucaagcugaacguggagaccgacaccgccgagauccgccugaugugcacggacaccuaccucgacaccccgcggcccgacgacgggagcaucaccggccccugcgaguccaacggcgacaaggggagcggcgggaucaagggcggguucgugcaccagcgcauggccuccaagaucggccggugguacagccgcacgauguccaagaccgagcggaugggcauggggcuguacgucaaguacgacggcgaccccugggccgacagcgacgcgcuggccuucuccggggugauggugagcaugaaggagccgggcugguacuccuucggguucgagaucaaggacaagaagugcgacguccccugcaucggcaucgagauggugcacgacggcgggaaggagaccuggcacagcgccgccaccgccaucuacugccucaugggcuccgggcagcugcugugggacacggugaccggcgucgacauggcgcucuga

SEQ ID NO: 93405 - RNA, 1401 nt, Artificial Sequence
  derived and/or modified CDS sequence (opt1) from neuraminidase__InfluenzaB__AGX19077
augcugcccagcaccauccagacccucacgcuguuccugaccuccggcggggugcuccugagccuguacgucuccgccagccucuccuaccugcuguacagcgacauccuccugaaguucaccccgaccgagaucacggcccccaccaugccccuggacugcgcgaacgccuccaacgugcaggccgugaaccgcagcgccaccaagggcgucacgccccuccugccggagcccgaguggaccuacccccggcuguccugccccgggagcaccuuccagaaggcccuccugaucuccccgcaccgcuucggcgagaccaaggggaacagcgcgccccugaucauccgggagcccuucaucgccugcggccccaacgagugcaagcacuucgcccucacccacuacgccgcgcagccgggcggguacuacaacggcacgcgcggggaccggaacaagcugcgccaccugaucuccgugaagcucggcaagauccccaccguggagaacagcaucuuccacauggccgccugguccgggagcgccugccacgacggcaaggaguggaccuacaucggcgucgacgggcccgacaacaacgcccugcugaagaucaaguacggcgaggcguacaccgacacguaccacuccuacgccaacaagauccuccggacccaggagagcgccugcaacugcaucgggggcaacugcuaccugaugaucaccgacggcuccgccagcggggugagcgagugccgcuuccugaagauccgggagggccgcaucaucaaggagaucuuccccaccgggcgggugaagcacacggaggagugcacgugcggcuucgccuccaacaagaccaucgagugcgcgugccgcgacaacagcuacaccgccaagcggccguucgucaagcucaacguggagaccgacaccgccgagauccgccugaugugcaccgacaccuaccuggacacgccccggcccgacgacggguccaucaccggccccugcgagagcaacggcgacaagggguccggcgggaucaagggcggguucgugcaccagcgcauggccagcaagaucggccggugguacucccgcaccaugagcaagaccgagcggaugggcauggggcucuacgucaaguacgacggcgacccgugggccgacuccgacgcgcuggccuucagcggggugaugguguccaugaaggagcccggcugguacagcuucggguucgagaucaaggacaagaagugcgacguccccugcaucggcaucgagauggugcacgacggcgggaaggagacguggcacuccgccgccaccgccaucuacugccugaugggcagcgggcagcuccugugggacaccgugaccggcgucgacauggcgcuguga

SEQ ID NO: 93406 - RNA, 1401 nt, Artificial Sequence
  derived and/or modified CDS sequence (opt1) from neuraminidase__InfluenzaB__AGX19088
augcugcccagcaccauccagacccucacgcuguuccugaccuccggcggggugcuccugagccuguacgucuccgccagccucuccuaccugcuguacagcgacauccuccugaaguucuccccgaccgagaucaccgcccccacgaugccccuggacugcgcgaacgccagcaacgugcaggccgugaaccgcuccgccaccaagggcgucacccuccugcugcccgagccggaguggaccuacccccggcucagcugccccggguccacguuccagaaggcccugcugaucagcccccaccgcuucggcgagaccaaggggaacuccgcgccgcucaucauccgggagcccuucaucgccugcggccccaacgagugcaagcacuucgcccugacccacuacgccgcgcagcccggcggguacuacaacggcacccgcggggaccggaacaagcugcgccaccucaucagcgugaagcugggcaagaucccgacgguggagaacuccaucuuccacauggccgccuggagcggguccgccugccacgacggcaaggaguggaccuacaucggcgucgacgggcccgacaacaacgcccugcucaagaucaaguacggcgaggcguacaccgacaccuaccacagcuacgccaacaagauccugcggacgcaggaguccgccugcaacugcaucgggggcaacugcuaccugaugaucaccgacggcagcgccagcgggguguccgagugccgcuuccucaagauccgggagggccgcaucgugaaggagaucuuccccaccgggcgggucaagcacaccgaggagugcacgugcggcuucgccagcaacaagaccaucgagugcgcgugccgcgacaacuccuacaccgccaagcggcccuucgugaagcugaacguggagaccgacacggccgagauccgccugaugugcaccgacaccuaccucgacaccccgcggcccgacgacgggagcaucacgggccccugcgaguccaacggcgacaaggggagcggcgggaucaagggcggguucguccaccagcgcauggccuccaagaucggccggugguacagccgcaccauguccaagaccgagcggaugggcauggggcuguacgugaaguacgacggcgaccccugggccgacagcgacgcgcuggccuucuccggggugauggucagcaugaaggagccgggcugguacuccuucggguucgagaucaaggacaagaagugcgacgugcccugcaucggcaucgagauggugcacgacggcgggaaggagaccuggcacagcgccgccacggccaucuacugccucaugggcuccgggcagcugcugugggacaccgucaccggcguggacauggcgcucuga

SEQ ID NO: 93407 - RNA, 1401 nt, Artificial Sequence; identical to SEQ ID NO: 92659
  derived and/or modified CDS sequence (opt1) from neuraminidase__InfluenzaB__AGX19099

SEQ ID NO: 93408 - RNA, 1401 nt, Artificial Sequence
  derived and/or modified CDS sequence (opt1) from neuraminidase__InfluenzaB__AGX19110
augcugcccagcaccauccagacccucacgcuguuccugaccuccggcggggugcuccugagccuguacgucuccgccagccucuccuaccugcuguacagcgacauccuccugaaguucccguccaccgagaucaccgcccccacgaugccccuggacugcgcgaacgccagcaacgugcaggccgugaaccgcuccgccaccaagggcgucacccuccugcugcccgagccggaguggaccuacccccggcucagcugccccggguccacguuccagaaggcccugcugaucagcccccaccgcuucggcgagaccaaggggaacuccgcgccgcucaucauccgggagcccuucaucgccugcggccccaaggagugcaagcacuucgcccugacccacuacgccgcgcagcccggcggguacuacaacggcacccgcggggaccggaacaagcugcgccaccucaucagcgugaagcugggcaagaucccgacgguggagaacuccaucuuccacauggccgccuggagcggguccgccugccacgacggcaaggaguggaccuacaucggcgucgacgggcccgacaacaacgcccugcucaagaucaaguacggcgaggcguacaccgacaccuaccacagcuacgccaacaacauccugcggacgcaggaguccgccugcaacugcaucgggggcaacugcuaccugaugaucaccgacggcagcgccagcgggguguccgagugccgcuuccucaagauccgggagggccgcaucaucaaggagaucuuccccaccgggcggaucaagcacaccgaggagugcacgugcggcuucgccagcaacaagaccaucgagugcgcgugccgcgacaacuccuacaccgccaagcggcccuucaucaagcugaacguggagaccgacacggccgagauccgccugaugugcaccgagaccuaccucgacaccccgcggcccgacgacgggagcaucacgggccccugcgaguccaacggcgacaaggggagcggcgggaucaagggcggguucguccaccagcgcauggccuccaagaucggccggugguacagccgcaccauguccaagaccgagcggaugggcauggggcuguacgugaaguacgacggcgaccccugggccgacagcgacgcgcugguguucuccggggucauggugagcauggaggagccgggcugguacuccuucggguucgagaucaaggacaagaagugcgacgugcccugcaucggcaucgagaugguccacgacggcgggaaggagaccuggcacagcgccgccacggccaucuacugccucaugggcuccgggcagcugcugugggacaccgugaccggcgugaacauggcccucuga

SEQ ID NO: 93409 - RNA, 1401 nt, Artificial Sequence
  derived and/or modified CDS sequence (opt1) from neuraminidase__InfluenzaB__AGX19121
augcugcccagcaccacccagacgcucacccuguuccugaccuccggcggggugcuccugagccuguacgucuccgccagccucuccuaccugcuguacagcgacauccuccugaaguucuccccgaccgagaucacggcccccaccaugccccuggacugcgcgaacgccagcaacgugcaggccgugaaccgcuccgccaccaagggcgucacccuccugcugcccgagccggaguggacguacccccggcucagcugccccggguccaccuuccagaaggcccugcugaucagcccccaccgcuucggcgagaccaaggggaacuccgcgccgcucaucauccgggagcccuucaucgccugcggccccaacgagugcaagcacuucgcccugacccacuacgccgcgcagcccggcggguacuacaacggcacgcgcggggaccggaacaagcugcgccaccucaucagcgugaagcugggcaagaucccgaccguggagaacuccaucuuccacauggccgccuggagcggguccgccugccacgacggcaaggaguggaccuacaucggcgucgacgggcccgacaacaacgcccugcucaagaucaaguacggcgaggcguacaccgacacguaccacagcuacgccaacaagauccugcggacccaggaguccgccugcaacugcaucgggggcaacugcuaccugaugaucaccgacggcagcgccagcgggguguccgagugccgcuuccucaagauccgggagggccgcaucaucaaggagaucuuccccaccgggcgggugaagcacacggaggagugcacgugcggcuucgccagcaacaagaccaucgagugcgcgugccgcgacaacuccuacaccgccaagcggcccuucgucaagcugaacguggagaccgacaccgccgagauccgccugaugugcaccgacaccuaccucgacacgccgcggcccgacgacgggagcaucaccggccccugcgaguccaacggcgacaaggggagcggcgggaucaagggcggguucgugcaccagcgcauggccuccaagaucggccggugguacagccgcaccauguccaagaccgagcggaugggcauggggcuguacgucaaguacgacggcgaccccugggccgacagcgacgcgcuggccuuccgcggggugaugguguccaugaaggagccgggcugguacagcuucggguucgagaucaaggacaagaagugcgacguccccugcaucggcaucgagauggugcacgacggcgggaaggagacguggcacuccgccgccaccgccaucuacugccucaugggcagcgggcagcugcugugggacaccgugaccggcgucgacauggcgcucuga

SEQ ID NO: 93410 - RNA, 1401 nt, Artificial Sequence; identical to SEQ ID NO: 93293
  derived and/or modified CDS sequence (opt1) from neuraminidase__InfluenzaB__AGX19132

SEQ ID NO: 93411 - RNA, 1401 nt, Artificial Sequence; identical to SEQ ID NO: 93397
  derived and/or modified CDS sequence (opt1) from neuraminidase__InfluenzaB__AGX19143

SEQ ID NO: 93412 - RNA, 1401 nt, Artificial Sequence
  derived and/or modified CDS sequence (opt1) from neuraminidase__InfluenzaB__AGX19154
augcugcccagcaccauccagacccucacgcuguuccugaccuccggcggggugcuccugagccuguacgucuccgccagccucuccuaccugcuguacagcaacauccuccugaaguucuccccgaccgagaucaccgcccccacgaugccccuggacugcgcgaacgccagcaacgugcacgccgugaaccgcuccgccaccaagggcgucacccuccugcugcccgagccggaguggaccuacccccggcucagcugccccggguccacguuccagaaggcccugcugaucagcccccaccgcuucggcgagaccaaggggaacuccgcgccgcucaucauccgggagcccuucaucgccugcggccccaacgagugcaagcacuucgcccugacccacuacgccgcgcagcccggcggguacuacaacggcacccgcggggaccggaacaagcugcgccaccucaucagcgugaagcugggcaagaucccgacgguggagaacuccaucuuccacauggccgccuggagcggguccgccugccacgacggcaaggaguggaccuacaucggcgucgacgggcccgacaacaacgcccugcucaagaucaaguacggcgaggcguacaccgacaccuaccacagcuacgccaacaacauccugcggacgcaggaguccgccugcaacugcaucgggggcaacugcuaccugaugaucaccgacggcagcgccagcgggguguccgagugccgcuuccucaagauccgggagggccgcaucaucaaggagaucuuccccaccgggcgggugaagcacaccgaggagugcacgugcggcuucgccagcaacaagaccaucgagugcgcgugccgcgacaacuccuacaccgccaagcggcccuucgucaagcugaacguggagaccgacacggccgagauccgccugaugugcaccgacaccuaccucgacaccccgcggcccgacgacgggagcaucacgggccccugcgaguccaacggcgacaaggggagcggcgggaucaagggcggguucgugcaccagcgcauggccuccaagaucggccggugguacagccgcaccauguccaagaccgagcggaugggcauggggcuguacgucaaguacgacggcgaccccugggccgacagcgacgcgcuggccuucuccggggugauggugagcaugaaggagccgggcugguacuccuucggguucgagaucaaggacaagaagugcgacguccccugcaucggcaucgagauggugcacgacggcgggaaggagaccuggcacagcgccgccacggccaucuacugccucaugggcuccgggcagcugcugugggacaccgugaccggcgucgacauggcgcucuga

SEQ ID NO: 93413 - RNA, 1401 nt, Artificial Sequence; identical to SEQ ID NO: 92659
  derived and/or modified CDS sequence (opt1) from neuraminidase__InfluenzaB__AGX19165

SEQ ID NO: 93414 - RNA, 1401 nt, Artificial Sequence
  derived and/or modified CDS sequence (opt1) from neuraminidase__InfluenzaB__AGX19176
augcugcccagcaccauccagacccucacgcuguuccugaccuccggcggggugcuccugagccuguacgucuccgccagccucuccuaccugcuguacagcgacauccuccugaaguucuccccgaccgagaucaccgcccccacgaugccccuggacugcgcgaacgccagcaacgugcacgccgugaaccgcuccgccaccaagggcgucacccuccugcugcccgagccggaguggaccuacccccggcucagcugccccggguccacguuccagaaggcccugcugaucagcccccaccgcuucggcgagaccaaggggaacuccgcgccgcucaucauccgggagcccuucaucgccugcggccccaacgagugcaagcacuucgcccugacccacuacgccgcgcagcccggcggguacuacaaccgcacccggggcgaccgcaacaagcugcggcaccucaucagcgugaagcuggggaagaucccgacgguggagaacuccaucuuccacauggccgccuggagcggcuccgccugccacgacgggaaggaguggaccuacaucggcgucgacggccccgacaacaacgcccugcucaagaucaaguacggggaggcguacaccgacaccuaccacagcuacgccaacaacauccugcgcacgcaggaguccgccugcaacugcaucggcgggaacugcuaccugaugaucaccgacggcagcgccagcggcguguccgagugccgguuccucaagauccgcgaggggcggaucaucaaggagaucuuccccaccggccgcgugaagcacaccgaggagugcacgugcggguucgccagcaacaagaccaucgagugcgcgugccgggacaacuccuacaccgccaagcgccccuucgucaagcugaacguggagaccgacacggccgagauccggcugaugugcaccgacaccuaccucgacaccccgcgccccgacgacggcagcaucacggggcccugcgaguccaacggcgacaagggcagcgggggcaucaagggcggguucgugcaccagcggauggccuccaagaucgggcgcugguacagccggaccauguccaagaccgagcgcaugggcaugggccuguacgucaaguacgacggggaccccugggccgacagcgacgcgcuggccuucuccggcgugauggugagcaugaaggagccggggugguacuccuucggcuucgagaucaaggacaagaagugcgacguccccugcaucgggaucgagauggugcacgacggcggcaaggagaccuggcacagcgccgccacggccaucuacugccucaugggguccggccagcugcugugggacaccgugaccggggucgacauggcgcucuga

SEQ ID NO: 93415 - RNA, 1401 nt, Artificial Sequence
  derived and/or modified CDS sequence (opt1) from neuraminidase__InfluenzaB__AGX19187
augcugcccagcaccauccagacccucacgcuguuccugaccuccggcggggugcuccugagccuguacgucuccgccagccucuccuaccugcuguacagcgacauccuccugaaguucuccccgaccgagaucaccgcccccacgaugccccuggacugcgcgaacgccagcaacgugcaggccgugaaccgcuccgccaccaagggcgucacccuccugcugcccgagccggaguggaccuacccccggcucagcugcuccgggagcacguuccagaaggcccugcugaucagcccccaccgcuucggcgagaccaaggggaacuccgcgccccucaucauccgggagccguucaucgccugcggccccaacgagugcaagcacuucgcccugacccacuacgccgcgcagcccggcggguacuacaacggcacccgcggggaccggaacaagcugcgccaccucaucuccgugaagcugggcaagauccccacgguggagaacagcaucuuccacauggccgccugguccgggagcgccugccacgacggcaaggaguggaccuacaucggcgucgacgggccggacaacaacgcccugcucaagaucaaguacggcgaggcguacaccgacaccuaccacuccuacgccaacaagauccugcggacgcaggagagcgccugcaacugcaucgggggcaacugcuaccugaugaucaccgacggcagcgccuccggggugagcgagugccgcuuccucaagauccgggagggccgcaucaucaaggagaucuuccccaccgggcgggugaagcacaccgaggagugcacgugcggcuucgccuccaacaagaccaucgagugcgcgugccgcgacaacagcuacaccgccaagcggcccuucgucaagcugaacguggagaccgacacggccgagauccgccugaugugcaccgacaccuaccucgacacgccccggccggacgacggguccaucaccggccccugcgagagcaacggcgacaagggguccggcgggaucaagggcggguucgugcaccagcgcauggccagcaagaucggccggugguacucccgcaccaugagcaagaccgagcggaugggcauggggcuguacgucaaguacgacggcgaccccugggccgacuccgacgcgcuggccuucagcggggugaugguguccaugaaggagcccggcugguacagcuucggguucgagaucaaggacaagaagugcgacgucccgugcaucggcaucgagauggugcacgacggcgggaaggagaccuggcacuccgccgccacggccaucuacugccucaugggcagcgggcagcugcugugggacaccgugaccggcgucgacauggcgcucuga

SEQ ID NO: 93416 - RNA, 1401 nt, Artificial Sequence
  derived and/or modified CDS sequence (opt1) from neuraminidase__InfluenzaB__AGX19198
augcugcccagcaccauccagacccucacgcuguuccugaccuccggcggggugcuccugagccuguacgucuccgccagccucuccuaccugcuguacagcgacauccuccugaaguucuccccgaccgagaucaccgcccccacgaugccccuggacuacgcgaacgccagcaacgugcaggccgugaaccgcuccgccaccaagggcgucacccuccugcugcccgagccggaguggaccuacccccggcucagcugccccggguccacguuccagaaggcccugcugaucagcccccaccgcuucggcgagaccaaggggaacuccgcgccgcucaucauccgggagcccuucaucgccugcggccccaacgagugcaagcacuucgcccugacccacuacgccgcgcagcccggcggguacuacaacggcacccgcggggaccggaacaagcugcgccaccucaucagcgugaagcugggcaagaucccgacgguggagaacuccaucuuccacauggccgccuggagcggguccgccugccacgacggcaaggaguggaccuacaucggcgucgacgggcccgacaacaacgcccugcucaagaucaaguacggcgaggcguacaccgacaccuaccacagcuacgccaacaagauccugcggacgcaggaguccgccugcaacugcaucgggggcaacugcuaccugaugaucaccgacggcagcgccagcgggguguccgagugccgcuuccucaagauccgggagggccgcaucaucaaggagaucuuccccaccgggcgggugaagcacaccgaggagugcacgugcggcuucgccagcaacaagaccaucgagugcgcgugccgcgacaacuccuacaccgccaagcggcccuucgucaagcugaacguggagaccgacacggccgagauccgccugaugugcaccgacaccuaccucgacaccccgcggcccgacgacgggagcaucacgggccccugcgaguccaacggcgacaaggggagcggcgggaucaagggcggguucgugcaccagcgcauggccuccaagaucggccggugguacagccgcaccauguccaagaccgagcggaugggcauggggcuguacgucaaguacgacggcgaccccugggccgacagcgacgcgcuggccuucuccggggugauggugagcaugaaggagccgggcugguacuccuucggguucgagaucaaggacaagaagugcgacguccccugcaucggcaucgagauggugcacgacggcgggaaggagaccuggcacagcgccgccacggccaucuacugccucaugggcuccgggcagcugcugugggacaccgugaccggcgucgacauggcgcucuga

SEQ ID NO: 93417 - RNA, 1401 nt, Artificial Sequence; identical to SEQ ID NO: 93397
  derived and/or modified CDS sequence (opt1) from neuraminidase__InfluenzaB__AGX19209

SEQ ID NO: 93418 - RNA, 1401 nt, Artificial Sequence
  derived and/or modified CDS sequence (opt1) from neuraminidase__InfluenzaB__AGX19220
augcugcccagcaccauccagacccucacgcuguuccugaccuccggcggggugcuccugagccuguacgucuccgccagccucuccuaccugcuguacagcgacauccuccugaaguucuccccgaccgagaucaccgcccccacgaugagccuggacugcgcgaacgccuccaacgugcaggccgugaaccgcagcgccaccaagggcgucacccuccugcugcccgagcccgaguggaccuacccgcggcucuccugccccgggagcacguuccagaaggcccugcugaucagcccccaccgcuucggcgagaccaaggggaacuccgcgccccucaucauccgggagccguucaucgccugcggccccaacgagugcaagcacuucgcccugacccacuacgccgcgcagcccggcggguacuacaacggcacccgcggggaccggaacaagcugcgccaccucaucuccgugaagcugggcaagauccccacgguggagaacagcaucuuccacauggccgccugguccgggagcgccugccacgacggcaaggaguggaccuacaucggcgucgacgggccggacaacaacgcccugcucaagaucaaguacggcgaggcguacaccgacaccuaccacuccuacgccaacaagauccugcggacgcaggagagcgccugcaacugcaucgggggcaacugcuaccugaugaucaccgacggcagcgccuccggggugagcgagugccgcuuccucaagauccgggagggccgcaucaucaaggagaucuuccccaccgggcgggugaagcacaccgaggagugcacgugcggcuucgccuccaacaagaccaucgagugcgcgugccgcgacaacagcuacaccgccaagcggcccuucgucaagcugaacguggagaccgacacggccgagauccgccugaugugcaccgacaccuaccucgacacgccccggccggacgacggguccaucaccggccccugcgagagcaacggcgaccgcggguccggcgggaucaagggcggguucgugcaccagcggauggccagcaagaucggccgcugguacucccggaccaugagcaagaccgagcgcaugggcauggggcuguacgucaaguacgacggcgaccccugggccgacuccgacgcgcuggccuucagcggggugaugguguccaugaaggagcccggcugguacagcuucggguucgagaucaaggacaagaagugcgacgucccgugcaucggcaucgagauggugcacgacggcgggaaggagaccuggcacuccgccgccacggccaucuacugccucaugggcagcgggcagcugcugugggacaccgugaccggcgucgacauggcgcucuga

SEQ ID NO: 93419 - RNA, 1401 nt, Artificial Sequence; identical to SEQ ID NO: 92865
  derived and/or modified CDS sequence (opt1) from neuraminidase__InfluenzaB__AGX19231

SEQ ID NO: 93420 - RNA, 1401 nt, Artificial Sequence
  derived and/or modified CDS sequence (opt1) from neuraminidase__InfluenzaB__AGX19253
augcugcccagcaccauccagacccucacgcuguuccugaccuccggcggggugcuccugagccuguacgucuccgccagccucuccuaccugcuguacagcgacauccuccugaaguucuccccgaccgagaucaccgcccccacgaugccccuggacugcgcgaacgccagcaacgugcaggccgugaaccacuccgccaccaagggcgucacccuccugcugcccgagccggaguggaccuacccccgccucagcugccccggguccacguuccagaaggcccugcugaucagcccccaccgguucggcgagaccaaggggaacuccgcgccgcucaucauccgcgagcccuucaucgccugcggccccaacgagugcaagcacuucgcccugacccacuacgccgcgcagcccggcggguacuacaacggcacccgcggggaccggaacaagcugcggcaccucaucagcgugaagcugggcaagaucccgacgguggagaacuccaucuuccacauggccgccuggagcggguccgccugccacgacggcaaggaguggaccuacaucggcgucgacgggcccgacaacaacgcccugcucaagaucaaguacggcgaggcguacaccgacaccuaccacagcuacgccaacaagauccugcgcacgcaggaguccgccugcaacugcaucgggggcaacugcuaccugaugaucaccgacggcagcgccagcgggguguccgagugccgguuccucaagauccgcgagggccggaucaucaaggagaucuuccccaccgggcgcgugaagcacaccgaggagugcacgugcggcuucgccagcaacaagaccaucgagugcgcgugccgggacaacuccuacaccgccaagcgccccuucgucaagcugaacguggagaccgacacggccgagauccggcugaugugcaccgacaccuaccucgacaccccgcgccccgacgacgggagcaucacgggccccugcgaguccaacggcgacaaggggagcggcgggaucaagggcggguucgugcaccagcggauggccuccaagaucggccgcugguacagccggaccauguccaagaccgagcgcaugggcauggggcuguacgucaaguacgacggcgaccccugggccgacagcgacucccuggcguucagcggggugaugguguccaugaaggagccgggcugguacagcuucggguucgagaucaaggacaagaagugcgacguccccugcaucggcaucgagauggugcacgacggcgggaaggagaccuggcacuccgccgccacggccaucuacugccucaugggcagcgggcagcugcugugggacaccgugaccggcgucgacauggcccucuga

SEQ ID NO: 93421 - RNA, 1401 nt, Artificial Sequence; identical to SEQ ID NO: 93395
  derived and/or modified CDS sequence (opt1) from neuraminidase__InfluenzaB__AGX19264

SEQ ID NO: 93422 - RNA, 1401 nt, Artificial Sequence; identical to SEQ ID NO: 92659
  derived and/or modified CDS sequence (opt1) from neuraminidase__InfluenzaB__AGX19275

SEQ ID NO: 93423 - RNA, 1401 nt, Artificial Sequence
  derived and/or modified CDS sequence (opt1) from neuraminidase__InfluenzaB__AGX19286
augauccccagcaccauccagacccugacccucuuccugaccuccggcggggugcugcucagccuguacgucuccgccagccuguccuaccuccuguacagcgacauccugcucaaguucuccccgaccgagaucaucgcccccaccaugccccuggacugcgcgaacgccagcaacgugcacgccgugaaccgcuccgccacgaagggcgucacccugcuccugcccgagccggaguggaccuacccccggcugagcugccccggguccaccuuccagaaggcccuccugaucagcccccaccgcuucggcgagacgaaggggaacuccgcgccgcugaucauccgggagcccuucaucgccugcggccccaacgagugcaagcacuucgcccucacccacuacgccgcgcagcccggcggguacuacaacggcacccgcggggaccggaacaagcugcgccaccugaucagcgugaagcucggcaagaucccgaccguggagaacuccaucuuccacauggccgccuggagcggguccgccugccacgacggcaaggaguggacguacaucggcgucgacgggcccgacaacaacgcccugcugaagaucaaguacggcgaggcguacaccgacaccuaccacagcuacgccaacaacauccuccggacccaggaguccgccugcaacugcaucgggggcaacugcuaccugaugaucacggacggcagcgccagcgggguguccgagugccgcuuccugaagauccgggagggccgcaucaucaaggagaucuuccccaccgggcgggugaagcacaccgaggagugcacgugcggcuucgccagcaacaagacgaucgagugcgcgugccgcgacaacuccuacaccgccaagcggcccuucgucaagcucaacguggagaccgacaccgccgagauccgccugaugugcacggacaccuaccuggacaccccgcggcccgacgacgggagcaucaccggccccugcgaguccaacggcgacaaggggagcggcgggaucaagggcggguucgugcaccagcgcauggccuccaagaucggccggugguacagccgcacgauguccaagaccgagcggaugggcauggggcucuacgucaaguacgacggcgaccccugggccgacagcgacgcgcuggccuucuccggggugauggugagcaugaaggagccgggcugguacuccuucggguucgagaucaaggacaagaagugcgacguccccugcaucggcaucgagauggugcacgacggcgggaaggagaccuggcacagcgccgccaccgccaucuacugccugaugggcuccgggcagcuccugugggacacggugaccggcgucgacauggcgcuguga

SEQ ID NO: 93424 - RNA, 1401 nt, Artificial Sequence
  derived and/or modified CDS sequence (opt1) from neuraminidase__InfluenzaB__AGX19297
augcugcccagcaccauccagacccucacgcuguuccugaccuccggcggggugcuccugagccuguacgucuccgccagccucuccuaccugcuguacagcgacauccuccugaaguucuccccgaccgagaucaucgcccccaccaugccccuggacugcgcgaacgccagcaacgugcacgccgugaaccgcuccgccacgaagggcgucacccuccugcugcccgagccggaguggaccuacccccggcucagcugccccggguccaccuuccagaaggcccugcugaucagcccccaccgcuucggcgagacgaaggggaacuccgcgccgcucaucauccgggagcccuucaucgccugcggccccaacgagugcaagcacuucgcccugacccacuacgccgcgcagcccggcggguacuacaacggcacccgcggggaccggaacaagcugcgccaccucaucagcgugaagcugggcaagaucccgaccguggagaacuccaucuuccacauggccgccuggagcggguccgccugccacgacggcaaggaguggacguacaucggcgucgacgggcccgacaacaacgcccugcucaagaucaaguacggcgaggcguacaccgacaccuaccacagcuacgccaacaacauccugcggacccaggaguccgccugcaacugcaucgggggcaacugcuaccugaugaucacggacggcagcgccagcgggguguccgagugccgcuuccucaagauccgggagggccgcaucaucaaggagaucuuccccaccgggcgggugaagcacaccgaggagugcacgugcggcuucgccagcaacaagaccaucgagugcgcgugccgcgacaacuccuacaccgccaagcggcccuucgucaagcugaacguggagaccgacaccgccgagauccgccugaugugcacggacaccuaccucgacaccccgcggcccgacgacgggagcaucaccggccccugcgaguccaacggcgacaaggggagcggcgggaucaagggcggguucgugcaccagcgcauggccuccaagaucggccggugguacagccgcacgauguccaagaccgagcggaugggcauggggcuguacgucaaguacgacggcgaccccugggccgacagcgacgcgcuggccuucuccggggugauggugagcaugaaggagccgggcugguacuccuucggguucgagaucaaggacaagaagugcgacguccccugcaucggcaucgagauggugcacgacggcgggaaggagaccuggcacagcgccgccaccgccaucuacugccucaugggcuccgggcagcugcugugggacacggugaccggcgucgacauggcgcucuga

SEQ ID NO: 93425 - RNA, 1401 nt, Artificial Sequence; identical to SEQ ID NO: 93424
  derived and/or modified CDS sequence (opt1) from neuraminidase__InfluenzaB__AGX19308

SEQ ID NO: 93426 - RNA, 1401 nt, Artificial Sequence; identical to SEQ ID NO: 93424
  derived and/or modified CDS sequence (opt1) from neuraminidase__InfluenzaB__AGX19319

SEQ ID NO: 93427 - RNA, 1401 nt, Artificial Sequence
  derived and/or modified CDS sequence (opt1) from neuraminidase__InfluenzaB__AGX19330
augcugcccagcaccauccagacccucacgcuguuccugaccuccggcggggugcuccugagccuguacgucuccgccagccucuccuaccugcuguacagcgacauccuccugaaguucuccccgaccgagaucaucgcccccaccaugccccuggacugcgcgaacgccagcaacgugcacgccgugaaccgcuccgccacgaagggcgucacccuccugcugcccgagccggaguggaccuacccccggcucagcugccccggguccaccuuccagaaggcccugcugaucagcccccaccgcuucggcgagacgaaggggaacuccgcgccgcucaucauccgggagcccuucaucgccugcggccccaacgagugcaagcacuucgcccugacccacuacgccgcgcagcccggcggguacuacaacggcacccgcgggaaccggaacaagcugcgccaccucaucagcgugaagcugggcaagaucccgaccguggagaacuccaucuuccacauggccgccuggagcggguccgccugccacgacggcaaggaguggacguacaucggcgucgacgggcccgacaacaacgcccugcucaagaucaaguacggcgaggcguacaccgacaccuaccacagcuacgccaacaacauccugcggacccaggaguccgccugcaacugcaucgggggcaacugcuaccugaugaucacggacggcagcgccagcgggguguccgagugccgcuuccucaagauccgggagggccgcaucaucaaggagaucuuccccaccgggcgggugaagcacaccgaggagugcacgugcggcuucgccagcaacaagaccaucgagugcgcgugccgcgacaacuccuacaccgccaagcggcccuucgucaagcugaacguggagaccgacaccgccgagauccgccugaugugcacggacaccuaccucgacaccccgcggcccgacgacgggagcaucaccggccccugcgaguccaacggcgacaaggggagcggcgggaucaagggcggguucgugcaccagcgcauggccuccaagaucggccggugguacagccgcacgauguccaagaccgagcggaugggcauggggcuguacgucaaguacgacggcgaccccugggccgacagcgacgcgcuggccuucuccggggugauggugagcaugaaggagccgggcugguacuccuucggguucgagaucaaggacaagaagugcgacguccccugcaucggcaucgagauggugcacgacggcgggaaggagaccuggcacagcgccgccaccgccaucuacugccucaugggcuccgggcagcugcugugggacacggugaccggcgucgacauggcgcucuga

SEQ ID NO: 93428 - RNA, 1401 nt, Artificial Sequence; identical to SEQ ID NO: 93424
  derived and/or modified CDS sequence (opt1) from neuraminidase__InfluenzaB__AGX19341

SEQ ID NO: 93429 - RNA, 1401 nt, Artificial Sequence; identical to SEQ ID NO: 93424
  derived and/or modified CDS sequence (opt1) from neuraminidase__InfluenzaB__AGX19352

SEQ ID NO: 93430 - RNA, 1401 nt, Artificial Sequence
  derived and/or modified CDS sequence (opt1) from neuraminidase__InfluenzaB__AGX19363
augcugcccagcaccauccagacccucacgcuguuccugaccuccggcggggugcuccugagccuguacgucuccgccagccucuccuaccugcuguacagcgacauccuccugaaguucuccccgaccgagaucaucgcccccaccaugccccuggacugcgcgaacgccagcaacgugcacgccgugaaccgcuccgccacgaagggcgucacccuccugcugcccgagccggaguggaccuacccccggcucagcugccccggguccaccuuccagaaggcccugcugaucagcccccaccgcuucggcgagacgaaggggaacuccgcgccgcucaucauccgggagcccuucaucgccugcggccccaacgagugcaagcacuucgcccugaccuacuacgccgcgcagcccggcggguacuacaacggcacccgcggggaccggaacaagcugcgccaccucaucagcgugaagcugggcaagaucccgaccguggagaacuccaucuuccacauggccgccuggagcggguccgccugccacgacggcaaggaguggacguacaucggcgucgacgggcccgacaacaacgcccugcucaagaucaaguacggcgaggcguacaccgacaccuaccacagcuacgccaacaacauccugcggacccaggaguccgccugcaacugcaucgggggcaacugcuaccugaugaucacggacggcagcgccagcgggguguccgagugccgcuuccucaagauccgggagggccgcaucaucaaggagaucuuccccaccgggcgggugaagcacaccgaggagugcacgugcggcuucgccagcaacaagaccaucgagugcgcgugccgcgacaacuccuacaccgccaagcggcccuucgucaagcugaacguggagaccgacaccgccgagauccgccugaugugcacggacaccuaccucgacaccccgcggcccgacgacgggagcaucaccggccccugcgaguccaacggcgacaaggggagcggcgggaucaagggcggguucgugcaccagcgcauggccuccaagaucggccggugguacagccgcacgauguccaagaccgagcggaugggcauggggcuguacgucaaguacgacggcgaccccugggccgacagcgacgcgcuggccuucuccggggugauggugagcaugaaggagccgggcugguacuccuucggguucgagaucaaggacaagaagugcgacguccccugcaucggcaucgagauggugcacgacggcgggaaggagaccuggcacagcgccgccaccgccaucuacugccucaugggcuccgggcagcugcugugggacacggugaccggcgucgacauggcgcucuga

SEQ ID NO: 93431 - RNA, 1401 nt, Artificial Sequence
  derived and/or modified CDS sequence (opt1) from neuraminidase__InfluenzaB__AGX19374
augcugcccagcaccauccagacccucacgcuguuccugaccuccggcggggugcuccugagccuguacgucuccgccagccucuccuaccugcuguacagcgacauccuccugaaguucucccagaccgagaucaccgccccgaucaugccccuggacugcgcgaacgccagcaacgugcaggccgugaaccgcuccgccgccaagggcgucacgcuccugcugagcgagcccgaguggaccuacccccggcucuccugcccggggagcaccuuccagaaggcgcugcugaucagcccccaccgcuucggcgagaccaaggggaacuccgcgccccucaucauccgggagcccuucaucgccugcggcccgacggagugcaagcacuucgcccugacccacuacgccgcccagcccggcggguacuacaacggcacccgcgaggaccggaacaagcugcgccaccucaucuccgugaagcuggggaagauccccaccguggagaacagcaucuuccacauggccgccugguccggcagcgccugccacgacgggaaggaguggacguacaucggcgucgacggccccgacuccaacgcgcugcucaagaucaaguacggggaggccuacaccgacaccuaccacagcuacgccaagaacauccugcggacccaggagagcgccugcaacugcaucggcggggacugcuaccugaugaucacggacggcccggccuccggcgugagcgagugccgcuuccucaagauccgggaggggcgcaucaucaaggagaucuuccccaccggccgggugaagcacaccgaggagugcacgugcggguucgcguccaacaagaccaucgagugcgccugccgcgacaacagcuacaccgccaagcggcccuucgucaagcugaacguggagaccgacaccgccgagauccgccugaugugcacggagaccuaccucgacacgccccggccgaacgacggcuccaucaccgggcccugcgagagcgacggcgacaagggcuccgggggcaucaagggcggguucgugcaccagcgcauggccagcaagaucgggcggugguacucccgcaccaugagcaagaccaagcggaugggcaugggccuguacgucaaguacgacggggaccccuggaccgacuccgaggcgcuggcccucagcggcgugaugguguccauggaggagcccgggugguacagcuucggcuucgagaucaaggacaagaagugcgacgucccgugcaucgggaucgagauggugcacgacggcggcaagaccacguggcacuccgccgccaccgccaucuacugccugauggggagcggccagcugcucugggacaccgugaccggggucgacauggcgcuguga

SEQ ID NO: 93432 - RNA, 1401 nt, Artificial Sequence; identical to SEQ ID NO: 93424
  derived and/or modified CDS sequence (opt1) from neuraminidase__InfluenzaB__AGX19385

SEQ ID NO: 93433 - RNA, 1401 nt, Artificial Sequence
  derived and/or modified CDS sequence (opt1) from neuraminidase__InfluenzaB__AGX19396
augcugcccagcaccauccagacccucacgcuguuccugaccuccggcggggugcuccugagccuguacgucuccgccagccucuccuaccugcuguacagcgacauccuccugaaguucuccccgaccgagaucaucgcccccaccaugccccuggacugcgcgaacgccagcaacgugcacgccgugaaccgcuccgccacgaagggcgucacccuccugcugcccgagccggaguggaccuacccccggcucagcugccccggguccaccuuccagaaggcccugcugaucagcccccaccgcuucggcgagacgaaggggaacuccgcgccgcucaucauccgggagcccuucaucgccugcggccccaacgagugcaagcacuucgcccugacccacuacgccgcgcagcccggcggguacuacaacggcccgcgcggggaccggaacaagcugcgccaccucaucagcgugaagcugggcaagauccccaccguggagaacuccaucuuccacauggccgccuggagcggguccgccugccacgacggcaaggaguggaccuacaucggcgucgacgggcccgacaacaacgcccugcucaagaucaaguacggcgaggcguacacggacaccuaccacagcuacgccaacaacauccugcggacccaggaguccgccugcaacugcaucgggggcaacugcuaccugaugaucaccgacggcagcgccagcgggguguccgagugccgcuuccucaagauccgggagggccgcaucaucaaggagaucuuccccacggggcgggugaagcacaccgaggagugcacgugcggcuucgccagcaacaagaccaucgagugcgcgugccgcgacaacuccuacaccgccaagcggccguucgucaagcugaacguggagaccgacaccgccgagauccgccugaugugcaccgacacguaccucgacacgccccggcccgacgacgggagcaucaccggccccugcgaguccaacggcgacaaggggagcggcgggaucaagggcggguucgugcaccagcgcauggccuccaagaucggccggugguacagccgcaccauguccaagaccgagcggaugggcauggggcuguacgucaaguacgacggcgacccgugggccgacagcgacgcgcuggccuucuccggggugauggugagcaugaaggagcccggcugguacuccuucggguucgagaucaaggacaagaagugcgacguccccugcaucggcaucgagauggugcacgacggcgggaaggagaccuggcacagcgccgccaccgccaucuacugccucaugggcuccgggcagcugcugugggacaccgugacgggcgucgacauggcgcucuga

SEQ ID NO: 93434 - RNA, 1401 nt, Artificial Sequence; identical to SEQ ID NO: 93424
  derived and/or modified CDS sequence (opt1) from neuraminidase__InfluenzaB__AGX19407

SEQ ID NO: 93435 - RNA, 1401 nt, Artificial Sequence; identical to SEQ ID NO: 92985
  derived and/or modified CDS sequence (opt1) from neuraminidase__InfluenzaB__AGX19418

SEQ ID NO: 93436 - RNA, 1401 nt, Artificial Sequence
  derived and/or modified CDS sequence (opt1) from neuraminidase__InfluenzaB__AGX19429
augcugcccagcaccauccagacccucacgcuguuccugaccuccggcggggugcuccugagccuguacgucuccgccagccucuccuaccugcuguacagcgacauccuccugaaguucucccagaccgagaucaccgccccgaucaugccccuggacugcgcgaacgccagcaacgugcaggccgugaaccgcuccgccgccaagggcgucacgcuccugcugcccgagcccgaguggaccuacccgcggcucagcugccccggguccaccuuccagaaggcgcugcugaucagcccccaccgcuucggcgagaccaaggggaacuccgcgccccucaucauccgggagccguucaucgccugcggccccacggagugcaagcacuucgcccugacccacuacgccgcccagcccggcggguacuacaacggcacccgcgaggaccggaacaagcugcgccaccucaucagcgugaagcuggggaagauccccaccguggagaacuccaucuuccacauggccgccuggagcggcuccgccugccacgacgggaaggaguggacguacaucggcgucgacggcccggacagcaacgcgcugcucaagaucaaguacggggaggccuacaccgacaccuaccacuccuacgccaagaacauccugcggacccaggagagcgccugcaacugcaucggcggggacugcuaccugaugaucacggacggccccgccagcggcaucuccgagugccgcuuccucaagauccgggaggggcgcaucaucaaggagaucuuccccaccggccgggugaagcacaccgaggagugcacgugcggguucgcgagcaacaagaccaucgagugcgccugccgcgacaacuccuacaccgccaagcggcccuucgugaagcugaacgucgagaccgacaccgccgagauccgccugaugugcacggagaccuaccucgacaccccgcggcccaacgacggcagcaucaccgggcccugcgaguccgacggcgacaagggcagcgggggcaucaagggcggguucgugcaccagcgcauggccuccaagaucgggcggugguacagccgcacgauguccaagacccggcgcaugggcaugggccuguacgugaaguacgacggggaccccuggaccgacagcgaggcgcuggcccucuccggcgucauggugagcauggaggagccggggugguacuccuucggcuucgagaucaaggacaagaagugcgacgugcccugcaucgggaucgagaugguccacgacggcggcaagaccacguggcacagcgccgccaccgccaucuacugccugaugggguccggccagcugcucugggacaccgugaccgggguggacauggcgcuguga

SEQ ID NO: 93437 - RNA, 1401 nt, Artificial Sequence
  derived and/or modified CDS sequence (opt1) from neuraminidase__InfluenzaB__AGX19451
augcugcccagcaccauccagacccucacgcuguuccugaccuccggcggggugcuccugagccuguacgucuccgccagccucuccuaccugcuguacagcgacauccuccugaaguucuccccgaccgagaucaccgcccccacgaugccccuggacugcgcgaacgccagcaacgugcacgccgugaaccacuccgccaccaagggcgucacccuccugcugcccgagccggaguggaccuacccccgccucagcugccccggguccacguuccagaaggcccugcugaucagcccccaccgguucggcgagaccaaggggaacuccgcgccgcucaucauccgcgagcccuucaucgccugcggccccaacgagugcaagcacuucgcccugacccacuacgccgcgcagcccggcggguacuacaacggcacccgcggggaccggaacaagcugcggcaccucaucagcgugaagcugggcaagaucccgacgguggagaacuccaucuuccacauggccgccuggagcggguccgccugccacgacggcaaggaguggaccuacaucggcgucgacgggcccgacaacaacgcccugcucaagaucaaguacggcgaggcguacaccgacaccuaccacagcuacgccaacaacauccugcgcacgcaggaguccgccugcaacugcaucgggggcaacugcuaccugauggugaccgacggcagcgccagcgggguguccgagugccgguuccucaagauccgcgagggccggaucaucaaggagaucuuccccaccgggcgcgucaagcacaccgaggagugcacgugcggcuucgccagcaacaagaccaucgagugcgcgugccgggacaacuccuacaccgccaagcgccccuucgugaagcugaacguggagaccgacacggccgagauccggcugaugugcaccgacaccuaccucgacaccccgcgccccgacgacgggagcaucacgggccccugcgaguccaacggcgacaaggggagcggcgggaucaagggcggguucguccaccagcggauggccuccaagaucggccgcugguacagccggaccauguccaagaccgagcgcaugggcauggggcuguacgugaaguacgacggcgaccccugggccgacagcgacgcgcuggccuucuccggggugauggucagcaugaaggagccgggcugguacuccuucggguucgagaucaaggacaagaagugcgacgugcccugcaucggcaucgagauggugcacgacggcgggaaggagaccuggcacagcgccgccacggccaucuacugccucaugggcuccgggcagcugcugugggacaccgucaccggcguggacauggcgcucuga

SEQ ID NO: 93438 - RNA, 1401 nt, Artificial Sequence; identical to SEQ ID NO: 93436
  derived and/or modified CDS sequence (opt1) from neuraminidase__InfluenzaB__AGX19462

SEQ ID NO: 93439 - RNA, 1401 nt, Artificial Sequence; identical to SEQ ID NO: 93436
  derived and/or modified CDS sequence (opt1) from neuraminidase__InfluenzaB__AGX19473

SEQ ID NO: 93440 - RNA, 1401 nt, Artificial Sequence; identical to SEQ ID NO: 92985
  derived and/or modified CDS sequence (opt1) from neuraminidase__InfluenzaB__AGX19484

SEQ ID NO: 93441 - RNA, 1401 nt, Artificial Sequence; identical to SEQ ID NO: 93437
  derived and/or modified CDS sequence (opt1) from neuraminidase__InfluenzaB__AGX19495

SEQ ID NO: 93442 - RNA, 1401 nt, Artificial Sequence; identical to SEQ ID NO: 92985
  derived and/or modified CDS sequence (opt1) from neuraminidase__InfluenzaB__AGX19506

SEQ ID NO: 93443 - RNA, 1401 nt, Artificial Sequence; identical to SEQ ID NO: 92985
  derived and/or modified CDS sequence (opt1) from neuraminidase__InfluenzaB__AGX19517

SEQ ID NO: 93444 - RNA, 1401 nt, Artificial Sequence; identical to SEQ ID NO: 92985
  derived and/or modified CDS sequence (opt1) from neuraminidase__InfluenzaB__AGX19528

SEQ ID NO: 93445 - RNA, 1401 nt, Artificial Sequence; identical to SEQ ID NO: 93437
  derived and/or modified CDS sequence (opt1) from neuraminidase__InfluenzaB__AGX19539

SEQ ID NO: 93446 - RNA, 1401 nt, Artificial Sequence
  derived and/or modified CDS sequence (opt1) from neuraminidase__InfluenzaB__AGX19550
augcugcccagcaccauccagacccucacgcuguuccugaccuccggcggggugcuccugagccuguacgucuccgccagccucuccuaccugcuguacagcgacauccuccugaaguucuccccgaccgagaucaccgcccccacgaugccccuggacugcgcgaacgccagcaacgugcacgccgugaaccacuccgccaccaagggcgucacccuccugcugcccgagccggaguggaccuacccccgccucagcugccccggguccacguuccagaaggcccugcugaucagcccccaccgguucggcgagaccaaggggaacuccgcgccgcucaucauccgcgagcccuucaucgccugcggccccaacgagugcaagcacuucgcccugacccacuacgccgcgcagcccggcggguacuacaacggcacccgcggggaccggaacaagcugcggcaccucaucagcgugaagcugggcaagaucccgacgguggagaacuccaucuuccacauggccgccuggagcggguccgccugccacgacggcaaggaguggaccuacaucggcgucgacgggcccgacaacaacgcccugcucaagaucaaguacggcgaggcguacaccgacaccuaccacagcuacgccaacaacauccugcgcacgcaggaguccgccugcaacugcaucgggggcaacugcuaccugauggugaccgacggcagcgccagcgggguguccgagugccgguuccucaagauccgcgagggccggaucaucaaggagaucuuccccaccgggcgcgucaagcacaccgaggagugcacgugcggcuucgccagcaacaagaccaucgagugcgcgugccgggacaacuccuacaccgccaagcgccccuucgugaagcugaacguggagaccgacacggccgagauccggcugaugugcaccgacaccuaccucgacaccccgcgccccgacgacgggagcaucacgggccccugcgaguccaacggcgacaaggggagcggcgggaucaagggcggguucguccaccagcggauggccuccaagaucggccgcugguacagccggaccauguccaagaccgagcgcaugggcauggggcuguacgugaaguacgacggcgaccccugggccgacagcgacgcgcuggccuucuccggggugauggucagcaugaacgagccgggcugguacuccuucggguucgagaucaaggacaagaagugcgacgugcccugcaucggcaucgagauggugcacgacggcgggaaggagaccuggcacagcgccgccacggccaucuacugccucaugggcuccgggcagcugcugugggacaccgucaccggcguggacauggcgcucuga

SEQ ID NO: 93447 - RNA, 1401 nt, Artificial Sequence
  derived and/or modified CDS sequence (opt1) from neuraminidase__InfluenzaB__AGX19561
augcugcccagcaccauccagacccucacgcuguuccugaccuccggcggggugcuccugagccuguacgucuccgccagccucuccuaccugcuguacagcgacauccuccugaaguucuccccgaccgagaucaccgcccccacgaugccccuggacugcgcgaacgccagcaacgugcacgccgugaaccacuccgccaccaagggcgucacccuccugcugcccgagccggaguggaccuacccccgccucagcugccccggguccacguuccagaaggcccugcugaucagcccccaccgguucggcgagaccaaggggaacuccgcgccgcucaucauccgcgagcccuucaucgccugcggccccaacgagugcaagcacuucgcccugacccacuacgccgcgcagccccggggcuacuacaacgggacccgcggcgaccggaacaagcugcgccaccucaucagcgugaagcuggggaagaucccgacgguggagaacuccaucuuccacauggccgccuggagcggcuccgccugccacgacgggaaggaguggaccuacaucggcgucgacggccccgacaacaacgcccugcucaagaucaaguacggggaggcguacaccgacaccuaccacagcuacgccaacaacauccugcggacgcaggaguccgccugcaacugcaucggcgggaacugcuaccugauggugaccgacggcagcgccagcggcguguccgagugccgcuuccucaagauccgggaggggcgcaucaucaaggagaucuuccccaccggccgggucaagcacaccgaggagugcacgugcggguucgccagcaacaagaccaucgagugcgcgugccgcgacaacuccuacaccgccaagcggcccuucgugaagcugaacguggagaccgacacggccgagauccgccugaugugcaccgacaccuaccucgacaccccgcggcccgacgacggcagcaucacggggcccugcgaguccaacggcgacaagggcagcgggggcaucaagggcggguucguccaccagcgcauggccuccaagaucgggcggugguacagccgcaccauguccaagaccgagcggaugggcaugggccuguacgugaaguacgacggggaccccugggccgacagcgacgcgcuggccuucuccggcgugauggucagcaugaaggagccggggugguacuccuucggcuucgagaucaaggacaagaagugcgacgugcccugcaucgggaucgagauggugcacgacggcggcaaggagaccuggcacagcgccgccacggccaucuacugccucaugggguccggccagcugcugugggacaccgucaccgggguggacauggcgcucuga

SEQ ID NO: 93448 - RNA, 1401 nt, Artificial Sequence
  derived and/or modified CDS sequence (opt1) from neuraminidase__InfluenzaB__AGX19572
augcugcccagcaccauccagacccucacgcuguuccugaccuccggcggggugcuccugagccuguacgucuccgccagccucuccuaccugcuguacagcgacauccuccugaaguucuccccgaccgagaucaccgcccccacgaugccccuggacugcgcgaacgccagcaacgugcaggccgugaaccgcuccgccaccaagggcgucacccuccugcugcccgagccggaguggaccuacccccggcucagcugccccggguccacguuccagaaggcccugcugaucagcccccaccgcuucggcgagaccaaggggaacuccgcgccgcucaucauccgggagcccuucaucgccugcggccccaacgagugcaagcacuucgcccugacccacuacgccgcgcagcccggcggguacuacaacggcacccgcggggaccggaacaagcugcgccaccucaucagcgugaagcugggcaagaucccgacgguggagaacuccaucuuccacauggccgccuggagcggguccgccugccacgacggcaaggaguggaccuacaucggcgucgacgggcccgacaacaacgcccugcucaaggugaaguacggcgaggcguacaccgacaccuaccacagcuacgccaacaagauccugcggacgcaggaguccgccugcaacugcaucgggggcaacugcuaccugaugaucaccgacggcagcgccagcgggguguccgagugccgcuuccucaagauccgggagggccgcaucaucaaggagaucuuccccaccgggcgggucaagcacaccgaggagugcacgugcggcuucgccagcaacaagaccaucgagugcgcgugccgcgacaacuccuacaccgccaagcggcccuucgugaagcugaacguggagaccgacacggccgagauccgccugaugugcaccgacaccuaccucgacaccccgcggcccaacgacgggagcaucacgggccccugcgaguccaacggcgacaaggggagcggcgggaucaagggcggguucguccaccagcgcauggaguccaagaucggccggugguacagccgcaccauguccaagaccgagcggaugggcauggggcuguacgugaaguacgacggcgaccccugggccgacagcgacgcccuggcguucuccggggugauggucagcaugaaggagccgggcugguacuccuucggguucgagaucaaggacaagaagugcgacgugcccugcaucggcaucgagauggugcacgacggcgggaaggagaccuggcacagcgccgccacggccaucuacugccucaugggcuccgggcagcugcugugggacaccgucaccggcgugaacauggcccucuga

SEQ ID NO: 93449 - RNA, 1401 nt, Artificial Sequence; identical to SEQ ID NO: 92985
  derived and/or modified CDS sequence (opt1) from neuraminidase__InfluenzaB__AGX19583

SEQ ID NO: 93450 - RNA, 1401 nt, Artificial Sequence; identical to SEQ ID NO: 92985
  derived and/or modified CDS sequence (opt1) from neuraminidase__InfluenzaB__AGX19594

SEQ ID NO: 93451 - RNA, 1401 nt, Artificial Sequence; identical to SEQ ID NO: 92985
  derived and/or modified CDS sequence (opt1) from neuraminidase__InfluenzaB__AGX19605

SEQ ID NO: 93452 - RNA, 1401 nt, Artificial Sequence; identical to SEQ ID NO: 92985
  derived and/or modified CDS sequence (opt1) from neuraminidase__InfluenzaB__AGX19616

SEQ ID NO: 93453 - RNA, 1401 nt, Artificial Sequence; identical to SEQ ID NO: 93437
  derived and/or modified CDS sequence (opt1) from neuraminidase__InfluenzaB__AGX19627

SEQ ID NO: 93454 - RNA, 1401 nt, Artificial Sequence; identical to SEQ ID NO: 92985
  derived and/or modified CDS sequence (opt1) from neuraminidase__InfluenzaB__AGX19638

SEQ ID NO: 93455 - RNA, 1401 nt, Artificial Sequence; identical to SEQ ID NO: 93437
  derived and/or modified CDS sequence (opt1) from neuraminidase__InfluenzaB__AGX19649

SEQ ID NO: 93456 - RNA, 1401 nt, Artificial Sequence; identical to SEQ ID NO: 93437
  derived and/or modified CDS sequence (opt1) from neuraminidase__InfluenzaB__AGX19660

SEQ ID NO: 93457 - RNA, 1401 nt, Artificial Sequence; identical to SEQ ID NO: 92985
  derived and/or modified CDS sequence (opt1) from neuraminidase__InfluenzaB__AGX19671

SEQ ID NO: 93458 - RNA, 1401 nt, Artificial Sequence; identical to SEQ ID NO: 92985
  derived and/or modified CDS sequence (opt1) from neuraminidase__InfluenzaB__AGX19682

SEQ ID NO: 93459 - RNA, 1401 nt, Artificial Sequence; identical to SEQ ID NO: 93437
  derived and/or modified CDS sequence (opt1) from neuraminidase__InfluenzaB__AGX19704

SEQ ID NO: 93460 - RNA, 1401 nt, Artificial Sequence
  derived and/or modified CDS sequence (opt1) from neuraminidase__InfluenzaB__AGX19715
augcugcccagcaccauccagacccucacgcuguuccugaccuccggcggggugcuccugagccuguacgucuccgccagccucuccuaccugcuguacagcgacauccuccugaaguucuccccgaccgagaucaccgcccccacgaugccccuggacugcgcgaacgccagcaacgugcacgccgugaaccgcuccaccaccaagggcgucacccuccugcugcccgagccggaguggacguacccccggcucagcugccccggguccaccuuccagaaggcccugcugaucagcccccaccgcuucggcgagaccaaggggaacuccgccccgcucaucauccgggagcccuucaucgcgugcggccccaacgagugcaagcacuucgcccugacccacuacgccgcccagcccggcggguacuacaacggcacgcgcggggaccggaacaagcugcgccaccucaucagcgugaagcugggcaagaucccgaccguggagaacuccaucuuccacauggcggccuggagcggguccgccugccacgacggcaaggaguggaccuacaucggcgucgacgggcccgacaacaacgcccugcucaagaucaaguacggcgaggccuacaccgacacguaccacagcuacgcgaacaacauccugcggacccaggaguccgccugcaacugcaucgggggcaacugcuaccugaugaucaccgacggcagcgccagcgggguguccgagugccgcuuccucaagauccgggagggccgcaucaucaaggagaucuuccccaccgggcgggugaagcacacggaggagugcacgugcggcuucgccagcaacaagaccaucgagugcgccugccgcgacaacuccuacaccgcgaagcggcccuucgucaagcugaacguggagaccgacaccgccgagauccgccugaugugcaccgacaccuaccucgacacgccgcggcccgacgacgggagcaucaccggccccugcgaguccaacggcgacaaggggagcggcgggaucaagggcggguucgugcaccagcgcauggccuccaagaucggccggugguacagccgcaccauguccaagaccgagcggaugggcauggggcuguacgucaaguacgacggcgaccccugggccgacagcgacgcccuggcguucuccggggugauggugagcaugaaggagccgggcugguacuccuucggguucgagaucaaggacaagaagugcgacguccccugcaucggcaucgagauggugcacgacggcgggaaggagacguggcacagcgccgccaccgccaucuacugccucaugggcuccgggcagcugcugugggacaccgugaccggcgucgacauggcccucuga

SEQ ID NO: 93461 - RNA, 1401 nt, Artificial Sequence; identical to SEQ ID NO: 92985
  derived and/or modified CDS sequence (opt1) from neuraminidase__InfluenzaB__AGX19726

SEQ ID NO: 93462 - RNA, 1401 nt, Artificial Sequence; identical to SEQ ID NO: 92985
  derived and/or modified CDS sequence (opt1) from neuraminidase__InfluenzaB__AGX19737

SEQ ID NO: 93463 - RNA, 1401 nt, Artificial Sequence; identical to SEQ ID NO: 92985
  derived and/or modified CDS sequence (opt1) from neuraminidase__InfluenzaB__AGX19748

SEQ ID NO: 93464 - RNA, 1401 nt, Artificial Sequence; identical to SEQ ID NO: 93437
  derived and/or modified CDS sequence (opt1) from neuraminidase__InfluenzaB__AGX19759

SEQ ID NO: 93465 - RNA, 1401 nt, Artificial Sequence; identical to SEQ ID NO: 92985
  derived and/or modified CDS sequence (opt1) from neuraminidase__InfluenzaB__AGX19770

SEQ ID NO: 93466 - RNA, 1401 nt, Artificial Sequence; identical to SEQ ID NO: 92985
  derived and/or modified CDS sequence (opt1) from neuraminidase__InfluenzaB__AGX19781

SEQ ID NO: 93467 - RNA, 1401 nt, Artificial Sequence; identical to SEQ ID NO: 92985
  derived and/or modified CDS sequence (opt1) from neuraminidase__InfluenzaB__AGX19792

SEQ ID NO: 93468 - RNA, 1401 nt, Artificial Sequence; identical to SEQ ID NO: 92985
  derived and/or modified CDS sequence (opt1) from neuraminidase__InfluenzaB__AGX19803

SEQ ID NO: 93469 - RNA, 1401 nt, Artificial Sequence; identical to SEQ ID NO: 92985
  derived and/or modified CDS sequence (opt1) from neuraminidase__InfluenzaB__AGX19814

SEQ ID NO: 93470 - RNA, 1401 nt, Artificial Sequence
  derived and/or modified CDS sequence (opt1) from neuraminidase__InfluenzaB__AGX19825
augcugcccagcaccauccagacccucacgcuguuccugaccuccggcggggugcuccugagccuguacgucuccgccagccucuccuaccugcuguacagcgacauccuccugaaguucuccccgaccgagaucaccgcccccacgaugccccuggacugcgcgaacgccagcaacgugcacgccgugaaccacuccgccaccaagggcgucacccuccugcugcccgagccggaguggaccuacccccgccucagcugccccggguccacguuccagaaggcccugcugaucagcccccaccgguucggcgagaccaaggggaacuccgcgccgcucaucauccgcgagcccuucaucgccugcggccccaacgagugcaagcacuucgcccugacccacuacgccgcgcagcccggcggguacuacaacggcacccgcggggaccggaacaagcugcggcaccucaucagcgugaagcugggcaagaucccgacgguggagaacuccaucuuccacauggccgccuggagcggguccgccugccacgacggcaaggaguggaccuacaucggcgucgacgggcccgacaacaacgcccugcucaagaucaaguacggcgaggcguacaccgacaccuaccacagcuacgccaacaacauccugcgcacgcaggaguccgccugcaacugcaucgggggcaacugcuaccugauggugaccgacggcagcgccagcgggguguccgagugccgguuccucaagauccgcgagggccggaucaucaaggagaucuuccccaccgggcgcgucaagcacaccgaggagugcacgugcggcuucgccaacaacaagaccaucgagugcgcgugccgggacaacagcuacaccgccaagcgccccuucgugaagcugaacguggagaccgacacggccgagauccggcugaugugcaccgacaccuaccucgacaccccgcgccccgacgacggguccaucacgggccccugcgagagcaacggcgacaagggguccggcgggaucaagggcggguucguccaccagcggauggccagcaagaucggccgcugguacucccggaccaugagcaagaccgagcgcaugggcauggggcuguacgugaaguacgacggcgaccccugggccgacuccgacgcgcuggccuucagcggggugauggucuccaugaaggagccgggcugguacagcuucggguucgagaucaaggacaagaagugcgacgugcccugcaucggcaucgagauggugcacgacggcgggaaggagaccuggcacuccgccgccacggccaucuacugccucaugggcagcgggcagcugcugugggacaccgucaccggcguggacauggcgcucuga

SEQ ID NO: 93471 - RNA, 1401 nt, Artificial Sequence; identical to SEQ ID NO: 92985
  derived and/or modified CDS sequence (opt1) from neuraminidase__InfluenzaB__AGX19836

SEQ ID NO: 93472 - RNA, 1401 nt, Artificial Sequence; identical to SEQ ID NO: 92985
  derived and/or modified CDS sequence (opt1) from neuraminidase__InfluenzaB__AGX19847

SEQ ID NO: 93473 - RNA, 1401 nt, Artificial Sequence; identical to SEQ ID NO: 92985
  derived and/or modified CDS sequence (opt1) from neuraminidase__InfluenzaB__AGX19858

SEQ ID NO: 93474 - RNA, 1401 nt, Artificial Sequence; identical to SEQ ID NO: 92985
  derived and/or modified CDS sequence (opt1) from neuraminidase__InfluenzaB__AGX19869

SEQ ID NO: 93475 - RNA, 1401 nt, Artificial Sequence; identical to SEQ ID NO: 92985
  derived and/or modified CDS sequence (opt1) from neuraminidase__InfluenzaB__AGX19880

SEQ ID NO: 93476 - RNA, 1401 nt, Artificial Sequence; identical to SEQ ID NO: 92985
  derived and/or modified CDS sequence (opt1) from neuraminidase__InfluenzaB__AGX19891

SEQ ID NO: 93477 - RNA, 1401 nt, Artificial Sequence; identical to SEQ ID NO: 92985
  derived and/or modified CDS sequence (opt1) from neuraminidase__InfluenzaB__AGX19902

SEQ ID NO: 93478 - RNA, 1401 nt, Artificial Sequence
  derived and/or modified CDS sequence (opt1) from neuraminidase__InfluenzaB__AGX19913
augcugcccagcaccauccagacccucacgcuguuccugaccuccggcggggugcuccugagccuguacgucuccgccagccucuccuaccugcuguacagcgacauccuccugaaguucuccccgaccgagaucaccgcccccacgaugccccuggacugcgcgaacgccagcaacgugcacgccaugaaccacuccgccaccaagggcgugacccuccugcugcccgagccggaguggaccuacccccgccucagcugccccggguccacguuccagaaggcccugcugaucagcccccaccgguucggcgagaccaaggggaacuccgcgccgcucaucauccgcgagcccuucaucgccugcggccccaacgagugcaagcacuucgcccugacccacuacgccgcgcagcccggcggguacuacaacggcacccgcggggaccggaacaagcugcggcaccucaucagcgucaagcugggcaagaucccgacgguggagaacuccaucuuccacauggccgccuggagcggguccgccugccacgacggcaaggaguggaccuacaucggcguggacgggcccgacaacaacgcccugcucaagaucaaguacggcgaggcguacaccgacaccuaccacagcuacgccaacaacauccugcgcacgcaggaguccgccugcaacugcaucgggggcaacugcuaccugauggucaccgacggcagcgccagcgggguguccgagugccgguuccucaagauccgcgagggccggaucaucaaggagaucuuccccaccgggcgcgugaagcacaccgaggagugcacgugcggcuucgccagcaacaagaccaucgagugcgcgugccgggacaacuccuacaccgccaagcgccccuucgucaagcugaacguggagaccgacacggccgagauccggcugaugugcaccgacaccuaccucgacaccccgcgccccgacgacgggagcaucacgggccccugcgaguccaacggcgacaaggggagcggcgggaucaagggcggguucgugcaccagcggauggccuccaagaucggccgcugguacagccggaccauguccaagaccgagcgcaugggcauggggcuguacgucaaguacgacggcgaccccugggccgacagcgacgcgcuggccuucuccggggugauggugagcaugaaggagccgggcugguacuccuucggguucgagaucaaggacaagaagugcgacguccccugcaucggcaucgagauggugcacgacggcgggaaggagaccuggcacagcgccgccacggccaucuacugccucaugggcuccgggcagcugcugugggacaccgugaccggcgucgacauggcgcucuga

SEQ ID NO: 93479 - RNA, 1401 nt, Artificial Sequence; identical to SEQ ID NO: 92985
  derived and/or modified CDS sequence (opt1) from neuraminidase__InfluenzaB__AGX19924

SEQ ID NO: 93480 - RNA, 1401 nt, Artificial Sequence; identical to SEQ ID NO: 92985
  derived and/or modified CDS sequence (opt1) from neuraminidase__InfluenzaB__AGX19935

SEQ ID NO: 93481 - RNA, 1401 nt, Artificial Sequence; identical to SEQ ID NO: 92985
  derived and/or modified CDS sequence (opt1) from neuraminidase__InfluenzaB__AGX19946

SEQ ID NO: 93482 - RNA, 1401 nt, Artificial Sequence; identical to SEQ ID NO: 92985
  derived and/or modified CDS sequence (opt1) from neuraminidase__InfluenzaB__AGX19957

SEQ ID NO: 93483 - RNA, 1401 nt, Artificial Sequence
  derived and/or modified CDS sequence (opt1) from neuraminidase__InfluenzaB__AGX19968
augcugcccagcaccauccagacccucacgcuguuccugaccuccggcggggugcuccugagccuguacgucuccgccagccucuccuaccugcuguacagcgacauccuccugaaguucuccccgaccgagaucaccgcccccacgaugccccuggacugcgcgaacgccagcaacgugcaggccgugaaccgcuccgccaccaagggcgucacccuccugcugcccgagccggaguggaccuacccccggcucagcugccccggguccacguuccagaaggcccugcugaucagcccccaccgcuucggcgagaccaaggggaacuccgcgccgcucaucauccgggagcccuucaucgccugcggccccaacgagugcaagcacuucgcccugacccacuacgccgcgcagcccggcggguacuacaacggcacccgcggggaccggaacaagcugcgccaccucaucagcgugaagcugggcaagaucccgacgguggagaacuccaucuuccacauggccgccuggagcggguccgccugccacgacggcaaggaguggaccuacaucggcgucgacgggcccgacaacgacgcccugcucaaggugaaguacggcgaggcguacaccgacaccuaccacagcuacgccaacaagauccugcggacgcaggaguccgccugcaacugcaucgggggcaacugcuaccugaugaucaccgacggcagcgccagcgggguguccgagugccgcuuccucaagauccgggagggccgcaucaucaaggagaucuuccccaccgggcgggucaagcacaccgaggagugcacgugcggcuucgccagcaacaagaccaucgagugcgcgugccgcgacaacuccuacaccgccaagcggcccuucgugaagcugaacguggagaccgacacggccgagauccgccugaugugcaccgacaccuaccucgacaccccgcggcccaacgacgggagcaucacgggccccugcgaguccaacggcgacaaggggagcggcgggaucaagggcggguucguccaccagcgcauggaguccaagaucggccggugguacagccgcaccauguccaagaccgagcggaugggcauggggcuguacgugaaguacgacggcgaccccugggccgacagcgacgcccuggcguucuccggggugauggucagcaugaaggagccgggcugguacuccuucggguucgagaucaaggacaagaagugcgacgugcccugcaucggcaucgagauggugcacgacggcgggaaggagaccuggcacagcgccgccacggccaucuacugccucaugggcuccgggcagcugcugugggacaccgucaccggcgugaacauggcccucuga

SEQ ID NO: 93484 - RNA, 1401 nt, Artificial Sequence; identical to SEQ ID NO: 93437
  derived and/or modified CDS sequence (opt1) from neuraminidase__InfluenzaB__AGX19979

SEQ ID NO: 93485 - RNA, 1401 nt, Artificial Sequence; identical to SEQ ID NO: 93437
  derived and/or modified CDS sequence (opt1) from neuraminidase__InfluenzaB__AGX19990

SEQ ID NO: 93486 - RNA, 1401 nt, Artificial Sequence; identical to SEQ ID NO: 92985
  derived and/or modified CDS sequence (opt1) from neuraminidase__InfluenzaB__AGX20001

SEQ ID NO: 93487 - RNA, 1401 nt, Artificial Sequence; identical to SEQ ID NO: 92985
  derived and/or modified CDS sequence (opt1) from neuraminidase__InfluenzaB__AGX20012

SEQ ID NO: 93488 - RNA, 1401 nt, Artificial Sequence; identical to SEQ ID NO: 92985
  derived and/or modified CDS sequence (opt1) from neuraminidase__InfluenzaB__AGX20023

SEQ ID NO: 93489 - RNA, 1401 nt, Artificial Sequence; identical to SEQ ID NO: 92985
  derived and/or modified CDS sequence (opt1) from neuraminidase__InfluenzaB__AGX20034

SEQ ID NO: 93490 - RNA, 1401 nt, Artificial Sequence; identical to SEQ ID NO: 92985
  derived and/or modified CDS sequence (opt1) from neuraminidase__InfluenzaB__AGX20045

SEQ ID NO: 93491 - RNA, 1401 nt, Artificial Sequence
  derived and/or modified CDS sequence (opt1) from neuraminidase__InfluenzaB__AGX20056
augcugcccagcaccauccagacccucacgcuguuccugaccuccggcggggugcuccugagccuguacgucuccgccagccucuccuaccugcuguacagcgacauccuccugaaguucuccccgaccgagaucaccgcccccacgaugccccuggacugcgcgaacgccagcaacgugcaggccgugaaccgcuccgccaccaagggcgucacccuccugcugcccgagccggaguggaccuacccccggcucagcugccccggguccacguuccagaaggcccugcugaucagcccccaccgcuucggcgagaccaaggggaacuccgcgccgcucaugauccgggagcccuucaucgccugcggccccaacgagugcaagcacuucgcccugacccacuacgccgcgcagcccggcggguacuacaacggcacccgcggggaccggaacaagcugcgccaccucaucagcgugaagcugggcaagaucccgacgguggagaacuccaucuuccacauggccgccuggagcggguccgccugccacgacggcaaggaguggaccuacaucggcgucgacgggcccgacaacaacgcccugcucaaggugaaguacggcgaggcguacaccgacaccuaccacagcuacgccaacaagauccugcggacgcaggaguccgccugcaacugcaucgggggcaacugcuaccugauggugaccgacggcagcgccagcggggucuccgagugccgcuuccucaagauccgggagggccgcaucaucaaggagaucuuccccaccgggcgggugaagcacaccgaggagugcacgugcggcuucgccagcaacaagaccaucgagugcgcgugccgcgacaacuccuacaccgccaagcggcccuucgugaagcugaacgucgagaccgacacggccgagauccgccugaugugcaccgacaccuaccucgacaccccgcggcccaacgacgggagcaucacgggccccugcgaguccaacggcgacaaggggagcggcgggaucaagggcggguucgugcaccagcgcauggaguccaagaucggccggugguacagccgcaccauguccaagaccgagcggaugggcauggggcuguacgugaaguacgacggcgaccccugggccgacagcgacgcccuggcguucuccggggucauggugagcaugaaggagccgggcugguacuccuucggguucgagaucaaggacaagaagugcgacgugcccugcaucggcaucgagaugguccacgacggcgggaaggagaccuggcacagcgccgccacggccaucuacugccucaugggcuccgggcagcugcugugggacaccgugaccggcguggacauggcccucuga

SEQ ID NO: 93492 - RNA, 1401 nt, Artificial Sequence
  derived and/or modified CDS sequence (opt1) from neuraminidase__InfluenzaB__AGX20067
augcugcccagcaccauccagacccucacgcuguuccugaccuccggcggggugcuccugagccuguacgucuccgccagccucuccuaccugcuguacagcgacauccuccugaaguucuccccgaccgagaucaccgcccccacgaugccccuggacugcgcgaacgccagcaacgugcaggccgugaaccgcuccgccaccaagggcgucacccuccugcugcccgagccggaguggaccuacccccggcucagcugccccggguccacguuccagaaggcccugcugaucagcccccaccgcuucggcgagaccaaggggaacuccgcgccgcucaucauccgggagcccuucaucgccugcggccccaacgagugcaagcacuucgcccugacccacuacgccgcgcagcccggcggguacuacaacggcacccgcggggaccggaacaagcugcgccaccucaucagcgugaagcugggcaagaucccgacgguggagaacuccaucuuccacauggccgccuggagcggguccgccugccacgacggcaaggaguggaccuacaucggcgucgacgggcccgacaacaacgcccugcucaaggugaaguacggcgaggcguacaccgacaccuaccacagcuacgccaacaagauccugcggacgcaggaguccgccugcaacugcaucgggggcaacugcuaccugauggugaccgacggcagcgccagcggggucuccgagugccgcuuccucaagauccgggagggccgcaucaucaaggagaucuuccccaccgggcgggugaagcacaccgaggagugcacgugcggcuucgccagcaacaagaccaucgagugcgcgugccgcgacaacuccuacaccgccaagcggcccuucgugaagcugaacgucgagaccgacacggccgagauccgccugaugugcaccgacaccuaccucgacaccccgcggcccaacgacgggagcaucacgggccccugcgaguccaacggcgacaaggggagcggcgggaucaagggcggguucgugcaccagcgcauggaguccaagaucggccggugguacagccgcaccauguccaagaccgagcggaugggcauggggcuguacgugaaguacgacggcgaccccugggccgacagcgacgcccuggcguucuccggggucauggugagcaugaaggagccgggcugguacuccuucggguucgagaucaaggacaagaagugcgacgugcccugcaucggcaucgagaugguccacgacggcgggaaggagaccuggcacagcgccgccacggccaucuacugccucaugggcuccgggcagcugcugugggacaccgugaccggcguggacauggcccucuga

SEQ ID NO: 93493 - RNA, 1401 nt, Artificial Sequence; identical to SEQ ID NO: 92985
  derived and/or modified CDS sequence (opt1) from neuraminidase__InfluenzaB__AGX20078

SEQ ID NO: 93494 - RNA, 1401 nt, Artificial Sequence; identical to SEQ ID NO: 92985
  derived and/or modified CDS sequence (opt1) from neuraminidase__InfluenzaB__AGX20089

SEQ ID NO: 93495 - RNA, 1401 nt, Artificial Sequence
  derived and/or modified CDS sequence (opt1) from neuraminidase__InfluenzaB__AGX20100
augcugcccagcaccauccagacccucacgcuguuccugaccuccggcggggugcuccugagccuguacgucuccgccagccucuccuaccugcuguacagcgacauccuccugaaguucccguccaccgagaucaccgcccccacgaugccccuggacugcgcgaacgccagcaacgugcaggccgugaaccgcuccgccaccaagggcgucacccuccugcugcccgagccggaguggaccuacccccggcucagcugccccggguccacguuccagaaggcccugcugaucagcccccaccgcuucggcgagaccaaggggaacuccgcgccgcucaucauccgggagcccuucaucgccugcggccccaaggagugcaagcacuucgcccugacccacuacgccgcgcagcccggcggguacuacaacggcacccgcggggaccggaacaagcugcgccaccucaucagcgugaagcugggcaagaucccgacgguggagaacuccaucuuccacauggccgccuggagcggguccgccugccacgacggcaaggaguggaccuacaucggcgucgacgggcccgacaacaacgccgugcugaagaucaaguacggcgaggcguacaccgacaccuaccacagcuacgccaacaacauccuccggacgcaggaguccgccugcaacugcaucgggggcaacugcuaccugaugaucaccgacggcagcgccagcgggguguccgagugccgcuuccugaagauccgggagggccgcaucaucaaggagaucuuccccaccgggcggauccagcacaccgaggagugcacgugcggcuucgccagcaacaagaccaucgagugcgcgugccgcgacaacuccuacaccgccaagcggcccuucgucaagcucaacguggagaccgacacggccgagauccgccugaugugcaccaagaccuaccuggacaccccgcggcccgacgacgggagcaucacgggccccugcgaguccaacggcgggaagggcagcgggggcaucaagggcggguucgugcaccagcgcauggccuccaagaucggccggugguacagccgcaccauguccaagaccgagcggaaggggaugggccucuacgucaaguacgacggggaccccugggccgacagcgacgcgcuggccuucuccggcgugauggugagcauggaggagccggggugguacuccuucggcuucgagaucaaggacaagaagugcgacguccccugcaucggcaucgagauggugcacgacgggggcaaggagaccuggcacagcgccgccacggccaucuacugccugaugggguccggccagcuccugugggacaccgugaccggcgucaacauggcgcuguga

SEQ ID NO: 93496 - RNA, 1401 nt, Artificial Sequence
  derived and/or modified CDS sequence (opt1) from neuraminidase__InfluenzaB__AGX20111
augcugcccagcaccauccagacccucacgcuguuccugaccuccggcggggugcuccugagccuguacgucuccgccagccucuccuaccugcuguacagcgacauccuccugaaguucuccccgaccgagaucaccgcccccacgaugccccuggacugcgcgaacgccagcaacgugcaggccgugaaccgcuccgccaccaagggcgucacccuccugcugcccgagccggaguggaccuacccccggcucagcugccccggguccacguuccagaaggcccugcugaucagcccccaccgcuucggcgagaccaaggggaacuccgcgccgcucaucauccgggagcccuucaucgccugcggccccaacgagugcaagcacuucgcccugacccacuacgccgcgcagcccggcggguacuacaacggcacccgcggggaccggaacaagcugcgccaccucaucagcgugaagcugggcaagaucccgacgguggagaacuccaucuuccacauggccgccuggagcggguccgccugccacgacggcaaggaguggaccuacaucggcgucgacgggcccgacaacaacgcccugcucaaggugaaguacggcgaggcguacaccgacaccuaccacagcuacgccaacaagauccugcggacgcaggaguccgccugcaacugcaucgggggcaacugcuaccugaugaucaccgacggcagcgccagcgggguguccgagugccgcuuccucaagauccgggagggccgcaucaucaaggagaucuuccccaccgggcgggucaagcacaccgaggagugcacgugcggcuucgccagcaacaagaccaucgagugcgcgugccgcgacaacuccuacaccgccaagcggcccuucgugaagcugaacguggagaccgacacggccgagauccgccugaugugcaccgacaccuaccucgacaccccgcggcccgacgacgggagcaucacgggccccugcgaguccaacggcgacaaggggagcggcgggaucaagggcggguucguccaccagcgcauggaguccaagaucggccggugguacagccgcaccauguccaagaccgagcggaugggcauggggcuguacgugaaguacgacggcgaccccugggccgacagcgacgcccugaccuucuccggggugauggucagcaugaaggagccgggcugguacuccuucggguucgagaucaaggacaagaagugcgacgugcccugcaucggcaucgagauggugcacgacggcgggaaggagacguggcacagcgcggccaccgccaucuacugccucaugggcuccgggcagcugcugugggacaccgucaccggcguggacauggcccucuga

SEQ ID NO: 93497 - RNA, 1401 nt, Artificial Sequence
  derived and/or modified CDS sequence (opt1) from neuraminidase__InfluenzaB__AGX20122
augcugcccagcaccauccagacccucacgcuguuccugaccuccggcggggugcuccugagccuguacgucuccgcccuccugagcuaccugcucuacuccgacauccugcugaaguucagcccgaccgagaucaccgcccccacgaugucccucgacugcgcgaacgccagcaacgugcaggccgugaaccgcuccgccaccaagggcgucaccuuccugcugcccgagcccgaguggaccuacccgcggcucagcugccccggguccacguuccagcgcgcccugcugaucagcccccaccgguucggcgagaccaaggggaacuccgcgccccucaucauccgcgagccguucaucgccugcggccccaacgagugcaagcacuucgcccugacccacuacgccgcgcagcccggcggguacuacaacggcacccgcggggaccggaacaagcugcggcaccucaucagcgugaagcugggcaagauccccacgguggagaacuccaucuuccacauggccgccuggagcggguccgccugccacgacggcaaggaguggaccuacaucggcgucgacgggccggacaacgacgcccugcucaaggugaaguacggcgaggcguacaccgacaccuaccacagcuacgccaacaagauccugcgcacgcaggaguccgccugcaacugcaucgggggcaacugcuaccugaugaucaccgacggcagcgccagcgggguguccgagugccgguuccucaagauccgcgagggccggaucaucaaggagaucuuccccaccgggcgcgucaagcacaccgaggagugcacgugcggcuucgccagcaacaagaccaucgagugcgcgugccgggacaacuccuacaccgccaagcgccccuucgugaagcugaacguggagaccgacacggccgagauccggcugaugugcaccgacaccuaccucgacacgccccgcccggacgacgggagcaucaccggccccugcgaguccaacggcgacaaggggagcggcgggaucaagggcggguucguccaccagcggauggaguccaagaucggccgcugguacagccggaccauguccaagaccgagcgcaugggcauggggcuguacgugaaguacgacggcgaccccugggccgacagcgacgcccuggcguucuccggggugauggucagcaugaaggagcccggcugguacuccuucggguucgagaucaaggacaagaagugcgacgugccgugcaucggcaucgagauggugcacgacggcgggaaggagaccuggcacagcgccgccacggccaucuacugccucaugggcuccgggcagcugcugugggacaccgucaccggcguggacauggcccucuga

SEQ ID NO: 93498 - RNA, 1401 nt, Artificial Sequence
  derived and/or modified CDS sequence (opt1) from neuraminidase__InfluenzaB__AGX20133
augcugcccagcaccauccagacccucacgcuguuccugaccuccggcggggugcuccugagccuguacgucuccgcccuccugagcuaccugcucuacuccgacgugcugcugaaguucagcccgaccgagaucaccgcccccacgaugucccucgacugcgcgaacgccagcaacgugcaggccgucaaccgcuccgccaccaagggcgugaccuuccugcugcccgagcccgaguggaccuacccgcggcucagcugccccggguccacguuccagaaggcccugcugaucagcccccaccgcuucggcgagaccaaggggaacuccgcgccccucaucauccgggagccguucaucgccugcggccccaacgagugcaagcacuucgcccugacccacuacgccgcgcagcccggcggguacuacaacggcacccgcggggaccggaacaagcugcgccaccucaucagcgugaagcugggcaagauccccacggucgagaacuccaucuuccacauggccgccuggagcggguccgccugccacgacggcaaggaguggaccuacaucggcguggacgggccggacaacgacgcccugcucaaggugaaguacggcgaggcguacaccgacaccuaccacagcuacgccaacaagauccugcggacgcaggaguccgccugcaacugcaucgggggcaacugcuaccugaugaucaccgacggcagcgccagcggggucuccgagugccgcuuccucaagauccgggagggccgcaucaucaaggagaucuuccccaccgggcgggugaagcacaccgaggagugcacgugcggcuucgccagcaacaagaccaucgagugcgcgugccgcgacaacuccuacaccgccaagcggcccuucgugaagcugaacgucgagaccgacacggccgagauccgccugaugugcaccgacaccuaccucgacacgccccggccggacgacgggagcaucaccggccccugcgaguccaacggcgacaaggggagcggcgggaucaagggcggguucgugcaccagcgcauggaguccaagaucggccggugguacagccgcaccauguccaagaccgagcggaugggcauggggcuguacgugaaguacgacggcgaccccugggccgacagcgacgcccuggcguucuccggggucauggugagcaugaaggagcccggcugguacuccuucggguucgagaucaaggacaagaagugcgacgugccgugcaucggcaucgagaugguccacgacggcgggaaggagaccuggcacagcgccgccacggccaucuacugccucaugggcuccgggcagcugcugugggacaccgugaccggcguggacauggcccucuga

SEQ ID NO: 93499 - RNA, 1401 nt, Artificial Sequence
  derived and/or modified CDS sequence (opt1) from neuraminidase__InfluenzaB__AGX20144
augcugcccagcaccauccagacccucacgcuguuccugaccuccggcggggugcuccugagccuguacgucuccgcccuccugagcuaccugcucuacuccgacauccugcugaaguucagcccgaccgagaucaccgcccccacgaugucccucgacugcgcgaacgccagcaacgugcaggccgugaaccgcuccgccaccaagggcgucaccuuccugcugcccgagcccgaguggaccuacccgcggcucagcugccccggguccacguuccagaaggcccugcugaucagcccccaccgcuucggcgagaccaaggggaacuccgcgccccucaucauccgggagccguucaucgccugcggccccaacgagugcaagcacuucgcccugacccacuacgccgcgcagcccggcggguacuacaacggcacccgcggggaccggaacaagcugcgccaccucaucagcgugaagcugggcaagauccccacgguggagaacuccaucuuccacauggccgccuggagcggguccgccugccacgacggcaaggaguggaccuacaucggcgucgacgggccggacaacgacgcccugcucaaggugaaguacggcgaggcguacaccgacaccuaccacagcuacgccaacaagauccugcggacgcaggaguccgccugcaacugcaucgggggcaacugcuaccugaugaucaccgacggcagcgccagcgggaucuccgagugccgcuuccucaagauccgggagggccgcaucaucaaggagaucuuccccaccgggcgggugaagcacaccgaggagugcacgugcggcuucgccagcaacaagaccaucgagugcgcgugccgcgacaacuccuacaccgccaagcggcccuucgucaagcugaacguggagaccgacacggccgagauccgccugaugugcaccgacaccuaccucgacacgccccggccggacgacgggagcaucaccggccccugcgaguccaacggcgacaaggggagcggcgggaucaagggcggguucgugcaccagcgcauggaguccaagaucggccggugguacagccgcaccauguccaagaccgagcggaugggcauggggcuguacgucaaguacgacggcgaccccugggccgacagcgacgcccuggcguucuccggggugauggugagcaugaaggagcccggcugguacuccuucggguucgagaucaaggacaagaagugcgacgucccgugcaucggcaucgagauggugcacgacggcgggaaggagaccuggcacagcgccgccacggccaucuacugccucaugggcuccgggcagcugcugugggacaccgugaccggcgucgacauggcccucuga

SEQ ID NO: 93500 - RNA, 1401 nt, Artificial Sequence; identical to SEQ ID NO: 93499
  derived and/or modified CDS sequence (opt1) from neuraminidase__InfluenzaB__AGX20155

SEQ ID NO: 93501 - RNA, 1401 nt, Artificial Sequence; identical to SEQ ID NO: 93499
  derived and/or modified CDS sequence (opt1) from neuraminidase__InfluenzaB__AGX20166

SEQ ID NO: 93502 - RNA, 1401 nt, Artificial Sequence; identical to SEQ ID NO: 92919
  derived and/or modified CDS sequence (opt1) from neuraminidase__InfluenzaB__AGX20177

SEQ ID NO: 93503 - RNA, 1401 nt, Artificial Sequence; identical to SEQ ID NO: 92919
  derived and/or modified CDS sequence (opt1) from neuraminidase__InfluenzaB__AGX20188

SEQ ID NO: 93504 - RNA, 1401 nt, Artificial Sequence; identical to SEQ ID NO: 92896
  derived and/or modified CDS sequence (opt1) from neuraminidase__InfluenzaB__AGX20199

SEQ ID NO: 93505 - RNA, 1401 nt, Artificial Sequence; identical to SEQ ID NO: 92919
  derived and/or modified CDS sequence (opt1) from neuraminidase__InfluenzaB__AGX20210

SEQ ID NO: 93506 - RNA, 1401 nt, Artificial Sequence; identical to SEQ ID NO: 93499
  derived and/or modified CDS sequence (opt1) from neuraminidase__InfluenzaB__AGX20221

SEQ ID NO: 93507 - RNA, 1401 nt, Artificial Sequence
  derived and/or modified CDS sequence (opt1) from neuraminidase__InfluenzaB__AGX20232
augcugcccagcaccauccagacccucacgcuguuccugaccuccggcggggugcuccugagccuguacgucuccgccagccucuccuaccugcuguacagcggcauccuccugaaguucuccccgaccgagaucaccgcccccacgaugccccuggacugcgcgaacgccagcaacgugcaggccgugaaccgcuccgccaccaagggggucaccuuccuccugcccgagccggaguggaccuacccccggcugagcugccccggcuccacguuccagaaggcccuccugaucagcccccaccgcuucggggagaccaagggcaacuccgcgccgcugaucauccgggagcccuucaucgccugcggccccaacgagugcaagcacuucgcccucacccacuacgccgcgcagcccgggggcuacuacaacgggacccgcggcgaccggaacaagcugcgccaccugaucagcgugaagcucgggaagaucccgacgguggagaacuccaucuuccacauggccgccuggagcggcuccgccugccacgacggcaaggaguggaccuacaucggggucgacggccccgacaacaacgcccugcugaaggugaaguacggggaggcguacaccgacaccuaccacagcuacgccaacaagauccuccggacgcaggaguccgccugcaacugcaucggcggcaacugcuaccugaugaucaccgacgggagcgccagcggcguguccgagugccgcuuccugaagauccgggaggggcgcaucaucaaggagaucuuccccaccggccgggucaagcacaccgaggagugcacgugcggguucgccagcaacgagaccaucgagugcgcgugccgcgacaacuccuacaccgccaagcggcccuucgugaagcucaacguggagaccgacacggccgagauccgccugaugugcaccgacaccuaccuggacaccccgcggcccaacgacggcagcaucacgggccccugcgaguccaacggggacaagggcgggggcgggaucaagggcggcuucguccaccagcgcauggagagcaagaucgggcggugguacucccgcaccaugagcaagaccgagcggaugggcauggggcucuacgugaaguacgacggcgaccccugggccgacuccgacgcccuggcguucagcggggugauggucuccaugaaggagccgggcugguacagcuucggcuucgagaucaaggacaagaagugcgacgugcccugcaucgggaucgagauggugcacgacggcgggaaggagaccuggcacuccgccgccacggccaucuacugccugaugggcagcggccagcuccugugggacaccgucaccgggguggacauggcccuguga

SEQ ID NO: 93508 - RNA, 1401 nt, Artificial Sequence; identical to SEQ ID NO: 92919
  derived and/or modified CDS sequence (opt1) from neuraminidase__InfluenzaB__AGX20243

SEQ ID NO: 93509 - RNA, 1401 nt, Artificial Sequence; identical to SEQ ID NO: 93499
  derived and/or modified CDS sequence (opt1) from neuraminidase__InfluenzaB__AGX20254

SEQ ID NO: 93510 - RNA, 1401 nt, Artificial Sequence; identical to SEQ ID NO: 92896
  derived and/or modified CDS sequence (opt1) from neuraminidase__InfluenzaB__AGX20265

SEQ ID NO: 93511 - RNA, 1401 nt, Artificial Sequence; identical to SEQ ID NO: 93499
  derived and/or modified CDS sequence (opt1) from neuraminidase__InfluenzaB__AGX20276

SEQ ID NO: 93512 - RNA, 1401 nt, Artificial Sequence; identical to SEQ ID NO: 92919
  derived and/or modified CDS sequence (opt1) from neuraminidase__InfluenzaB__AGX20287

SEQ ID NO: 93513 - RNA, 1401 nt, Artificial Sequence
  derived and/or modified CDS sequence (opt1) from neuraminidase__InfluenzaB__AGX20298
augcugcccagcaccauccagacccucacgcuguuccugaccuccggcggggugcuccugagccuguacgucuccgcccuccugagcuaccugcucuacuccgacauccugcugaaguucagcccgaccgagaucaccgcccccacgaugucccucgacugcgcgaacgccagcaacgugcaggccgugaaccgcuccgccaccaagggcgucaccuuccugcugcccgagcccgaguggaccuacccgcggcucagcugccccggguccacguuccagaaggcccugcugaucagcccccaccgcuucggcgagaccaaggggaacuccgcgccccucaucauccgggagccguucaucgccugcggccccaacgagugcaagcacuucgcccugacccacuacgccgcgcagcccggcggguacuacaacggcacccgcggggaccggaacaagcugcgccaccucaucagcgugaagcugggcaagauccccacgguggagaacuccaucuuccacauggccgccuggagcggguccgccugccacgacggcaaggaguggaccuacaucggcgucgacgggccggacaacgacgcccugcucaaggugaaguacggcgaggcguacaccgacaccuaccacagcuacgccaacaagauccugcggacgcaggaguccgccugcaacugcaucgggggcaacugcuaccugaugaucaccgacggcagcgccagcgggguguccgagugccgcuuccucaagauccgggagggccgcaucaucaaggagaucuuccccaccgggcgggucaagcacaccgaggagugcacgugcggcuucgccagcaacaagaccaucgagugcgcgugccgcgacaacuccuacaccgccaagcggcccuucgugaagcugaacguggagaccgacacggccgagauccgccugaugugcaccgacaccuaccucgacacgccccggccggacgacgggagcaucaccggccccugcgaguccaacggcgacaaggggagcggcgggaucaagggcggguucguccaccagcgcauggaguccaagaucggccggugguacagccgcaccauguccaagaccgagcggaugggcauggggcuguacgugaaguacgacggcgaccccugggccgacagcgacgcccuggcguucuccggggugauggucagcaugaaggagcccggcugguacuccuucggguucgagaucaaggacaagaagugcgacgugccgugcaucggcaucgagauggugcacgacggcgggaaggagaccuggcagagcgccgccacggccaucuacugccucaugggcuccgggcagcugcugugggacaccgucaccggcguggacauggcccucuga

SEQ ID NO: 93514 - RNA, 1401 nt, Artificial Sequence; identical to SEQ ID NO: 92896
  derived and/or modified CDS sequence (opt1) from neuraminidase__InfluenzaB__AGX20320

SEQ ID NO: 93515 - RNA, 1401 nt, Artificial Sequence; identical to SEQ ID NO: 92919
  derived and/or modified CDS sequence (opt1) from neuraminidase__InfluenzaB__AGX20331

SEQ ID NO: 93516 - RNA, 1401 nt, Artificial Sequence
  derived and/or modified CDS sequence (opt1) from neuraminidase__InfluenzaB__AGX20342
augcugcccagcaccauccagacccucacgcuguuccugaccuccggcggggugcuccugagccuguacgucuccgccagccucuccuaccugcuguacagcgacauccuccugaaguucuccccgaccgagaucaccgcccccacgaugccccuggacugcgcgaacgccagcaacgugcaggccgugaaccgcuccgccaccaagggcgucacccuccugcugcccgagccggaguggaccuacccccggcucagcugccccggguccacguuccagaaggcccugcugaucagcccccaccgcuucggcgagaccaaggggaacuccgcgccgcucaucauccgggagcccuucaucgccugcggccccaacgagugcaagcacuucgcccugacccacuacgccgcgcagcccggcggguacuacaacggcacccgcggggaccggaacaagcugcgccaccucaucagcgugaagcugggcaagaucccgacgguggagaacuccaucuuccacauggccgccuggagcggguccgccugccacgacggcaaggaguggaccuacaucggcgucgacgggcccgacaacaacgcccugcucaaggugaaguacggcgaggcguacaccgacaccuaccacagcuacgccaacaagauccugcggacgcaggaguccgccugcaacugcaucgggggcaacugcuaccugauggugaccgacggcagcgccagcggggucuccgagugccgcuuccucaagauccgggagggccgcaucaucaaggagaucuuccccaccgggcgggugaagcacaccgaggagugcacgugcggcuucgccagcaacaagaccaucgagugcgcgugccgcgacaacuccuacaccgccaagcggcccuucgugaagcugaacgucgagaccgacacggccgagauccgccugaugugcaccgacaccuaccucgacaccccgcggcccgacgacgggagcaucacgggccccugcgaguccaacggcgacaaggggagcggcgggaucaagggcggguucgugcaccagcgcauggaguccaagaucggccggugguacagccgcaccauguccaagaccgagcggaugggcauggggcuguacgugaaguacgacggcgaccccugggccgacagcgacgcccuggcguucuccggggucauggugagcaugaaggagccgggcugguacuccuucggguucgagaucaaggacaagaagugcgacgugcccugcaucggcaucgagaugguccacgacggcgggaaggagaccuggcacagcgccgccacggccaucuacugccucaugggcuccgggcagcugcugugggacaccgugaccggcguggacauggcccucuga

SEQ ID NO: 93517 - RNA, 1401 nt, Artificial Sequence
  derived and/or modified CDS sequence (opt1) from neuraminidase__InfluenzaB__AGX20353
augcugcccagcaccauccagacccucacgcuguuccugaccuccggcggggugcuccugagccuguacgucuccgcccuccugagcuaccugcucuacuccgacauccugcugaaguucagcccgaccgagaucaucgcccccaccaugucccucgacugcgcgaacgccagcaacgugcaggccgugaaccgcuccgccacgaagggcgucaccuuccugcugcccgagcccgaguggaccuacccgcggcucagcugccccggguccaccuuccagaaggcccugcugaucagcccccaccgcuucggcgagacgaaggggaacuccgcgccccucaucauccgggagccguucaucgccugcggccccaacgagugcaagcacuucgcccugacccacuacgccgcgcagcccggcggguacuacaaccgcacccggggcgaccgcaacaagcugcggcaccucaucagcgugaagcuggggaagauccccaccguggagaacuccaucuuccacauggccgccuggagcggcuccgccugccacgacgggaaggaguggacguacaucggcgucgacggcccggacaacgacgcccugcucaaggugaaguacggggaggcguacaccgacaccuaccacagcuacgccaacaagauccugcgcacccaggaguccgccugcaacugcaucggcgggaacugcuaccugaugaucacggacggcagcgccagcggcaucuccgagugccgguuccucaagauccgcgaggggcggaucaucaaggagaucuuccccaccggccgcgugaagcacaccgaggagugcacgugcggguucgccagcaacaagaccaucgagugcgcgugccgggacaacuccuacaccgccaagcgccccuucgucaagcugaacguggagaccgacaccgccgagauccggcugaugugcacggacaccuaccucgacacgccccgcccggacgacggcagcaucaccgggcccugcgaguccaacggcgacaagggcagcgggggcaucaagggcggguucgugcaccagcggauggaguccaagaucgggcgcugguacagccggaccauguccaagaccgagcgcaugggcaugggccuguacgucaaguacgacggggaccccugggccgacagcgacgcccuggcguucuccggcgugauggugagcaugaaggagcccgggugguacuccuucggcuucgagaucaaggacaagaagugcgacgucccgugcaucgggaucgagauggugcacgacggcggcaaggagaccuggcacagcgccgccaccgccaucuacugccucaugggguccggccagcugcugugggacacggugaccggggucgacauggcccucuga

SEQ ID NO: 93518 - RNA, 1401 nt, Artificial Sequence; identical to SEQ ID NO: 92919
  derived and/or modified CDS sequence (opt1) from neuraminidase__InfluenzaB__AGX20364

SEQ ID NO: 93519 - RNA, 1401 nt, Artificial Sequence; identical to SEQ ID NO: 92914
  derived and/or modified CDS sequence (opt1) from neuraminidase__InfluenzaB__AGX20375

SEQ ID NO: 93520 - RNA, 1401 nt, Artificial Sequence
  derived and/or modified CDS sequence (opt1) from neuraminidase__InfluenzaB__AGX20386
augcugcccagcaccauccagacccucacgcuguuccugaccuccggcggggugcuccugagccuguacgucuccgcccuccugagcuaccugcucuacuccgacauccugcugaaguucagcccgaccgagaucaccgcccccacgaugucccucgacugcgcgaacgccagcaacgugcaggccgugaaccgcuccgccaccaagggcgucaccuuccugcugcccgagcccgaguggacccacccgcggcucagcugccccggguccacguuccagaaggcccugcugaucagcccccaccgcuucggcgagaccaaggggaacuccgcgccccucaucauccgggagccguucaucgccugcggccccaacgagugcaagcacuucgcccugacccacuacgccgcgcagcccggcggguacuacaacggcacccgcggggaccggaacaagcugcgccaccucaucagcgugaagcugggcaagauccccacgguggagaacuccaucuuccacauggccgccuggagcggguccgccugccacgacggcaaggaguggaccuacaucggcgucgacgggccggacaacgacgcccugcucaaggugaaguacggcgaggcguacaccgacaccuaccacagcuacgccaacaagauccugcggacgcaggaguccgccugcaacugcaucgggggcaacugcuaccugaugaucaccgacggcagcgccagcgggaucuccgagugccgcuuccucaagauccgggagggccgcaucaucaaggagaucuuccccaccgggcgggugaagcacaccgaggagugcacgugcggcuucgccagcaacaagaccaucgagugcgcgugccgcgacaacuccuacaccgccaagcggcccuucgucaagcugaacguggagaccgacacggccgagauccgccugaugugcaccgacaccuaccucgacacgccccggccggacgacgggagcaucaccggccccugcgaguccaacggcgacaaggggagcggcgggaucaagggcggguucgugcaccagcgcauggaguccaagaucggccggugguacagccgcaccauguccaagaccgagcggaugggcauggggcuguacgucaaguacgacggcgaccccugggccgacagcgacgcccuggcguucuccggggugauggugagcaugaaggagcccggcugguacuccuucggguucgagaucaaggacaagaagugcgacgucccgugcaucggcaucgagauggugcacgacggcgggaaggagaccuggcacagcgccgccacggccaucuacugccucaugggcuccgggcagcugcugugggacaccgugaccggcgucgacauggcccucuga

SEQ ID NO: 93521 - RNA, 1401 nt, Artificial Sequence; identical to SEQ ID NO: 92919
  derived and/or modified CDS sequence (opt1) from neuraminidase__InfluenzaB__AGX20397

SEQ ID NO: 93522 - RNA, 1401 nt, Artificial Sequence; identical to SEQ ID NO: 92914
  derived and/or modified CDS sequence (opt1) from neuraminidase__InfluenzaB__AGX20408

SEQ ID NO: 93523 - RNA, 1401 nt, Artificial Sequence; identical to SEQ ID NO: 92896
  derived and/or modified CDS sequence (opt1) from neuraminidase__InfluenzaB__AGX20419

SEQ ID NO: 93524 - RNA, 1401 nt, Artificial Sequence
  derived and/or modified CDS sequence (opt1) from neuraminidase__InfluenzaB__AGX20430
augcugcccagcaccauccagacccucacgcuguuccugaccuccggcggggugcuccugagccuguacgucuccgcccuccugagcuaccugcucuacuccgacauccugcugaaguucagcccgaccgagaucaccgcccccacgaugucccucgacugcgcgaacgccagcaacgugcaggccgugaaccgcuccgccaccaagggcgucaccuuccugcugcccgagcccgaguggaccuacccgcggcucagcugccccggguccacguuccagcgcgcccugcugaucagcccccaccgguucggcgaggcgaaggggaacuccgcgccccucaucauccgcgagccguucaucgccugcggccccaacgagugcaagcacuucgcccugacccacuacgccgcccagcccggcggguacuacaacggcacccgcggggaccggaacaagcugcggcaccucaucagcgugaagcugggcaagauccccaccguggagaacuccaucuuccacauggccgccuggagcggguccgccugccacgacggcaaggaguggacguacaucggcgucgacgggccggacaacgacgcgcugcucaaggugaaguacggcgaggccuacaccgacaccuaccacagcuacgccaacaagauccugcgcacccaggaguccgccugcaacugcaucgggggcaacugcuaccugaugaucacggacggcagcgccagcgggguguccgagugccgguuccucaagauccgcgagggccggaucaucaaggagaucuuccccaccgggcgcgucaagcacaccgaggagugcacgugcggcuucgcgagcaacaagaccaucgagugcgccugccgggacaacuccuacaccgccaagcgccccuucgugaagcugaacguggagaccgacaccgccgagauccggcugaugugcacggacaccuaccucgacacgccccgcccggacgacgggagcaucaccggccccugcgaguccaacggcgacaaggggagcggcgggaucaagggcggguucguccaccagcggauggaguccaagaucggccgcugguacagccggaccauguccaagaccgagcgcaugggcauggggcuguacgugaaguacgacggcgaccccugggccgacagcgacgcgcuggccuucuccggggugauggucagcaugaaggagcccggcugguacuccuucggguucgagaucaaggacaagaagugcgacgugccgugcaucggcaucgagauggugcacgacggcgggaaggagaccuggcacagcgccgccaccgccaucuacugccucaugggcuccgggcagcugcugugggacacggucaccggcguggacauggcgcucuga

SEQ ID NO: 93525 - RNA, 1401 nt, Artificial Sequence; identical to SEQ ID NO: 92896
  derived and/or modified CDS sequence (opt1) from neuraminidase__InfluenzaB__AGX20441

SEQ ID NO: 93526 - RNA, 1401 nt, Artificial Sequence
  derived and/or modified CDS sequence (opt1) from neuraminidase__InfluenzaB__AGX20452
augcugcccagcaccauccagacccucacgcuguuccugaccuccggcggggugcuccugagccuguacgucuccgccagccucuccuaccugcuguacagcgacauccuccugaaguucuccccgaccgagaucaccgcccccacgaugagccuggacugcgcgaacgccuccaacgugcaggccgugaaccgcagcgccaccaagggcgucaccuuccuccugcccgagcccgaguggaccuacccgcggcuguccugccccgggagcacguuccagaaggcccuccugaucagcccccaccgcuucggcgagaccaaggggaacuccgcgccccugaucauccgggagccguucaucgccugcggccccaacgagugcaagcacuucgcccucacccacuacgccgcgcagcccggcggguacuacaacggcacccgcggggaccggaacaagcugcgccaccugaucuccgugaagcucggcaagauccccacgguggagaacagcaucuuccacauggccgccugguccgggagcgccugccacgacggcaaggaguggaccuacaucggcgucgacgggccggacaacgacgcccugcugaaggugaaguacggcgaggcguacaccgacaccuaccacuccuacgccaacaagauccuccggacgcaggagagcgccugcaacugcaucgggggcaacugcuaccugaugaucaccgacggcagcgccuccggggugagcgagugccgcuuccugaagauccgggagggccgcaucaucaaggagaucuuccccaccgggcgggucaagcacaccgaggagugcacgugcggcuucgccuccaacaagaccaucgagugcgcgugccgcgacaacagcuacaccgccaagcggcccuucgugaagcucaacguggagaccgacacggccgagauccgccugaugugcaccgacaccuaccuggacacgccccggccggacgacggguccaucaccggccccugcgagagcaacggcgacaagggguccggcgggaucaagggcggguucguccaccagcgcauggagagcaagaucggccggugguacucccgcaccaugagcaagaccgagcggaugggcauggggcucuacgugaaguacgacggcgaccccugggccgacuccgacgcccuggcguucagcggggugauggucuccaugaaggagcccggcugguacagcuucggguucgagauccgcgacaagaagugcgacgugccgugcaucggcaucgagauggugcacgacggcgggaaggagaccuggcacuccgccgccacggccaucuacugccugaugggcagcgggcagcuccugugggacaccgucaccggcguggacauggcccuguga

SEQ ID NO: 93527 - RNA, 1401 nt, Artificial Sequence; identical to SEQ ID NO: 92919
  derived and/or modified CDS sequence (opt1) from neuraminidase__InfluenzaB__AGX20463

SEQ ID NO: 93528 - RNA, 1401 nt, Artificial Sequence; identical to SEQ ID NO: 92919
  derived and/or modified CDS sequence (opt1) from neuraminidase__InfluenzaB__AGX20474

SEQ ID NO: 93529 - RNA, 1401 nt, Artificial Sequence; identical to SEQ ID NO: 92919
  derived and/or modified CDS sequence (opt1) from neuraminidase__InfluenzaB__AGX20485

SEQ ID NO: 93530 - RNA, 1401 nt, Artificial Sequence; identical to SEQ ID NO: 93499
  derived and/or modified CDS sequence (opt1) from neuraminidase__InfluenzaB__AGX20496

SEQ ID NO: 93531 - RNA, 1401 nt, Artificial Sequence; identical to SEQ ID NO: 92919
  derived and/or modified CDS sequence (opt1) from neuraminidase__InfluenzaB__AGX20507

SEQ ID NO: 93532 - RNA, 1401 nt, Artificial Sequence; identical to SEQ ID NO: 92919
  derived and/or modified CDS sequence (opt1) from neuraminidase__InfluenzaB__AGX20518

SEQ ID NO: 93533 - RNA, 1401 nt, Artificial Sequence
  derived and/or modified CDS sequence (opt1) from neuraminidase__InfluenzaB__AGX20529
augcugcccagcaccauccagacccucacgcuguuccugaccuccggcggggugcuccugagccuguacgucuccgcccuccugagcuaccugcucuacuccgacauccugcugaaguucagcccgaccgagaucaccgcccccacgaugucccucgacugcgcgaacgccagcaacgugcaggccgugaaccgcuccgccaccaagggcgucaccuuccugcugcccgagcccgaguggaccuacccgcggcucagcugccccggguccacguuccagaaggcccugcugaucagcccccaccgcuucggcgagaccaaggggaacuccgcgccccucaucauccgggagccguucaucgccugcggccccaacgagugcaagcacuucgcccugacccacuacgccgcgcagcccggcggguacuacaacggcacccgcggggaccggaacaagcugcgccaccucaucagcgugaagcugggcaagauccccacgguggagaacuccaucuuccacauggccgccuggagcggguccgccugccacgacggcaaggaguggaccuacaucggcgucgacgggccggacaacgacgcccugcucaaggugaaguacggcgaggcguacaccgacaccuaccacagcuacgccaacaagauccugcggacgcaggaguccgccugcaacugcaucgggggcaacugcuaccugaugaucaccgacggcagcgccagcgggguguccgagugccgcuuccucaagauccgggagggccgcaucaucaaggagaucuuccccaccgggcgggucaagcacaccgaggagugcacgugcggcuucgccagcaacaagaccaucgagugcacgugccgcgacaacuccuacaccgcgaagcggcccuucgugaagcugaacguggagaccgacaccgccgagauccgccugaugugcaccgacaccuaccucgacacgccccggccggacgacgggagcaucaccggccccugcgaguccaacggcgacaaggggagcggcgggaucaagggcggguucguccaccagcgcauggaguccaagaucggccggugguacagccgcaccauguccaagaccgagcggaugggcauggggcuguacgugaaguacgacggcgaccccugggccgacagcgacgcccuggccuucuccggggugauggucagcaugaaggagcccggcugguacuccuucggguucgagaucaaggacaagaagugcgacgugccgugcaucggcaucgagauggugcacgacggcgggaaggagacguggcacagcgcggccaccgccaucuacugccucaugggcuccgggcagcugcugugggacaccgucaccggcguggacauggcccucuga

SEQ ID NO: 93534 - RNA, 1401 nt, Artificial Sequence; identical to SEQ ID NO: 93497
  derived and/or modified CDS sequence (opt1) from neuraminidase__InfluenzaB__AGX20540

SEQ ID NO: 93535 - RNA, 1401 nt, Artificial Sequence; identical to SEQ ID NO: 93143
  derived and/or modified CDS sequence (opt1) from neuraminidase__InfluenzaB__AGX20551

SEQ ID NO: 93536 - RNA, 1401 nt, Artificial Sequence; identical to SEQ ID NO: 92896
  derived and/or modified CDS sequence (opt1) from neuraminidase__InfluenzaB__AGX20562

SEQ ID NO: 93537 - RNA, 1401 nt, Artificial Sequence; identical to SEQ ID NO: 92919
  derived and/or modified CDS sequence (opt1) from neuraminidase__InfluenzaB__AGX20573

SEQ ID NO: 93538 - RNA, 1401 nt, Artificial Sequence
  derived and/or modified CDS sequence (opt1) from neuraminidase__InfluenzaB__AGX20584
augcugcccagcaccauccagacccucacgcuguuccugaccuccggcggggugcuccugagccuguacgucuccgccagccucuccuaccugcuguacagcgacauccuccugaaguucuccagcaccgagaucaccgccccgacgaugccccuggacugcgcgaacgccuccaacgugcaggccgugaaccgcagcgccaccaagggcgucacccuccugcugcccgagcccgaguggaccuacccgcggcucuccugccccgggagcacguuccagaaggcccugcugaucagcccccaccgcuucggcgagaccaaggggaacuccgcgccccucaucauccgggagccguucaucgccugcggccccaacgagugcaagcacuucgcccugacccacuacgccgcgcagcccggcggguacuacaacggcacccgcggggaccggaacaagcugcgccaccucaucuccgugaagcugggcaagauccccacgguggagaacagcaucuuccacauggccgccugguccgggagcgccugccacgacggcaaggaguggaccuacaucggcgucgacgggccggacaacaacgcccugcucaaggugaaguacggcgaggcguacaccgacaccuaccacuccuacgccaacaagauccugcggacgcaggagagcgccugcaacugcaucgggggcaacugcuaccugaugaucaccgacggcagcgccuccggggugagcgagugccgcuuccucaagauccgggagggccgcaucaucaaggagaucuuccccaccgggcgggucaagcacaccgaggagugcacgugcggcuucgccuccaacaagaccaucgagugcgcgugccgcgacaacagcuacaccgccaagcggcccuucgugaagcugaacguggagaccgacacggccgagauccgccugaugugcaccgacaccuaccucgacacgccccggccgaacgacggguccaucaccggccccugcgagagcaacggcgacaagggguccggcgggaucaagggcggguucguccaccagcgcauggagagccggaucggccgcugguacucccggaccaugagcaagaccgagcgcaugggcauggggcuguacgugaaguacgacggcgaccccuggaccgacuccgacgcccugacguucagcggggugauggucuccaugaaggagcccggcugguacagcuucggguucgagaucaaggacaagaagugcgacgugccgugcaucggcaucgagauggugcacgacggcgggaaggagaccuggcacuccgccgcgaccgccaucuacugccucaugggcagcgggcagcugcugugggacaccgucacgggcguggacauggcccucuga

SEQ ID NO: 93539 - RNA, 1401 nt, Artificial Sequence; identical to SEQ ID NO: 92919
  derived and/or modified CDS sequence (opt1) from neuraminidase__InfluenzaB__AGX20595

SEQ ID NO: 93540 - RNA, 1401 nt, Artificial Sequence; identical to SEQ ID NO: 93497
  derived and/or modified CDS sequence (opt1) from neuraminidase__InfluenzaB__AGX20606

SEQ ID NO: 93541 - RNA, 1401 nt, Artificial Sequence; identical to SEQ ID NO: 93497
  derived and/or modified CDS sequence (opt1) from neuraminidase__InfluenzaB__AGX20617

SEQ ID NO: 93542 - RNA, 1401 nt, Artificial Sequence; identical to SEQ ID NO: 93524
  derived and/or modified CDS sequence (opt1) from neuraminidase__InfluenzaB__AGX20628

SEQ ID NO: 93543 - RNA, 1401 nt, Artificial Sequence; identical to SEQ ID NO: 92924
  derived and/or modified CDS sequence (opt1) from neuraminidase__InfluenzaB__AGX20639

SEQ ID NO: 93544 - RNA, 1401 nt, Artificial Sequence
  derived and/or modified CDS sequence (opt1) from neuraminidase__InfluenzaB__AGX20650
augcugcccagcaccauccagacccucacgcuguuccugaccuccggcggggugcuccugagccuguacgucuccgcccuccugagcuaccugcucuacuccgacauccugcugaaguucagcccgaccgagaucaccgcccccacgaugucccucgacugcgcgaacgccagcaacgugcaggccgugaaccgcuccgccaccaagggcgucaccuuccugcugcccgagcccgaguggaccuacccgcggcucagcugccccggguccacguuccagaaggcccugcugaucagcccccaccgcuucggcgagaccaaggggaacuccgcgccccucaucauccgggagccguucaucgccugcggccccaacgagugcaagcacuucgcccugacccacuacgccgcgcagcccggcggguacuacaacggcacccgcggggaccggaacaagcugcgccaccucaucagcgugaagcugggcaagauccccacgguggagaacuccaucuuccacauggccgccuggagcggguccgccugccacgacggcaaggaguggaccuacaucggcgucgacgggccggacaacgacgcccugcucaaggugaaguacggcgaggcguacaccgacaccuaccacagcuacgccaacaagauccugcggacgcaggaguccacgugcaacugcaucgggggcaacugcuaccugaugaucaccgacggcagcgccagcgggguguccgagugccgcuuccucaagauccgggagggccgcaucaucaaggagaucuuccccaccgggcgggucaagcacaccgaggagugcacgugcggcuucgccagcaacaagaccaucgagugcgccugccgcgacaacuccuacaccgcgaagcggcccuucgugaagcugaacguggagaccgacaccgccgagauccgccugaugugcaccgacaccuaccucgacacgccccggccggacgacgggagcaucaccggccccugcgaguccaacggcgacaaggggagcggcgggaucaagggcggguucguccaccagcgcauggaguccaagaucggccggugguacagccgcaccauguccaagaccgagcggaugggcauggggcuguacgugaaguacgacggcgaccccugggccgacagcgacgcccuggccuucuccggggugauggucagcaugaaggagcccggcugguacuccuucggguucgagaucaaggacaagaagugcgacgugccgugcaucggcaucgagauggugcacgacggcgggaaggagacguggcacagcgcggccaccgccaucuacugccucaugggcuccgggcagcugcugugggacaccgucaccggcguggacauggcccucuga

SEQ ID NO: 93545 - RNA, 1401 nt, Artificial Sequence
  derived and/or modified CDS sequence (opt1) from neuraminidase__InfluenzaB__AGX20661
augcugcccagcaccauccagacccucacgcuguuccugaccuccggcggggugcuccugagccuguacgucuccgccagccucuccuaccugcuguacagcgacauccuccugaaguucuccccgaccgagaucaccgcccccacgaugccccuggacugcgcgaacgccagcaacgugcaggccgugaaccgcuccgccaccaagggcgucacccuccugcugcccgagccggaguggaccuacccccggcucagcugccccggguccacguuccagaaggcccugcugaucagcccccaccgcuucggcgagaccaaggggaacuccgcgccgcucaucauccgggagcccuucaucgccugcggccccaacgagugcaagcacuucgcccugacccacuacgccgcgcagcccggcggguacuacaacggcacccgcggggaccggaacaagcugcgccaccucaucagcgugaaccugggcaagaucccgacgguggagaacuccaucuuccacauggccgccuggagcggguccgccugccacgacggcaaggaguggaccuacaucggcgucgacgggcccgacaacaacgcccugcucaaggugaaguacggcgaggcguacaccgacaccuaccacagcuacgccaacaacauccugcggacgcaggaguccgccugcaacugcaucgggggcaacugcuaccugaugaucaccgacggcagcgccagcgggguguccgagugccgcuuccucaagauccgggagggccgcaucaucaaggagaucuuccccaccgggcgggucaagcacaccgaggagugcacgugcggcuucgccagcaacaagaccaucgagugcgcgugccgcgacaacuccuacaccgccaagcggcccuucgugaagcugaacguggagaccgacacggccgagauccgccugaugugcaccgacaccuaccucgacaccccgcggcccaacgacgggagcaucacgggccccugcgaguccaacggcgacaaggggagcggcgggaucaagggcggguucguccaccagcgcauggaguccaagaucggccggugguacagccgcaccauguccaagaccgagcggaugggcauggggcuguacgugaaguacgacggcgaccccuggaccgacagcgacgcccuggccuucuccggggugauggucagcaugaaggagccgggcugguacuccuucggguucgagaucaaggacaagaagugcgacgugcccugcaucggcaucgagauggugcacgacggcgggaaggagacguggcacagcgcggccaccgccaucuacugccucaugggcuccgggcagcugcugugggacaccgucaccggcguggacauggcccucuga

SEQ ID NO: 93546 - RNA, 1401 nt, Artificial Sequence; identical to SEQ ID NO: 92980
  derived and/or modified CDS sequence (opt1) from neuraminidase__InfluenzaB__AGX20683

SEQ ID NO: 93547 - RNA, 1401 nt, Artificial Sequence; identical to SEQ ID NO: 93143
  derived and/or modified CDS sequence (opt1) from neuraminidase__InfluenzaB__AGX20694

SEQ ID NO: 93548 - RNA, 1401 nt, Artificial Sequence
  derived and/or modified CDS sequence (opt1) from neuraminidase__InfluenzaB__AGX20705
augcugcccagcaccauccagacccucacgcuguuccugaccuccggcggggugcuccugagccuguacgucuccgccagccucuccuaccugcuguacagcggcauccuccugaaguucuccccgaccgagaucaccgcccccacgaugccccuggacugcgcgaacgccagcgacgugcaggccgugaaccgcuccgccaccaagggggucacccuccugcugcccgagccggaguggaccuacccccggcucagcugccccggcuccacguuccagaaggcccugcugaucagcccccaccgcuucggggagaccaagggcaacuccgcgccgcucaucauccgggagcccuucaucgccugcggccccaacgagugcaagcacuucgcccugacccacuacgccgcgcagcccgggggcuacuacaacgggacccgcggcgaccggaacaagcugcgccaccucaucagcgugaagcuggggaagaucccgacgguggagaacuccaucuuccacauggccgccuggagcggcuccgccugccacgacggcaaggaguggaccuacaucggggucgacggccccgacaacaacgcccugcucaaggugaaguacggggaggcguacaccgacaccuaccacagcuacgccaacaagauccugcggacgcaggaguccgccugcaacugcaucggcggcaacugcuaccugaugaucaccgacgggagcgccagcggcguguccgagugccgcuuccucaagauccgggaggggcgcaucaucaaggagaucuuccccaccggccgggucaagcacaccgaggagugcacgugcggguucgccagcaacaagaccaucgagugcgcgugccgcgacaacuccuacaccgccaagcggcccuucgugaagcugaacguggagaccgacacggccgagauccgccugaugugcaccgacaccuaccucgacaccccgcggcccaacgacggcagcaucacgggccccugcgaguccaacggggacaagggcagcgggggcaucaagggcggguucguccaccagcgcauggaguccaagaucggccggugguacagccgcaccauguccaagaccgagcggauggggaugggccuguacgugaaguacgacggggaccccugggccgacagcgacgcccugaccuucuccggcgugauggucagcaugaaggagccggggugguacuccuucggcuucgagaucaaggacaagaagugcgacgugcccugcaucggcaucgagauggugcacgacgggggcaaggagacguggcacagcgcggccaccgccaucuacugccucaugggguccggccagcugcugugggacaccgucaccggcguggacauggcccucuga

SEQ ID NO: 93549 - RNA, 1401 nt, Artificial Sequence
  derived and/or modified CDS sequence (opt1) from neuraminidase__InfluenzaB__AGX20716
augcugcccagcaccauccagacccucacgcuguuccugaccuccggcggggugcuccugagccuguacgucuccgccagccucuccuaccugcuguacagcgacauccuccugaaguucuccccgaccgagaucaccgcccccacgaugccccuggacugcgcgaacgccagcaacgugcaggccgugaaccgcuccgccaccaagggcgucacccuccugcugcccgagccggaguggaccuacccccggcucagcugccccggguccacguuccagaaggcccugcugaucagcccccaccgcuucggcgagaccaaggggaacuccgcgccgcucaucauccgggagcccuucaucgccugcggccccaacgagugcaagcacuucgcccugacccacuacgccgcgcagcccggcggguacuacaacggcacccgcggggaccggaacaagcugcgccaccucaucagcgugaagcugggcaagaucccgacgguggagaacuccaucuuccacauggccgccuggagcggguccgccugccacgacggcaaggaguggaccuacaucggcgucgacgggcccgacaacaacgcccugcucaaggugaaguacggcgaggcguacaccgacaccuaccacagcuacgccaacaagauccugcggacgcaggaguccgccugcaacugcaucgggggcaacugcuaccugaugaucaccgacggcagcgccagcgggguguccgagugccgcuuccucaagauccgggagggccgcaucaucaaggagaucuuccccaccgggcgggucaagcacaccgaggagugcacgugcggcuucgccagcaacaagaccaucgagugcgcgugccgcgacaacuccuacaccgccaagcggcccuucgugaagcugaacguggagaccgacacggccgagauccgccugaugugcaccgacaccuaccucgacaccccgcggcccaacgacgggagcaucacgggccccugcgaguccgacggcgacaaggggagcggcgggaucaagggcggguucguccaccagcgcaucgagucccggaucggccgcugguacagccggaccauguccaagaccgagcgcaugggcauggggcuguacgugaaguacgacggcgaccccugggccgacagcgacgcccuggcguucuccggggugauggucagcaugaaggagccgggcugguacuccuucggguucgagaucaaggacaagaagugcgacgugcccugcaucggcaucgagauggugcacgacggcgggaaggagaccuggcacagcgccgccacggccaucuacugccucaugggcuccgggcagcugcugugggacaccgucaccggcguggacauggcccucuga

SEQ ID NO: 93550 - RNA, 1401 nt, Artificial Sequence
  derived and/or modified CDS sequence (opt1) from neuraminidase__InfluenzaB__AGX20727
augcugcccagcaccauccagacccucacgcuguuccugaccuccggcggggugcuccugagccuguacgucuccgcccuccugagcuaccugcucuacuccgacauccugcugaaguucagcccgaccgagaucaccgcccccacgaugucccucgacugcgcgaacgccagcaacgugcaggccgugaaccgcuccgccaccaagggcgucaccuuccugcugcccgagcccgaguggaccuacccgcggcucagcugccccggguccacguuccagaaggcccugcugaucagcccccaccgcuucggcgagaccaaggggaacuccgcgccccucaucauccgggagccguucaucgccugcggccccaacgagugcaagcacuucgcccugacccacuacgccgcgcagcccggcggguacuacaacggcacccgcggggaccggaacaagcugcgccaccucaucagcgugaagcugggcaagauccccacgguggagaacuccaucuuccacauggccgccuggagcggguccgccugccacgacggcaaggaguggaccuacaucggcgucgacgggccggacaacgacgcccugcucaaggugaaguacggcgaggcguacaccgacaccuaccacagcuacgccaacaagauccugcggacgcaggaguccgccugcaacugcaucgggggcaacugcuaccugaugaucaccgacggcagcgccagcgggguguccgagugccgcuuccucaagauccgggagggccgcaucaucaaggagaucuuccccaccgggcgggucaagcacaccgaggagugcacgugcggcuucgccagcaacaagaccaucgagugcgcgugccgcgacaacuccuacaccgccaagcggcccuucgugaagcugaacguggagaccgacacggccgagauccgccugaugugcaccgacaccuaccucgacacgccccggccggacgacgggagcaccaccggccccugcgaguccaacggcgacaaggggagcggcgggaucaagggcggguucguccaccagcgcauggaguccaagaucggccggugguacagccgcaccauguccaagaccgagcggaugggcauggggcuguacgugaaguacgacggcgaccccugggccgacagcgacgcccuggcguucuccggggugauggucagcaugaaggagcccggcugguacuccuucggguucgagaucaaggacaagaagugcgacgugccgugcaucggcaucgagauggugcacgacggcgggaaggagacguggcacagcgccgccaccgccaucuacugccucaugggcuccgggcagcugcugugggacaccgucaccggcguggacauggcccucuga

SEQ ID NO: 93551 - RNA, 1401 nt, Artificial Sequence; identical to SEQ ID NO: 93143
  derived and/or modified CDS sequence (opt1) from neuraminidase__InfluenzaB__AGX20738

SEQ ID NO: 93552 - RNA, 1401 nt, Artificial Sequence; identical to SEQ ID NO: 92919
  derived and/or modified CDS sequence (opt1) from neuraminidase__InfluenzaB__AGX20749

SEQ ID NO: 93553 - RNA, 1401 nt, Artificial Sequence
  derived and/or modified CDS sequence (opt1) from neuraminidase__InfluenzaB__AGX20760
augcugcccagcaccauccagacccucacgcuguuccugaccuccggcggggugcuccugagccuguacgucuccgccagccucuccuaccugcuguacagcgacauccuccugaaguucuccccgaccgagaucaccgcccccacgaugccccuggacugcgcgaacgccagcaacgugcaggccgugaaccgcuccgccaccaagggcgucacccuccugcugcccgagccggaguggaccuacccccggcucagcugccccggguccacguuccagaaggcccugcugaucagcccccaccgcuucggcgagaccaaggggaacuccgcgccgcucaucauccgggagcccuucaucgccugcggccccaacgagugcaagcacuucgcccugacccacuacgccgcgcagcccggcggguacuacaacggcacccgcggggaccggaacaagcugcgccaccucaucagcgugaagcugggcaagaucccgacgguggagaacuccaucuuccacauggccgccuggagcggguccgccugccacgacggcaaggaguggaccuacaucggcgucgacgggcccgacaacaacgcccugcucaaggugaaguacggcgaggcguacaccgacaccuaccacagcuacgccaacaagauccugcggacgcaggaguccgccugcaacugcaucgggggcaacugcuaccugaugaucaccgacggcagcgccagcgggguguccgagugccgcuuccucaagauccgggagggccgcaucaucaaggagaucuuccccaccgggcgggucaagcacaccgaggagugcacgugcggcuucgccagcaacaagaccaucgagugcgcgugccgcgacaacuccuacaccgccaagcggcccuucgugaagcugaacguggagaccgacacggccgagauccgccugaugugcaccgacaccuaccucgacaccccgcggcccaacgacgggagcaucacgggccccugcgaguccgacggcgacaaggggagcggcgggaucaagggcggguucguccaccagcgcauggagucccggaucggccgcugguacagccggaccauguccaagaccgagcgcaugggcauggggcuguacgugaaguacgacggcgaccccugggccgacagcgacgcccuggcguucuccggggugauggucagcaugaaggagccgggcugguacuccuucggguucgagaucaaggacaagaagugcgacgugcccugcaucggcaucgagauggugcacgacggcgggaaggagaccuggcacagcgccgccacggccaucuacugccucaugggcuccgggcagcugcugugggacaccgucaccggcguggacauggcccucuga

SEQ ID NO: 93554 - RNA, 1401 nt, Artificial Sequence; identical to SEQ ID NO: 92919
  derived and/or modified CDS sequence (opt1) from neuraminidase__InfluenzaB__AGX20771

SEQ ID NO: 93555 - RNA, 1401 nt, Artificial Sequence
  derived and/or modified CDS sequence (opt1) from neuraminidase__InfluenzaB__AGX20782
augcugcccagcaccauccagacccucacgcuguuccugaccuccggcggggugcuccugagccuguacgucuccgccagccucuccuaccugcuguacagcgacauccuccugaaguucuccccgaccgagaucaccgcccccacgaugccccuggacugcgcgaacgccagcaacgugcaggccgugaaccacuccgccaccaagggcgucacccuccugcugcccgagccggaguggaccuacccccgccucagcugccccggguccacguuccagaaggcccugcugaucagcucccaccgguucggcgagaccaaggggaacagcgcgccccucaucauccgcgagccguucguggccugcggccccaacgagugcaagcacuucgcccugacccacuacgccgcgcagcccggcggguacuacaacggcacccgcggggaccggaacaagcugcggcaccucaucuccgugaagcugggcaagauccccacggucgagaacagcaucuuccacauggccgccugguccgggagcgccugccacgacggcaaggaguggaccuacaucggcguggacgggccggacaacaacgcccugcucaaggugaaguacggcgaggcguacaccgacaccuaccacuccuacgccaacaagauccugcgcacgcaggagagcgccugcaacugcaucgggggcaacugcuaccugaugaucaccgacggcagcgccuccggggucagcgagugccgguuccucaagauccgcgagggccggaucaucaaggagaucuuccccaccgggcgcgugaagcacaccgaggagugcacgugcggcuucgccuccaacaagaccaucgagugcgcgugccgggacaacagcuacaccgccaagcgccccuucgugaagcugaacgucgagaccgacacggccgagauccggcugaugugcaccgacaccuaccucgacacgccccgcccgaacgacggguccaucaccggccccugcgagagcgacggcgacaagggguccggcgggaucaagggcggguucgugcaccagcggauggagagcaagaucggccgcugguacucccggaccaugagccgcaccgagcggaugggcauggggcuguacgugaaguacgacggcgaccccugggccgacuccgacgcccuggcguucagcggggucaugguguccaugaaggagcccggcugguacagcuucggguucgagaucaaggacaagaagugcgacgugccgugcaucggcaucgagaugguccacgacggcgggaaggagaccuggcacuccgccgccacggccaucuacugccucaugggcagcgggcagcugcugugggacaccgugaccggcguggacauggcccucuga

SEQ ID NO: 93556 - RNA, 1401 nt, Artificial Sequence
  derived and/or modified CDS sequence (opt1) from neuraminidase__InfluenzaB__AGX20793
augcugcccagcaccauccagacccucacgcuguuccugaccuccggcggggugcuccugagccuguacgucuccgcccuccugagcuaccugcucuacuccgacauccugcugaaguucagcccgaccgagaucaccgcccccacgaugucccucgacugcgcgaacaccagcaacgugcaggccgugaaccgcuccgccaccaagggcgucaccuuccugcugcccgagcccgaguggacguacccgcggcucagcugccccggguccaccuuccagaaggcccugcugaucagcccccaccgcuucggcgagaccaaggggaacuccgcgccccucaucauccgggagccguucaucgccugcggccccaacgagugcaagcacuucgcccugacccacuacgccgcccagcccggcggguacuacaacggcacgcgcggggaccggaacaagcugcgccaccucaucagcgugaagcugggcaagauccccaccguggagaacuccaucuuccacauggcggccuggagcggguccgccugccacgacggcaaggaguggaccuacaucggcgucgacgggccggacaacgacgcccugcucaaggugaaguacggcgaggccuacaccgacacguaccacagcuacgcgaacaagauccugcggacccaggaguccgccugcaacugcaucgggggcaacugcuaccugaugaucaccgacggcagcgccagcgggguguccgagugccgcuuccucaagauccgggagggccgcaucaucaaggagaucuuccccaccgggcgggucaagcacacggaggagugcacgugcggcuucgccagcaacaagaccaucgagugcgccugccgcgacaacuccuacaccgcgaagcggcccuucgugaagcugaacguggagaccgacaccgccgagauccgccugaugugcaccgacaccuaccucgacacgccccggccggacgacgggagcaucaccggccccugcgaguccaacggcgacaaggggagcggcgggaucaagggcggguucguccaccagcgcauggaguccaagaucggccggugguacagccgcaccauguccaagaccgagcggaugggcauggggcuguacgugaaguacgacggcgaccccugggccgacagcgacgcccuggccuucuccggggugauggucagcaugaaggagcccggcugguacuccuucggguucgagaucaaggacaagaagugcgacgugccgugcaucggcaucgagauggugcacgacggcgggaaggagacguggcacagcgcggccaccgccaucuacugccucaugggcuccgggcagcugcugugggacaccgucaccggcgugaacauggcccucuga

SEQ ID NO: 93557 - RNA, 1401 nt, Artificial Sequence
  derived and/or modified CDS sequence (opt1) from neuraminidase__InfluenzaB__AGX20804
augcugcccagcaccauccagacccucacgcuguucaucaccuccggcggggugcugcucagccuguacgucuccgcccugcucagcuaccugcuguacuccgacauccuccugaaguucagcccgaccgagaucaccgcccccacgaugucccuggacugcgcgaacgccagcaacgugcaggccgugaaccgcuccgccaccaagggcgucaccuuccuccugcccgagcccgaguggaccuacccgcggcugagcugccccggguccacguuccagaaggcccuccugaucagcccccaccgcuucggcgagaccaaggggaacuccgcgccccugaucauccgggagccguucaucgccugcggccccaacgagugcaagcacuucgcccucacccacuacgccgcgcagcccggcggguacuacaacggcacccgcggggaccggaacaagcugcgccaccugaucagcgugaagcucggcaagauccccacgguggagaacuccaucuuccacauggccgccuggagcggguccgccugccacgacggcaaggaguggaccuacaucggcgucgacgggccggacaacgacgcccugcugaaggugaaguacggcgaggcguacaccgacaccuaccacagcuacgccaacaagauccuccggacgcaggaguccgccugcaacugcaucgggggcaacugcuaccugaugaucaccgacggcagcgccagcgggguguccgagugccgcuuccugaagauccgggagggccgcaucaucaaggagaucuuccccaccgggcgggucaagcacaccgaggagugcacgugcggcuucgccagcaacaagaccaucgagugcgcgugccgcgacaacuccuacaccgccaagcggcccuucgugaagcucaacguggagaccgacacggccgagauccgccugaugugcaccgacaccuaccuggacacgccccggccggacgacgggagcaucaccggccccugcgaguccaacggcgacaaggggagcggcgggaucaagggcggguucguccaccagcgcauggaguccaagaucggccggugguacagccgcaccauguccaagaccgagcggaugggcauggggcucuacgugaaguacgacggcgaccccugggccgacagcgacgcccuggcguucuccggggugauggucagcaugaaggagcccggcugguacuccuucggguucgagaucaaggacaagaagugcgacgugccgugcaucggcaucgagauggugcacgacggcgggaaggagaccuggcacagcgccgccacggccaucuacugccugaugggcuccgggcagcuccugugggacaccgucaccggcguggacauggcccuguga

SEQ ID NO: 93558 - RNA, 1401 nt, Artificial Sequence; identical to SEQ ID NO: 92980
  derived and/or modified CDS sequence (opt1) from neuraminidase__InfluenzaB__AGX20815

SEQ ID NO: 93559 - RNA, 1401 nt, Artificial Sequence; identical to SEQ ID NO: 92980
  derived and/or modified CDS sequence (opt1) from neuraminidase__InfluenzaB__AGX20826

SEQ ID NO: 93560 - RNA, 1401 nt, Artificial Sequence; identical to SEQ ID NO: 92980
  derived and/or modified CDS sequence (opt1) from neuraminidase__InfluenzaB__AGX20837

SEQ ID NO: 93561 - RNA, 1401 nt, Artificial Sequence; identical to SEQ ID NO: 92980
  derived and/or modified CDS sequence (opt1) from neuraminidase__InfluenzaB__AGX20848

SEQ ID NO: 93562 - RNA, 1401 nt, Artificial Sequence
  derived and/or modified CDS sequence (opt1) from neuraminidase__InfluenzaB__AGX20870
augcugcccagcaccauccagaugcucacccuguuccugacguccggcggggugcuccugagccuguacgucuccgccagccucuccuaccugcuguacagcgacauccuccugaaguucuccccgaccgagaucaccgcccccaccaugccccuggacugcgcgaacgccagcaacgugcacgccgugaaccgcuccgccacgaagggcgucaccuuccuccugcccgagccggaguggaccuacccccggcugagcugccccggguccaccuuccagaaggcccuccugaucagcccccaccgcuucggcgagacgaaggggaacuccgcgccgcugaucauccgggagcccuucaucgccugcggccccaacgagugcaagcacuucgcccucacccacuacgccgcgcagcccggcggguacuacaacggcacccgcggggaccggaacaagcugcgccaccugaucagcgugaagcucggcaagaucccgaccguggagaacuccaucuuccacauggccgccuggagcggguccgccugccacgacggcaaggaguggacguacaucggcgucgacgggcccgacaacaacgcccugcugaagaucaaguacggcgaggcguacaccgacaccuaccacagcuacgccaacaacauccuccggacccaggaguccgccugcaacugcaucgggggcaacugcuaccugaugaucacggacggcagcgccagcgggguguccgagugccgcuuccugaagauccgggagggccgcaucaucaaggagaucuuccccaccgggcgggugaagcacaccgaggagugcacgugcggcuucgccagcaacaagaccaucgagugcgcgugccgcgacaacuccuacaccgccaagcggcccuucgucaagcucaacguggagaccgacaccgccgagauccgccugaugugcacggacaccuaccuggacaccccgcggcccgacgacgggagcaucaccggccccugcgaguccaacggcgacaaggggagcggcgggaucaagggcggguucgugcaccagcgcauggccuccaagaucggccggugguacagccgcacgauguccaagaccgagcggaagggcauggggcucuacgucaaguacgacggcgagcccuggaccgacagcgacgcccuggcguuccgcggggugaugguguccaugaaggagccgggcugguacagcuucggguucgagaucaaggacaagaagugcgacguccccugcaucggcaucgagauggugcacgacggcgggaaggagaccuggcacuccgccgccacggccaucuacugccugaugggcagcgggcagcuccugugggacaccgugaccggcgucgacauggcccuguga

SEQ ID NO: 93563 - RNA, 1401 nt, Artificial Sequence
  derived and/or modified CDS sequence (opt1) from neuraminidase__InfluenzaB__AGX20881
augcugcccagcaccauccagaugcucacccuguuccugacguccggcggggugcuccugagccuguacgucuccgccagccucuccuaccugcuguacagcgacauccuccugaaguucuccccgaccgagaucaccgcccccaccaugccccuggacugcgcgaacgccagcaacgugcacgccgugaaccgcuccgccacgaagggcgucaccuuccuccugcccgagccggaguggaccuacccccggcugagcugccccggguccaccuuccagaaggcccuccugaucagcccccaccgcuucggcgagacgaaggggaacuccgcgccgcugaucauccgggagcccuucaucgccugcggccccaacgagugcaagcacuucgcccucacccacuacgccgcgcagcccggcggguacuacaacggcacccgcgggaaccggaacaagcugcgccaccugaucagcgugaagcucggcaagaucccgaccguggagaacuccaucuuccacauggccgccuggagcggguccgccugccacgacggcaaggaguggacguacaucggcgucgacgggcccgacaacaacgcccugcugaagaucaaguacggcgaggcguacaccgacaccuaccacagcuacgccaacaacauccuccggacccaggaguccgccugcaacugcaucgggggcaacugcuaccugaugaucacggacggcagcgccagcgggguguccgagugccgcuuccugaagauccgggagggccgcaucaucaaggagaucuuccccaccgggcgggugaagcacaccgaggagugcacgugcggcuucgccagcaacaagaccaucgagugcgcgugccgcgacaacuccuacaccgccaagcggcccuucgucaagcucaacguggagaccgacaccgccgagauccgccugaugugcacggacaccuaccuggacaccccgcggcccgacgacgggagcaucaccggccccugcgaguccaacggcgacaaggggagcggcgggaucaagggcggguucgugcaccagcgcauggccuccaagaucggccggugguacagccgcacgauguccaagaccgagcggaagggcauggggcucuacgucaaguacgacggcgaccccuggaccgacagcgacgcccuggcguuccgcggggugaugguguccaugaaggagccgggcugguacagcuucggguucgagaucaaggacaagaagugcgacguccccugcaucggcaucgagauggugcacgacggcgggaaggagaccuggcacuccgccgccacggccaucuacugccugaugggcagcgggcagcuccugugggacaccgugaccggcgucgacauggcccuguga

SEQ ID NO: 93564 - RNA, 1401 nt, Artificial Sequence
  derived and/or modified CDS sequence (opt1) from neuraminidase__InfluenzaB__AGX20892
augcugcccagcaccauccagacccucacgcuguuccugaccuccggcggggugcuccugagccuguacgucuccgcccuccugagcuaccugcucuacuccgacauccugcugaaguucagcccgaccgagaucaccgcccccacgaugucccucgacugcgcgaacgccagcaacgugcaggccgugaaccgcuccgccaccaagggcgucaccuuccugcugcccgagcccgaguggaccuacccgcggcucagcugccccggguccacguuccagcgcgcccugcugaucagcccccaccgguucggcgaggcgaaggggaacuccgcgccccucaucauccgcgagccguucaucgccugcggccccaacgagugcaagcacuucgcccugacccacuacgccgcccagcccggcggguacuacaacggcacccgcggggaccggaacaagcugcggcaccucaucagcgugaagcugggcaagauccccaccguggagaacuccaucuuccacauggccgccuggagcggguccgccugccacgacggcaaggaguggacguacaucggcgucgacgggccggacaacgacgcgcugcucaaggugaaguacggcgaggccuacaccgacaccuaccacagcuacgccaacaagauccugcgcacccaggaguccgccugcaacugcaucgggggcaacugcuaccugaugaucacggacggcagcgccagcgggguguccgagugccgguuccucaagauccgcgagggccggaucaucaaggagauccugcccaccgggcgcgucaagcacaccgaggagugcacgugcggcuucgcgagcaacaagaccaucgagugcgccugccgggacaacuccuacaccgccaagcgccccuucgugaagcugaacguggagaccgacaccgccgagauccggcucaugugcacggacaccuaccuggacacgccccgcccggacgacgggagcaucaccggccccugcgaguccaacggcgacaaggggagcggcgggaucaagggcggguucguccaccagcggauggaguccaagaucggccgcugguacagccggaccauguccaagaccgagcgcaugggcauggggcuguacgugaaguacgacggcgaccccugggccgacagcgacgcgcucgccuucuccggggugauggucagcaugaaggagcccggcugguacuccuucggguucgagaucaaggacaagaagugcgacgugccgugcaucggcaucgagauggugcacgacggcgggaaggagaccuggcacagcgccgccaccgccaucuacugccugaugggcuccgggcagcugcucugggacacggucaccggcguggacauggcgcuguga

SEQ ID NO: 93565 - RNA, 1401 nt, Artificial Sequence; identical to SEQ ID NO: 92980
  derived and/or modified CDS sequence (opt1) from neuraminidase__InfluenzaB__AGX20903

SEQ ID NO: 93566 - RNA, 1401 nt, Artificial Sequence; identical to SEQ ID NO: 92980
  derived and/or modified CDS sequence (opt1) from neuraminidase__InfluenzaB__AGX20914

SEQ ID NO: 93567 - RNA, 1401 nt, Artificial Sequence
  derived and/or modified CDS sequence (opt1) from neuraminidase__InfluenzaB__AGX20925
augcugcccagcaccauccagacccucacgcuguuccugaccuccggcggggugcuccugagccuguacgucuccgcccuccugagcuaccugcucuacuccgacauccugcugaaguucagcccgaccgagaucaccgcccccacgaugucccucgacugcgcgaacgccagcaacgugcaggccgugaaccgcuccgccaccaagggcgucaccuuccugcugcccgagcccgaguggaccuacccgcggcucagcugccccggguccacguuccagaaggcccugcugaucagcccccaccgcuucggcgagaccaaggggaacuccgcgccccucaucauccgggagccguucaucgccugcggccccaacgagugcaagcacuucgcccugacccacuacgccgcgcagcccggcggguacuacaacggcacccgcggggaccggaacaagcugcgccaccucaucagcgugaagcugggcaagauccccacgguggagaacuccaucuuccacauggccgccuggagcggguccgccugccacgacggcaaggaguggaccuacaucggcgucgacgggccggacaacgacgcccugcucaaggugaaguacggcgaggcguacaccgacaccuaccacagcuacgccaacaagauccugcggacgcaggaguccgccugcaacugcaucgggggcaacugcuaccugaugaucaccgacggcagcgccagcgggguguccgagugccgcuuccucaagauccaggagggccggaucaucaaggagaucuuccccaccgggcgcgucaagcacaccgaggagugcacgugcggcuucgccagcaacaagaccaucgagugcgcgugccgggacaacuccuacaccgccaagcgccccuucgugaagcugaacguggagaccgacacggccgagauccggcugaugugcaccgacaccuaccucgacacgccccgcccggacgacgggagcaucaccggccccugcgaguccaacggcgacaaggggagcggcgggaucaagggcggguucguccaccagcggauggaguccaagaucggccgcugguacagccggaccauguccaagaccgagcgcaugggcauggggcuguacgugaaguacgacggcgaccccugggccgacagcgacgcccuggcguucuccggggugauggucagcaugaaggagcccggcugguacuccuucggguucgagaucaaggacaagaagugcgacgugccgugcaucggcaucgagauggugcacgacggcgggaaggagaccuggcacagcgccgccacggccaucuacugccucaugggcuccgggcagcugcugugggacaccgucaccggcguggacauggcccucuga

SEQ ID NO: 93568 - RNA, 1401 nt, Artificial Sequence
  derived and/or modified CDS sequence (opt1) from neuraminidase__InfluenzaB__AGX20936
augcugcccagcaccauccagacccucacgcuguuccugaccuccggcggggugcuccugagccuguacgucuccgcccuccugagcuaccugcucuacuccgacauccugccgaaguucagccccaccgagaucaccgcccccacgaugucccuggacugcgcgaacgccagcaacgugcaggccgugaaccgcuccgccaccaagggcgucaccuuccuccugcccgagccggaguggaccuacccccggcugagcugccccggguccacguuccagaaggcccuccugaucagcccccaccgcuucggcgagaccaaggggaacuccgcgccgcugaucauccgggagcccuucaucgccugcggccccaacgagugcaagcacuucgcccucacccacuacgccgcgcagcccggcggguacuacaacggcacccgcggggaccggaacaagcugcgccaccugaucagcgugaagcucggcaagaucccgacgguggagaacuccaucuuccacauggccgccuggagcggguccgccugccacgacggcaaggaguggaccuacaucggcgucgacgggcccgacaacgacgcccugcugaaggugaaguacggcgaggcguacaccgacaccuaccacagcuacgccaacaagauccuccggacgcaggaguccgccugcaacugcaucgggggcaacugcuaccugaugaucaccgacggcagcgccagcgggguguccgagugccgcuuccugaagauccgggagggccgcaucaucaaggagaucuuccccaccgggcgggucaagcacaccgaggagugcacgugcggcuucgccagcaacaagaccaucgagugcgcgugccgcgacaacuccuacaccgccaagcggcccuucgugaagcucaacguggagaccgacacggccgagauccgccugaugugcaccgacaccuaccuggacaccccgcggcccgacgacgggagcaucacgggccccugcgaguccaacggcgacaaggggagcggcgggaucaagggcggguucguccaccagcgcauggaguccaagaucggccggugguacagccgcaccauguccaagaccgagcggaugggcauggggcucuacgugaaguacgacggcgaccccugggccgacagcgacgcccugguguucuccggggucauggugagcaugaaggagccgggcugguacuccuucggguucgagaucaaggacaagaagugcgacgugcccugcaucggcaucgagaugguccacgacggcgggaaggagaccuggcacagcgcggccacggccaucuacugccugaugggcuccgggcagcuccugugggacaccgugaccggcguggacauggcccuguga

SEQ ID NO: 93569 - RNA, 1401 nt, Artificial Sequence; identical to SEQ ID NO: 92919
  derived and/or modified CDS sequence (opt1) from neuraminidase__InfluenzaB__AGX20947

SEQ ID NO: 93570 - RNA, 1401 nt, Artificial Sequence
  derived and/or modified CDS sequence (opt1) from neuraminidase__InfluenzaB__AGX20958
augcugcccagcaccauccagacccucacgcuguuccugaccuccggcggggugcuccugagccuguacgucuccgcccuccugagcuaccugcucuacuccgacauccugcugaaguucagcccgaccgagaucaccacgcccaccaugucccucgacugcaccaacgccagcaacgugcaggcggugaaccgcuccgccaccaagggcgucacguuccugcugcccgagcccgaguggaccuacccgcggcucagcugccccggguccaccuuccagaaggcccugcugaucagcccccaccgcuucggcgagaccaaggggaacuccgcgccccucaucauccgggagccguucaucgccugcggccccaacgagugcaagcacuucgcccugacgcacuacgccgcccagcccggcggguacuacaacggcacccgcggggaccggaacaagcugcgccaccucaucagcgugaagcugggcaagauccccaccguggagaacuccaucuuccacauggccgcguggagcggguccgccugccacgacggcaaggaguggaccuacaucggcgucgacgggccggacaacgacgcccugcucaaggugaaguacggcgaggccuacacggacaccuaccacagcuacgccaacaagauccugcggacccaggaguccgcgugcaacugcaucgggggcaacugcuaccugaugaucaccgacggcagcgccagcgggguguccgagugccgcuuccucaagauccaggagggccggaucaucaaggagaucuuccccacggggcgcgucaagcacaccgaggagugcacgugcggcuucgccagcaacaagaccaucgagugcgccugccgggacaacuccuacaccgccaagcgccccuucgugaagcugaacguggagaccgacaccgcggagauccggcugaugugcaccgacacguaccucgacacgccccgcccggacgacgggagcaucaccggccccugcgaguccaacggcgacaaggggagcggcgggaucaagggcggguucguccaccagcggauggaguccaagaucggccgcugguacagccggaccauguccaagaccgagcgcaugggcauggggcuguacgugaaguacgacggcgaccccugggccgacagcgacgcccuggccuucuccggggugauggucagcaugaaggagcccggcugguacuccuucggguucgagaucaaggacaagaagugcgacgugccgugcaucggcaucgagauggugcacgacggcgggaaggagaccuggcacagcgccgcgaccgccaucuacugccucaugggcuccgggcagcugcugugggacaccgucacgggcguggacauggcccucuga

SEQ ID NO: 93571 - RNA, 1401 nt, Artificial Sequence; identical to SEQ ID NO: 93143
  derived and/or modified CDS sequence (opt1) from neuraminidase__InfluenzaB__AGX20969

SEQ ID NO: 93572 - RNA, 1401 nt, Artificial Sequence; identical to SEQ ID NO: 93556
  derived and/or modified CDS sequence (opt1) from neuraminidase__InfluenzaB__AGX20980

SEQ ID NO: 93573 - RNA, 1401 nt, Artificial Sequence
  derived and/or modified CDS sequence (opt1) from neuraminidase__InfluenzaB__AGX20991
augcugcccagcaccauccagacccucacgcuguuccugaccuccggcggggugcuccugagccuguacgucuccgcccuccugagcuaccugcucuacuccgacauccugccgaaguucagccccaccgagaucaccgcccccacgaugucccuggacugcgcgaacgccagcaacgugcaggccgugaaccgcuccgccaccaagggcgucaccuuccuccugcccgagccggaguggaccuacccccggcugagcugccccggguccacguuccagaaggcccuccugaucagcccccaccgcuucggcgagaccaaggggaacuccgcgccgcugaucauccgggagcccuucaucgccugcggccccaacgagugcaagcacuucgcccucacccacuacgccgcgcagcccggcggguacuacaacggcacccgcggggaccggaacaagcugcgccaccugaucagcgugaagcucggcaagaucccgacgguggagaacuccaucuuccacauggccgccuggagcggguccgccugccacgacggcaaggaguggaccuacaucggcgucgacgggcccgacaacgacgcccugcugaaggugaaguacggcgaggcguacaccgacaccuaccacagcuacgccaacaagauccuccggacgcaggaguccgccugcaacugcaucgggggcaacugcuaccugaugaucaccgacggcagcgccagcgggguguccgagugccgcuuccugaagauccggaagggccgcaucaucaaggagaucuuccccaccgggcgggucaagcacaccgaggagugcacgugcggcuucgccagcaacaagaccaucgagugcgcgugccgcgacaacuccuacaccgccaagcggcccuucgugaagcucaacguggagaccgacacggccgagauccgccugaugugcaccgacaccuaccuggacaccccgcggcccgacgacgggagcaucacgggccccugcgaguccaacggcgacaaggggagcggcgggaucaagggcggguucguccaccagcgcauggaguccaagaucggccggugguacagccgcaccauguccaagaccgagcggaugggcauggggcucuacgugaaguacgacggcgaccccugggccgacagcgacgcccugguguucuccggggucauggugagcaugaaggagccgggcugguacuccuucggguucgagaucaaggacaagaagugcgacgugcccugcaucggcaucgagaugguccacgacggcgggaaggagaccuggcacagcgcggccacggccaucuacugccugaugggcuccgggcagcuccugugggacaccgugaccggcguggacauggcccuguga

SEQ ID NO: 93574 - RNA, 1401 nt, Artificial Sequence; identical to SEQ ID NO: 92980
  derived and/or modified CDS sequence (opt1) from neuraminidase__InfluenzaB__AGX21002

SEQ ID NO: 93575 - RNA, 1401 nt, Artificial Sequence
  derived and/or modified CDS sequence (opt1) from neuraminidase__InfluenzaB__AGX21013
augcugcccagcaccauccagacccucacgcuguuccugaccuccggcggggugcuccugagccuguacgucuccgcccuccugagcuaccugcucuacuccgacauccugcugaaguucagcccgaccgagaucaccgcccccacgaugucccucgacugcgcgaacgccagcaacgugcaggccgugaaccgcuccgccaccaagggcgucaccuuccugcugcccgagcccgaguggaccuacccgcggcucagcugccccggguccacguuccagaaggcccugcugaucagcccccaccgcuucggcgagaccaaggggaacuccgcgccccucaucauccgggagccguucaucgccugcggccccaacgagugcaagcacuucgcccugacccacuacgccgcgcagcccggcggguacuacaacggcacccgcggggaccggaacaagcugcgccaccucaucagcgugaagcugggcaagauccccacgguggagaacuccaucuuccacauggccgccuggagcggguccgccugccacgacggcaaggaguggaccuacaucggcgucgacgggccggacaacgacgcccugcucaaggugaaguacggcgaggcguacaccgacaccuaccacagcuacgccaacaagauccugcggacgcaggaguccgccugcaacugcaucgggggcaacugcuaccugaugaucaccgacggcagcgccagcgggguguccgagugccgcuuccucaagauccgggagggccgcaucaucaaggagaucuuccccaccgggcgggucaagcacaccgaggagugcacgugcggcuucgccagcaacaagaccaucgagugcgcgugccgcgacaacuccuacaccgccaagcggcccuucgugaagcugaacguggagaccgacacggccgagauccgccugaugugcaccaacaccuaccucgacacgccccggccggacgacgggagcaucaccggccccugcgaguccaacggcgacaaggggagcggcgggaucaagggcggguucguccaccagcgcauggaguccaagaucggccggugguacagccgcaccauguccaagaccgagcggaugggcauggggcuguacgugaaguacgacggcgaccccugggccgacagcgacgcccuggcguucuccggggugauggucagcaugaaggagcccggcugguacuccuucggguucgagaucaaggacaagaagugcgacgugccgugcaucggcaucgagauggugcacgacggcgggaaggagaccuggcacagcgccgccacggccaucuacugccucaugggcuccgggcagcugcugugggacaccgucaccggcguggacauggcccucuga

SEQ ID NO: 93576 - RNA, 1401 nt, Artificial Sequence
  derived and/or modified CDS sequence (opt1) from neuraminidase__InfluenzaB__AGX21024
augcugcccagcaccauccagacccucacgcuguuccugaccuccggcggggugcuccugagccuguacgucuccgccagccucuccuaccugcuguacagcgacauccuccugaaguucuccccgaccgagaucaccgcccccacgaugccccuggacugcgcgaacgccagcaacgugcaggccgugaaccgcuccgccaccaagggcgucacccuccugcugcccgagccggaguggaccuacccccggcucagcugccccggguccacguuccagaaggcccugcugaucagccccaaccgcuucggcgagaccaaggggaacuccgcgccgcucaucauccgggagcccuucaucgccugcggccccaacgagugcaagcacuucgcccugacccacuacgccgcgcagcccggcggguacuacaacggcacccgcggggaccggaacaagcugcgccaccucaucagcgugaagcugggcaagaucccgacgguggagaacuccaucuuccacauggccgccuggagcggguccgccugccacgacggcaaggaguggaccuacaucggcgucgacgggcccgacaacaacgcccugcucaaggugaaguacggcgaggcguacaccgacaccuaccacagcuacgccaacaagauccugcggacgcaggaguccgccugcaacugcaucgggggcaacugcuaccugaugaucaccgacggcagcgccagcgggguguccgagugccgcuuccucaagauccgggagggccgcaucaucaaggagaucuuccccaccgggcgggucaagcacaccgaggagugcacgugcggcuucgccagcaacaagaccaucgagugcgcgugccgcgacaacuccuacaccgccaagcggcccuucgugaagcugaacguggagaccgacacggccgagguccgccugaugugcaccgacaccuaccucgacaccccgcggcccaacgacgggagcaucacgggccccugcgaguccgacggcgacaaggggagcggcgggaucaagggcggguucgugcaccagcgcauggaguccaagaucggccggugguacagccgcaccauguccaagaccgagcggaugggcauggggcuguacgugaaguacgacggcgaccccugggccgacagcgacgcccugaccuucuccggggucauggugagcaugaaggagccgggcugguacuccuucggguucgagaucaaggacaagaagugcgacgugcccugcaucggcaucgagaugguccacgacggcgggaaggagacguggcacagcgcggccaccgccaucuacugccucaugggcuccgggcagcugcugugggacaccgugaccggcguggacauggcccucuga

SEQ ID NO: 93577 - RNA, 1401 nt, Artificial Sequence; identical to SEQ ID NO: 92980
  derived and/or modified CDS sequence (opt1) from neuraminidase__InfluenzaB__AGX21035

SEQ ID NO: 93578 - RNA, 1401 nt, Artificial Sequence; identical to SEQ ID NO: 93143
  derived and/or modified CDS sequence (opt1) from neuraminidase__InfluenzaB__AGX21046

SEQ ID NO: 93579 - RNA, 1401 nt, Artificial Sequence; identical to SEQ ID NO: 93146
  derived and/or modified CDS sequence (opt1) from neuraminidase__InfluenzaB__AGX21057

SEQ ID NO: 93580 - RNA, 1401 nt, Artificial Sequence; identical to SEQ ID NO: 93564
  derived and/or modified CDS sequence (opt1) from neuraminidase__InfluenzaB__AGX21068

SEQ ID NO: 93581 - RNA, 1401 nt, Artificial Sequence
  derived and/or modified CDS sequence (opt1) from neuraminidase__InfluenzaB__AGX21079
augcugcccagcaccauccagacccucacgcuguuccugaccuccggcggggugcuccugagccuguacgucuccgccagccucuccuaccugcuguacagcgacauccuccugaaguucuccccgaccgagaucaccgcccccgcgaugccccuggacugcgccaacgccagcaacgugcaggccgugaaccgcuccgccacgaagggcgucacccuccugcugcccgagccggaguggaccuacccccggcucagcugccccggguccaccuuccagaaggcgcugcugaucagcccccaccgcuucggcgagacgaaggggaacuccgccccgcucaucauccgggagcccuucaucgccugcggccccaacgagugcaagcacuucgcccugacccacuacgcggcccagcccggcggguacuacaacggcacccgcggggaccggaacaagcugcgccaccucaucagcgugaagcugggcaagaucccgaccguggagaacuccaucuuccacauggccgccuggagcggguccgccugccacgacggcaaggaguggacguacaucggcgucgacgggcccgacaacaacgcgcugcucaaggugaaguacggcgaggccuacaccgacaccuaccacagcuacgccuccaagauccugcggacccaggagagcgccugcaacugcaucgggggcaacugcuaccugaugaucacggacggcagcgccuccggggugagcgagugccgcuuccucaagauccgggagggccgcaucaucaaggagaucuuccccaccgggcgggucaagcacaccgaggagugcacgugcggcuucgcguccaacaagaccaucgagugcgccugccgcgacaacagcuacaccgccaagcggcccuucgugaagcugaacguggagaccgacaccgccgagauccgccugaugugcacggacaccuaccucgacaccccgcggcccaacgacggguccaucaccggccccugcgagagcgacggcgacaagggguccggcgggaucaagggcggguucguccaccagcgcauggagagcaagaucggccggugguacucccgcacgaugagcaagaccgagcggaugggcauggggcuguacgugaaguacgacggcgaccccugggccgacuccgacgcgcuggccuucagcggggugauggucuccaugaaggagccgggcugguacagcuucggguucgagaucaaggacaagaagugcgacgugcccugcaucggcaucgagauggugcacgacggcgggaaggagaccuggcacuccgccgccaccgccaucuacugccucaugggcagcgggcagcugcugugggacacggucaccggcguggacauggcgcucuga

SEQ ID NO: 93582 - RNA, 1401 nt, Artificial Sequence; identical to SEQ ID NO: 93146
  derived and/or modified CDS sequence (opt1) from neuraminidase__InfluenzaB__AGX21088

SEQ ID NO: 93583 - RNA, 1401 nt, Artificial Sequence; identical to SEQ ID NO: 93146
  derived and/or modified CDS sequence (opt1) from neuraminidase__InfluenzaB__AGX21099

SEQ ID NO: 93584 - RNA, 1401 nt, Artificial Sequence
  derived and/or modified CDS sequence (opt1) from neuraminidase__InfluenzaB__AGX21110
augcugcccagcaccauccagacccucacgcuguuccugaccuccggcggggugcuccugagccuguacgucuccgcccuccugagcuaccugcucuacuccgacauccugcugaaguucagcccgaccgagaucaccgcccccacgaugucccucgacugcgcgaacgccagcaacgugcaggccgugaaccgcuucgccaccaagggcgucaccuuccugcugcccgagcccgaguggaccuacccgcggcucuccugccccgggagcacguuccagaaggcccugcugaucagcccccaccgcuucggcgagaccaaggggaacuccgcgccccucaucauccgggagccguucaucgccugcggccccaacgagugcaagcacuucgcccugacccacuacgccgcgcagcccggcggguacuacaacggcacccgcggggaccggaacaagcugcgccaccucaucuccgugaagcugggcaagauccccacgguggagaacagcaucuuccacauggccgccugguccgggagcgccugccacgacggcaaggaguggaccuacaucggcgucgacgggccggacaacgacgcccugcucaaggugaaguacggcgaggcguacaccgacaccuaccacuccuacgccaacaagauccugcggacgcaggagagcgccugcaacugcaucgggggcaacugcuaccugaugaucaccgacggcuccgccagcggggugagcgagugccgcuuccucaagauccgggagggccgcaucaucaaggagaucuuccccaccgggcgggucaagcacaccgaggagugcacgugcggcuucgccuccaacaagaccaucgagugcgcgugccgcgacaacagcuacaccgccaagcggcccuucgugaagcugaacguggagaccgacacggccgagauccgccugaugugcaccgacaccuaccucgacacgccccggccggacgacggguccaucaccggccccugcgagagcaacggcgacaagggguccggcgggaucaagggcggguucguccaccagcgcauggagagcaagaucggccggugguacucccgcaccaugagcaagaccgagcggaugggcauggggcuguacgugaaguacgacggcgaccccugggccgacuccgacgcccuggcguucagcggggugauggucuccaugaaggagcccggcugguacagcuucggguucgagaucaaggacaagaagugcgacgugccgugcaucggcaucgagauggugcacgacggcgggaaggagaccuggcacuccgccgccacggccaucuacugccucaugggcagcgggcagcugcugugggacaccgucaccggcguggacauggcccucuga

SEQ ID NO: 93585 - RNA, 1401 nt, Artificial Sequence
  derived and/or modified CDS sequence (opt1) from neuraminidase__InfluenzaB__AGX21121
augcugcccagcaccauccagacccucacgcuguuccugaccuccggcggggugcuccugagccuguacgucuccgcccuccugagcuaccugcucuacuccgacauccugcugaaguucagcccgaccgagaucaccgcccccacgaugucccucgacugcgcgaacgccagcaacgugcaggccgugaaccgcuccgccaccaagggcgucaccuuccugcugcccgagcccgaguggaccuacccgcggcucagcugccccggguccacguuccagaaggcccugcugaucagcccccaccgcuucggcgagaccaaggggaacuccgcgccccucaucauccgggagccguucaucgccugcggccccaacgagugcaagcacuucgcccugacccacuacgccgcgcagcccggcggguacuacaacggcacccgcggggaccggaacaagcugcgccaccucaucagcgugaagcugggcaagauccccacgguggagaacuccaucuuccacauggccgccuggagcggguccgccugccacgacggcaaggaguggaccuacaucggcgucgacgggccggacaacgacgcccugcucaaggugaaguacggcgaggcguacaccgacaccuaccacagcuacgccaacaagauccugcggacgcaggaguccgccugcaacugcaucgggggcaacugcuaccugaugaucaccgacggcagcgccagcgggguguccgagugccgcuuccucaagauccgggagggccgcaucaccaaggagaucuuccccaccgggcgggucaagcacacggaggagugcacgugcggcuucgccagcaacaagaccaucgagugcgcgugccgcgacaacuccuacaccgccaagcggcccuucgugaagcugaacguggagaccgacaccgccgagauccgccugaugugcaccgacaccuaccucgacacgccccggccggacgacgggagcaucaccggccccugcgaguccaacggcgacaaggggagcggcgggaucaagggcggguucguccaccagcgcauggaguccaagaucggccggugguacagccgcaccauguccaagaccgagcggaugggcauggggcuguacgugaaguacgacggcgaccccugggccgacagcgacgcccuggcguucuccggggugauggucagcaugaaggagcccggcugguacuccuucggguucgagaucaaggacaagaagugcgacgugccgugcaucggcaucgagauggugcacgacggcgggaaggagacguggcacagcgccgccaccgccaucuacugccucaugggcuccgggcagcugcugugggacaccgucaccggcguggacauggcccucuga

SEQ ID NO: 93586 - RNA, 1401 nt, Artificial Sequence; identical to SEQ ID NO: 93143
  derived and/or modified CDS sequence (opt1) from neuraminidase__InfluenzaB__AGX21132

SEQ ID NO: 93587 - RNA, 1401 nt, Artificial Sequence; identical to SEQ ID NO: 92919
  derived and/or modified CDS sequence (opt1) from neuraminidase__InfluenzaB__AGX21143

SEQ ID NO: 93588 - RNA, 1401 nt, Artificial Sequence; identical to SEQ ID NO: 92980
  derived and/or modified CDS sequence (opt1) from neuraminidase__InfluenzaB__AGX21154

SEQ ID NO: 93589 - RNA, 1401 nt, Artificial Sequence
  derived and/or modified CDS sequence (opt1) from neuraminidase__InfluenzaB__AGX21165
augcugcccagcaccauccagacccucacgcuguuccugaccuccggcggggugcuccugagccuguacgucuccgcccuccugagcuaccugcucuacuccgacauccugcugaaguucagcccgaccgagaucaccgcccccacgaugucccucgacugcgcgaacgccagcaacgugcaggccgugaaccgcuccgccaccaagggcgucaccuuccugcugcccgagcccgaguggaccuacccgcggcucagcugccccggguccacguuccagaaggcccugcugaucagcccccaccgcuucggcgagaccaaggggaacuccgcgccccucaucauccgggagccguucaucgccugcggccccaacgagugcaagcacuucgcccugacccacuacgccgcgcagcccggcggguacuacaacggcacccgcggggaccggaacaagcugcgccaccucaucagcgugaagcugggcaagauccccacgguggagaacuccaucuuccacauggccgccuggagcggguccgccugccacgacggcaaggaguggaccuacaucggcgucgacgggccggacaacgacgcccugcucaaggugaaguacggcgaggcguacaccgacaccuaccacagcuacgccaacaagauccugcggacgcaggaguccgccugcaacugcaucgggggcaacugcuaccugaugaucaccgacggcagcgccagcgggguguccgagugccgcuuccucaagauccgggagggccgcaucaucaaggagaucuuccccaccgggcgggucaagcacaccgaggagugcacgugcggcuucgccagcaacaagaccaucgagugcgcgugccgcgacaacuccuacaccgccaagcggcccuucgugaagcugaacauggagaccgacacggccgagauccgccugaugugcaccgacaccuaccucgacacgccccggccggacgacgggagcaucaccggccccugcgaguccaacggcgacaaggggagcggcgggaucaagggcggguucgugcaccagcgcauggaguccaagaucggccggugguacagccgcaccauguccaagaccgagcggaugggcauggggcuguacgucaaguacgacggcgaccccugggccgacagcgacgcccuggcguucuccggggugauggugagcaugaaggagcccggcugguacuccuucggguucgagaucaaggacaagaagugcgacgucccgugcaucggcaucgagauggugcacgacggcgggaaggagaccuggcacagcgccgccacggccaucuacugccucaugggcuccgggcagcugcugugggacaccgugaccggcgucgacauggcccucuga

SEQ ID NO: 93590 - RNA, 1401 nt, Artificial Sequence; identical to SEQ ID NO: 92980
  derived and/or modified CDS sequence (opt1) from neuraminidase__InfluenzaB__AGX21176

SEQ ID NO: 93591 - RNA, 1401 nt, Artificial Sequence
  derived and/or modified CDS sequence (opt1) from neuraminidase__InfluenzaB__AGX21187
augcugcccagcaccauccagacccucacgcuguuccugaccuccggcggggugcuccugagccuguacgucuccgccagccucuccuaccugcuguacagcgacauccuccugaaguucuccccgaccgagaucaccgcccccacgaugccccuggacugcgcgaacgccagcaacgugcaggccgugaaccgcuccgccaccaagggcgucacccuccugcugcccgagccggaguggaccuacccccggcucagcugccccggguccacguuccagaaggcccugcugaucagcccccaccgcuucggcgagaccaaggggaacuccgcgccgcucaucauccgggagcccuucaucgccugcggccccaacgagugcaagcacuucgcccugacccacuacgccgcgcagcccggcggguacuacaacggcacccgcggggaccggaacaagcugcgccaccucaucagcgugaagcugggcaagaucccgacgguggagaacuccaucuuccacauggccgccuggagcggguccgccugccacgacggcaaggaguggaccuacaucggcgucgacgggcccgacaacaacgcccugcucaaggugaaguacggcgaggcguacaccgacaccuaccacagcuacgccaacaagauccugcggacgcaggaguccgccugcaacugcaucgggggcaacugcuaccugaugaucaccgacggcagcgccagcgggguguccgagugccgcuuccucaagauccgggagggccgcaucaucaaggagaucuuccccaccgggcgggucaagcacaccgaggagugcacgugcggcuucgccagcaacaagaccaucgagugcgugugccgcgacaacuccuacaccgcgaagcggcccuucgugaagcugaacgucgagaccgacacggccgaggugcgccugaugugcaccgacaccuaccucgacaccccgcggcccaacgacgggagcaucacgggccccugcgaguccgacggcgacaaggggagcggcgggaucaagggcggguucgugcaccagcgcauggaguccaagaucggccggugguacagccgcaccauguccaagaccgagcggaugggcauggggcuguacgucaaguacgacggcgaccccugggccgacagcgacgcccugaccuucuccggggugauggugagcaugaaggagccgggcugguacuccuucggguucgagaucaaggacaagaagugcgacguccccugcaucggcaucgagauggugcacgacggcgggaaggagacguggcacagcgccgcgaccgccaucuacugccucaugggcuccgggcagcugcugugggacaccgugaccggcgucgacauggcccucuga

SEQ ID NO: 93592 - RNA, 1401 nt, Artificial Sequence
  derived and/or modified CDS sequence (opt1) from neuraminidase__InfluenzaB__AGX21198
augcugcccagcaccauccagaugcucacccuguuccugacguccggcggggugcuccugagccuguacgucuccgccagccucuccuaccugcuguacagcgacauccuccugaaguucuccccgaccgagaucaccgcccccaccaugccccuggacugcgcgaacgccagcaacgugcacgccgugaaccgcuccgccacgaagggcgucaccuuccuccugcccgagccggaguggaccuacccccggcugagcugccccggguccaccuuccagaaggcccuccugaucagcccccaccgcuucggcgagacgaaggggaacuccgcgccgcugaucauccgggagcccuucaucgccugcgagcccaacgagugcaagcacuucgcccucacccacuacgccgcgcagcccggcggcuacuacaacgggacccgcggcgaccggaacaagcugcgccaccugaucagcgugaagcucgggaagaucccgaccguggagaacuccaucuuccacauggccgccuggagcggcuccgccugccacgacgggaaggaguggacguacaucggcgucgacggccccgacaacaacgcccugcugaagaucaaguacggggaggcguacaccgacaccuaccacagcuacgccaacaacauccuccggacccaggaguccgccugcaacugcaucggcgggaacugcuaccugaugaucacggacggcagcgccagcggcguguccgagugccgcuuccugaagauccgggaggggcgcaucaucaaggagaucuuccccaccggccgggugaagcacaccgaggagugcacgugcggguucgccagcaacaagaccaucgagugcgcgugccgcgacaacuccuacaccgccaagcggcccuucgucaagcucaacguggagaccgacaccgccgagauccgccugaugugcacggacaccuaccuggacaccccgcggcccgacgacggcagcaucaccgggcccugcgaguccaacggcgacaagggcagcgggggcaucaagggcggguucgugcaccagcgcauggccuccaagaucgggcggugguacagccgcacgauguccaagaccgagcggaagggcaugggccucuacgucaaguacgacggggaccccuggaccgacagcgacgcccuggcguuccgcggcgugaugguguccaugaaggagccggggugguacagcuucggcuucgagaucaaggacaagaagugcgacguccccugcaucgggaucgagauggugcacgacggcggcaaggagaccuggcacuccgccgccacggccaucuacugccugauggggagcggccagcuccugugggacaccgugaccggggucgacauggcccuguga

SEQ ID NO: 93593 - RNA, 1401 nt, Artificial Sequence; identical to SEQ ID NO: 92980
  derived and/or modified CDS sequence (opt1) from neuraminidase__InfluenzaB__AGX21209

SEQ ID NO: 93594 - RNA, 1401 nt, Artificial Sequence; identical to SEQ ID NO: 93143
  derived and/or modified CDS sequence (opt1) from neuraminidase__InfluenzaB__AGX21220

SEQ ID NO: 93595 - RNA, 1401 nt, Artificial Sequence
  derived and/or modified CDS sequence (opt1) from neuraminidase__InfluenzaB__AGX21231
augcugcccagcaccauccagacccucacgcuguuccugaccuccggcggggugcuccugagccuguacgucuccgcccuccugagcuaccugcucuacuccgacauccugcugaaguucagcccgaccgagaucaccgcccccacgaugucccucgacugcgcgaacgccagcaacgugcaggccgugaaccgcuccgccaccaagggcgucaccuuccugcugcccgagagcgaguggaccuacccccggcucuccugcccggggagcacguuccagaaggcccugcugaucagcccccaccgcuucggcgagaccaaggggaacuccgcgccccucaucauccgggagcccuucaucgccugcggcccgaacgagugcaagcacuucgcccugacccacuacgccgcgcagcccggcggguacuacaacggcacccgcggggaccggaacaagcugcgccaccucaucuccgugaagcugggcaagauccccacgguggagaacagcaucuuccacauggccgccugguccgggagcgccugccacgacggcaaggaguggaccuacaucggcgucgacgggcccgacaacgacgcccugcucaaggugaaguacggcgaggcguacaccgacaccuaccacuccuacgccaacaagauccugcggacgcaggagagcgccugcaacugcaucgggggcaacugcuaccugaugaucaccgacggcagcgccuccggggugagcgagugccgcuuccucaagauccgggagggccgcaucaucaaggagaucuucccgaccgggcgggucaagcacaccgaggagugcacgugcggcuucgccuccaacaagaccaucgagugcgcgugccgcgacaacagcuacaccgccaagcggcccuucgugaagcugaacguggagaccgacacggccgagauccgccugaugugcaccgacaccuaccucgacacgccccggcccgacgacggguccaucaccggcccgugcgagagcaacggcgacaagggguccggcgggaucaagggcggguucguccaccagcgcauggagagcaagaucggccggugguacucccgcaccaugagcaagaccgagcggaugggcauggggcuguacgugaaguacgacggcgaccccugggccgacuccgacgcccuggcguucagcggggugauggucuccaugaaggagcccggcugguacagcuucggguucgagaucaaggacaagaagugcgacgugcccugcaucggcaucgagauggugcacgacggcgggaaggagaccuggcacuccgccgccacggccaucuacugccucaugggcagcgggcagcugcugugggacaccgucaccggcguggacauggcccucuga

SEQ ID NO: 93596 - RNA, 1401 nt, Artificial Sequence; identical to SEQ ID NO: 93146
  derived and/or modified CDS sequence (opt1) from neuraminidase__InfluenzaB__AGX21242

SEQ ID NO: 93597 - RNA, 1401 nt, Artificial Sequence; identical to SEQ ID NO: 92980
  derived and/or modified CDS sequence (opt1) from neuraminidase__InfluenzaB__AGX21253

SEQ ID NO: 93598 - RNA, 1401 nt, Artificial Sequence
  derived and/or modified CDS sequence (opt1) from neuraminidase__InfluenzaB__AGX21264
augcugcccagcaccauccagacccucacgcuguuccugaccuccggcggggugcuccugagccuguacgucuccgccagccucuccuaccugcuguacagcgacauccuccugaaguucuccaccaccgagaucacggccccgaccaugccccuggacugcgcgaacgccagcaacgugcaggccgugaaccgcuccgccaccaagggcgucacccuccugcugcccgagcccgaguggacguacccgcggcucagcugccccggguccaccuuccagaaggcccugcugaucagcccccaccgcuucggcgagaacaaggggaacuccgcgccccucaucauccgggagccguucaucgccugcggccccaacgagugcaagcacuucgcccugacccacuacgccgcgcagcccggcggguacuacaacggcacccgcggggaccggaacaagcugcgccaccucaucagcgugaagcugggcaagauccccacgguggagaacuccaucuuccacauggccgccuggagcggguccgccugccacgacggcaaggaguggaccuacaucggcgucgacgggccggacaacaacgcccugcucaaggugaaguacggcgaggcguacaccgacaccuaccacagcuacgccaacaagauccugcggacgcaggaguccgccugcaacugcaucgggggcaacugcuaccugaugaucaccgacggcagcgccagcgggguguccgagugccgcuuccucaagauccgggagggccgcaucaucaaggagaucuuccccaccgggcgggucaagcacaccgaggagugcacgugcggcuucgccagcaacaagaccaucgagugcgcgugccgcgacaacuccuacaccgccaagcggcccuucgugaagcugaacguggagaccgacacggccgagauccgccugaugugcaccgacaccuaccucgacacgccccggccgaacgacgggagcaucaccggccccugcgaguccgacggcgacaaggggagcggcgggaucaagggcggguucguccaccagcgcauggaguccaagaucggccggugguacagccgcaccauguccaagaccgagcggaugggcauggggcuguacgugaaguacgacggcgaccccugggccgacagcgacgcccuggcguucuccggggugauggucagcaugaaggagcccuccugguacagcuucggcuucgagaucaaggacaagaagugcgacgugccgugcaucgggaucgagauggugcacgacggcggcaaggagaccuggcacuccgccgccacggccaucuacugccucauggggagcggccagcugcugugggacaccgucaccgggguggacauggcccucuga

SEQ ID NO: 93599 - RNA, 1401 nt, Artificial Sequence; identical to SEQ ID NO: 92919
  derived and/or modified CDS sequence (opt1) from neuraminidase__InfluenzaB__AGX21275

SEQ ID NO: 93600 - RNA, 1401 nt, Artificial Sequence; identical to SEQ ID NO: 92980
  derived and/or modified CDS sequence (opt1) from neuraminidase__InfluenzaB__AGX21286

SEQ ID NO: 93601 - RNA, 1401 nt, Artificial Sequence
  derived and/or modified CDS sequence (opt1) from neuraminidase__InfluenzaB__AGX21297
augcugcccagcaccauccagacccucacgcuguuccugaccuccggcggggugcuccugagccuguacgucuccgccagccucuccuaccugcuguacagcgacauccuccugaaguucuccccgaccgagaucaccgcccccacgaugccccuggacugcgcgaacgccagcaacgugcaggccgugaaccgcuccgccaccaagggcgucacccuccugcugcccgagccggacuggaccuacccccggcucagcugccccggguccacguuccagaaggcccugcugaucagcccccaccgcuucggcgagaccaaggggaacuccgcgccgcucaucauccgggagcccuucaucgccugcggccccaacgagugcaagcacuucgcccugacccacuacgccgcgcagcccggcggguacuacaacggcacccgcggggaccggaacaagcugcgccaccucaucagcgugaagcugggcaagaucccgacgguggagaacuccaucuuccacauggccgccuggagcggguccgccugccacgacggcaaggaguggaccuacaucggcgucgacgggcccgacaacaacgcccugcucaaggugaaguacggcgaggcguacaccgacaccuaccacagcuacgccaacaagauccugcggacgcaggaguccgccugcaacugcaucgggggcaacugcuaccugaugaucaccgacggcagcgccagcgggguguccgagugccgcuuccucaagauccgggagggccgcaucaucaaggagaucuuccccaccgggcgggucaagcacaccgaggagugcacgugcggcuucgccagcaacaagaccaucgagugcgcgugccgcgacaacuccuacaccgccaagcggcccuucgugaagcugaacguggagaccgacacggccgagguccgccugaugugcaccgacaccuaccucgacaccccgcggcccaacgacgggagcaucacgggccccugcgaguccgacggcgacaaggggagcggcgggaucaagggcggguucgugcaccagcgcauggaguccaagaucggccggugguacagccgcaccauguccaagaccgagcggaugggcauggggcuguacgugaaguacgacggcgaccccugggccgacagcgacgcccugaccuucuccggggucauggugagcaugaaggagccgggcugguacuccuucggguucgagaucaaggacaagaagugcgacgugcccugcaucggcaucgagaugguccacgacggcgggaaggagacguggcacagcgcggccaccgccaucuacugccucaugggcuccgggcagcugcugugggacaccgugaccggcguggacauggcccucuga

SEQ ID NO: 93602 - RNA, 1401 nt, Artificial Sequence
  derived and/or modified CDS sequence (opt1) from neuraminidase__InfluenzaB__AGX21308
augcugcccagcaccauccagaugcucacccuguuccugacguccggcggggugcuccugagccuguacgucuccgccagccucuccuaccugcuguacagcgacauccuccugaaguucuccccgaccgagaucaccgcccccaccaugccccuggacugcgcgaacgccagcaacgugcacgccgugaaccgcuccgccacgaagggcgucaccuuccuccugcccgagccggaguggaccuacccccggcugagcugccccggguccaccuuccagaaggcccuccugaucagcccccaccgcuucggcgagacgaaggggaacuccgcgccgcugaucauccgggagcccuucaucgccugcggccccaacgagugcaagcacuucgcccucacccacuacgccgcgcagcccggcggguacuacaacggcacccgcggggaccggaacaagcugcgccaccugaucagcgugaagcucggcaagaucccgaccguggagaacuccaucuuccacauggccgccuggagcggguccgccugccacgacggcaaggaguggacguacaucggcgucgacgggcccgacaacaacgcccugcugaagaucaaguacggcgaggcguacaccgacaccuaccacagcuacgccaacaacauccuccggacccaggaguccgccugcaacugcaucgggggcaacugcuaccugaugaucacggacggcagcgccagcgggguguccgagugccgcuuccugaagauccgggagggccgcaucaucaaggagaucuuccccaccgggcgggugaagcacaccgaggagugcacgugcggcuucgccagcaacaagaccaucgagugcgcgugccgcgacaacuccuacaccgccaagcggcccuucgucaagcucaacguggagaccgacaccgccgagauccgccugaugugcacggacaccuaccuggacaccccgcggcccgacgacgggagcaucaccggccccugcgaguccaacggcgacaaggggagcggcgggaucaagggcggguucgugcaccagcgcauggccuccaagaucggccggugguacagccgcacgauguccaagaccgagcggaagggcauggggcucuacgucaaguacgacggcgaccccuggaccgacagcgacgcccuggcgcugcgcggggugaugguguccaugaaggagccgggcugguacagcuucggguucgagaucaaggacaagaagugcgacguccccugcaucggcaucgagauggugcacgacggcgggaaggagaccuggcacuccgccgccacggccaucuacugccucaugggcagcgggcagcugcugugggacaccgugaccggcgucgacauggcccucuga

SEQ ID NO: 93603 - RNA, 1401 nt, Artificial Sequence; identical to SEQ ID NO: 92924
  derived and/or modified CDS sequence (opt1) from neuraminidase__InfluenzaB__AGX21319

SEQ ID NO: 93604 - RNA, 1401 nt, Artificial Sequence; identical to SEQ ID NO: 92919
  derived and/or modified CDS sequence (opt1) from neuraminidase__InfluenzaB__AGX21330

SEQ ID NO: 93605 - RNA, 1401 nt, Artificial Sequence; identical to SEQ ID NO: 92919
  derived and/or modified CDS sequence (opt1) from neuraminidase__InfluenzaB__AGX21341

SEQ ID NO: 93606 - RNA, 1401 nt, Artificial Sequence; identical to SEQ ID NO: 93146
  derived and/or modified CDS sequence (opt1) from neuraminidase__InfluenzaB__AGX21352

SEQ ID NO: 93607 - RNA, 1401 nt, Artificial Sequence
  derived and/or modified CDS sequence (opt1) from neuraminidase__InfluenzaB__AGX21363
augcugcccagcaccauccagacccucacgcuguuccugaccuccggcggggugcuccugagccuguacgucuccgccagccucuccuaccugcuguacagcgacauccuccugaaguucuccccgaccgagaucaccgcccccacgaugccccuggacugcgcgaacgccagcaacgugcaggccgugaaccgcuccgccaccaagggcgucacccuccugcugcccgagccggaguggaccuacccccggcucagcugccccggguccacguuccagaaggcccugcugaucagcucccaccgcuucggcgagaccaaggggaacagcgcgccccucaucauccgggagccguucguggccugcggccccaacgagugcaagcacuucgcccugacccacuacgccgcgcagcccggcggguacuacaacggcacccgcggggaccggaacaagcugcgccaccucaucuccgugaagcugggcaagauccccacggucgagaacagcaucuuccacauggccgccugguccgggagcgccugccacgacggcaaggaguggaccuacaucggcguggacgggccggacaacaacgcccugcucaaggugaaguacggcgaggcguacaccgacaccuaccacuccuacgccaacaagauccugcggacgcaggagagcgccugcaacugcaucgggggcaacugcuaccugaugaucaccgacggcagcgccuccggggucagcgagugccgcuuccucaagauccgggagggccgcaucaucaaggagaucuuccccaccgggcgggugaagcacaccgaggagugcacgugcggcuucgccuccaacaagaccaucgagugcgcgugccgcgacaacagcuacaccgccaagcggcccuucgugaagcugaacgucgagaccgacacggccgagauccgccugaugugcaccgacaccuaccucgacacgccccggccgaacgacggguccaucaccggccccugcgagagcgacggcgacaagggguccggcgggaucaagggcggguucgugcaccagcgcauggagagcaagaucggccggugguacucccgcaccaugagcaagaccgagcggaugggcauggggcuguacgugaaguacgacggcgaccccugggccgacuccgacgcccuggcguucagcggggucaugguguccaugaaggagcccggcugguacagcuucggguucgagaucaaggacaagaagugcgacgugccgugcaucggcaucgagaugguccacgacggcgggaaggagaccuggcacuccgccgccacggccaucuacugccucaugggcagcgggcagcugcugugggacaccgugaccggcguggacauggcccucuga

SEQ ID NO: 93608 - RNA, 1401 nt, Artificial Sequence; identical to SEQ ID NO: 92919
  derived and/or modified CDS sequence (opt1) from neuraminidase__InfluenzaB__AGX21374

SEQ ID NO: 93609 - RNA, 1401 nt, Artificial Sequence; identical to SEQ ID NO: 92980
  derived and/or modified CDS sequence (opt1) from neuraminidase__InfluenzaB__AGX21385

SEQ ID NO: 93610 - RNA, 1401 nt, Artificial Sequence; identical to SEQ ID NO: 92980
  derived and/or modified CDS sequence (opt1) from neuraminidase__InfluenzaB__AGX21396

SEQ ID NO: 93611 - RNA, 1401 nt, Artificial Sequence; identical to SEQ ID NO: 92919
  derived and/or modified CDS sequence (opt1) from neuraminidase__InfluenzaB__AGX21407

SEQ ID NO: 93612 - RNA, 1401 nt, Artificial Sequence; identical to SEQ ID NO: 92919
  derived and/or modified CDS sequence (opt1) from neuraminidase__InfluenzaB__AGX21418

SEQ ID NO: 93613 - RNA, 1401 nt, Artificial Sequence
  derived and/or modified CDS sequence (opt1) from neuraminidase__InfluenzaB__AGX21429
augcugcccagcaccauccagacccucacgcuguuccugaccuccggcggggugcuccugagccuguacgucuccgcccuccugagcuaccugcuccacuccgacauccugcugaaguucagcccgaccgagaucaccgcccccacgaugucccucgacugcgcgaacgccagcaacgugcaggccgugaaccgcuccgucaccaagggcgugaccuuccugcugcccgagcccgaguggaccuacccgcggcucagcugccccggguccacguuccagaaggcccugcugaucagcccccaccgcuucggcgagaccaaggggaacuccgcgccccucaucauccgggagccguucaucgccugcggccccaacgagugcaagcacuucgcccugacccacuacgccgcccagcccggcggguacuacaacggcacccgcggggaccggaacaagcugcgccaccucaucagcgugaagcugggcaagauccccacggucgagaacuccaucuuccacauggcggccuggagcggguccgccugccacgacggcaaggaguggaccuacaucggcguggacgggccggacaacgacgcccugcucaaggugaaguacggcgaggccuacaccgacaccuaccacagcuacgcgaacaagauccugcggacgcaggaguccgccugcaacugcaucgggggcaacugcuaccugaugaucaccgacggcagcgccagcggggucuccgagugccgcuuccucaagauccgggagggccgcaucaucaaggagaucuuccccaccgggcgggugaagcacaccgaggagugcacgugcggcuucgccagcaacaagaccaucgagugcgccugccgcgacaacuccuacaccgcgaagcggcccuucgugaagcugaacgucgagaccgacacggccgagauccgccugaugugcaccgacaccuaccucgacacgccccggccggacgacgggagcaucaccggccccugcgaguccaacggcgacaaggggagcggcgggaucaagggcggguucgugcaccagcgcauggaguccaagaucggccggugguacagccgcaccauguccaagaccgagcggaugggcauggggcuguacgugaaguacgacggcgaccccugggccgacagcgacgcccuggccuucuccggggucauggugagcaugaaggagcccggcugguacuccuucggguucgagaucaaggacaagaagugcgacgugccgugcaucggcaucgagaugguccacgacggcgggaaggagaccuggcacagcgcggccacggccaucuacugccucaugggcuccgggcagcugcugugggacaccgugaccggcguggacauggcccucuga

SEQ ID NO: 93614 - RNA, 1401 nt, Artificial Sequence; identical to SEQ ID NO: 92980
  derived and/or modified CDS sequence (opt1) from neuraminidase__InfluenzaB__AGX21440

SEQ ID NO: 93615 - RNA, 1401 nt, Artificial Sequence; identical to SEQ ID NO: 92980
  derived and/or modified CDS sequence (opt1) from neuraminidase__InfluenzaB__AGX21451

SEQ ID NO: 93616 - RNA, 1401 nt, Artificial Sequence; identical to SEQ ID NO: 93564
  derived and/or modified CDS sequence (opt1) from neuraminidase__InfluenzaB__AGX21462

SEQ ID NO: 93617 - RNA, 1401 nt, Artificial Sequence
  derived and/or modified CDS sequence (opt1) from neuraminidase__InfluenzaB__AGX21473
augcugcccagcaccauccagacccucacgcuguuccugaccuccggcggggugcuccugagccuguacgucuccgcccuccugagcuaccugcucuacuccgacauccugcugaaguucagcccgaccgagaucaccgcccccacgaugucccucgacugcgcgaacgccagcaacgugcaggccgugaaccgcuccgccaccaagggcgucaccuuccugcugcccgagcccgaguggaccuacccgcggcucagcugccccggguccacguuccagcgcgcccugcugaucagcccccaccgguucggcgaggcgaaggggaacuccgcgccccucaucauccgcgagccguucaucgccugcggccccaacgagugcaagcacuucgcccugacccacuacgccgcccagcccggcggguacuacaacggcacccgcggggaccggaacaagcugcggcaccucaucagcgugaagcugggcaagauccccaccguggagaacuccaucuuccacauggccgccuggagcggguccgccugccacgacggcaaggaguggacguacaucggcgucgacgggccggacaacgacgcgcugcucaaggugaaguacggcgaggccuacaccgacaccuaccacagcuacgccaacaagauccugcgcacccaggaguccgccugcaacugcaucgggggcaacugcuaccugaugaucacggacggcagcgccagcgggguguccgagugccgguuccucaagauccgcgagggccggaucaucaaggagauccugcccaccgggcgcgucaagcacaccgaggagugcacgugcggcuucgcgagcaacaagaccaucgagugcgccugccgggacaacuccuacaccgccaagcgccccuucgugaagcugaacguggagaccgacaccgccgagauccggcucaugugcacggacaccuaccuggacacgccccgcccggacgacgggagcaucaccggccccugcgaguccaacggcgacaaggggagcggcgggaucaagggcggguucguccaccagcggauggaguccaagaucggccgcugguacagccggaccauguccaagaccgagcgcaugggcauggggcuguacgugaaguacgacggcgaccccugggccgacagcgacgcgcucguguucuccggggucauggugagcaugaaggagcccggcugguacuccuucggguucgagaucaaggacaagaagugcgacgugccgugcaucggcaucgagaugguccacgacggcgggaaggagaccuggcacagcgccgccaccgccaucuacugccugaugggcuccgggcagcugcucugggacacggugaccggcguggacauggcccuguga

SEQ ID NO: 93618 - RNA, 1401 nt, Artificial Sequence; identical to SEQ ID NO: 92924
  derived and/or modified CDS sequence (opt1) from neuraminidase__InfluenzaB__AGX21484

SEQ ID NO: 93619 - RNA, 1401 nt, Artificial Sequence; identical to SEQ ID NO: 92980
  derived and/or modified CDS sequence (opt1) from neuraminidase__InfluenzaB__AGX21495

SEQ ID NO: 93620 - RNA, 1401 nt, Artificial Sequence; identical to SEQ ID NO: 92980
  derived and/or modified CDS sequence (opt1) from neuraminidase__InfluenzaB__AGX21506

SEQ ID NO: 93621 - RNA, 1401 nt, Artificial Sequence
  derived and/or modified CDS sequence (opt1) from neuraminidase__InfluenzaB__AGX21517
augcugcccagcaccauccagacccucacgcuguuccugaccuccggcggggugcuccugagccuguacgucuccgcccuccugagcuaccugcucuacuccaacauccugcugaaguucagcccgaccgagaucaccgcccccacgaugucccucgacugcgcgaacgccagcaacgugcaggccgugaaccgcuccgccaccaagggcgucaccuuccugcugcccgagcccgaguggaccuacccgcggcucagcugccccggguccacguuccagaaggcccugcugaucagcccccaccgcuucggcgagaccaaggggaacuccgcgccccucaucauccgggagccguucaucgccugcggccccaacgagugcaagcacuucgcccugacccacuacgccgcgcagcccggcggguacuacaacggcacccgcggggaccggaacaagcugcgccaccucaucagcgugaagcugggcaagauccccacgguggagaacuccaucuuccacauggccgccuggagcggguccgccugccacgacggcaaggaguggaccuacaucggcgucgacgggccggacaacgacgcccugcucaaggugaaguacggcgaggcguacaccgacaccuaccacagcuacgccaacaagauccugcggacgcaggaguccgccugcaacugcaucgggggcaacugcuaccugaugaucaccgacggcagcgccagcgggguguccgagugccgcuuccucaagauccgggagggccgcaucaucaaggagaucuuccccaccgggcgggucaagcacaccgaggagugcacgugcggcuucgccagcaacaagaccaucgagugcgcgugccgcgacaacuccuacaccgccaagcggcccuucgugaagcugaacguggagaccgacacggccgagauccgccugaugugcaccgacaccuaccucgacacgccccggccggacgacgggagcaucaccggccccugcgaguccaacggcgacaaggggagcggcgggaucaagggcggguucguccaccagcgcauggaguccaagaucggccggugguacagccgcaccauguccaagaccgagcggaugggcauggggcuguacgugaaguacgacggcgaccccugggccgacagcgacgcccuggcguucuccggggugauggucagcaugaaggagcccggcugguacuccuucggguucgagaucaaggacaagaagugcgacgugccgugcaucggcaucgagauggugcacgacggcgggaaggagaccuggcacagcgccgccacggccaucuacugccucaugggcuccgggcagcugcugugggacaccgucaccggcguggacauggcccucuga

SEQ ID NO: 93622 - RNA, 1401 nt, Artificial Sequence
  derived and/or modified CDS sequence (opt1) from neuraminidase__InfluenzaB__AGX21528
augcugcccagcaccauccagacccucacgcuguuccugaccuccggcggggugcuccugagccuguacgucuccgccagccucuccuaccugcuguacagcgacauccuccugaaguucuccccgaccgagaucaccgcccccacgaugccccuggacugcgcgaacgccagcaacgugcaggccgugaaccgcuccgccaccaagggcgucacccuccugcugcccgagccggaguggaccuacccccggcucagcugccccggguccacguuccagaaggcccugcugaucagcccccaccgcuucggcgagaccaaggggaacuccgcgccgcucaucauccgggagcccuucaucgccugcggccccaacgagugcaagcacuucgcccugacccacuacgccgcgcagcccggcggguacuacaacggcacccgcggggaccggaacaagcugcgccaccucaucagcgugaagcugggcaagaucccgacgguggagaacuccaucuuccacauggccgccuggagcggguccgccugccacgacggcaaggaguggaccuacaucggcgucgacgggcccgacaacaacgcccugcucaaggugaaguacggcgaggcguacaccgacaccuaccacagcuacgccaacaagauccugcggacgcaggaguccgccugcaacugcaucgggggcaacugcuaccugaugaucaccgacggcagcgccagcgggguguccgagugccgcuuccucaagauccgggagggccgcaucaucaaggagaucuuccccaccgggcgggucaagcacaccgaggagugcacgugcggcuucgccagcaacaagaccaucgagugcgcgugccgcgacaacuccuacaccgccaagcggcccuucgugaagcugaacguggagaccgacacggccgagguccgccugaugugcaccgacaccuaccucgacaccccgcggcccaacgacgggagcaucacgggccccugcgaguccgacggcgacaaggggagcggcgggaucaagggcggguucgugcaccagcgcauggaguccaagaucggccggugguacagccgcaccauguccaagaccgagcggaugggcauggggcuguacgugaaguacgacggcgaccccugggccgacagcgacgcccugaccuucuccggggucauggugagcaugaaggagccgggcugguacuccuucggguucgagaucaaggacaagaagugcgacgugcccugcaucggcaucgagaugguccacgacagcggcaaggagacguggcacuccgcggccaccgccaucuacugccucauggggagcggccagcugcugugggacaccgugaccgggguggacauggcccucuga

SEQ ID NO: 93623 - RNA, 1401 nt, Artificial Sequence; identical to SEQ ID NO: 92980
  derived and/or modified CDS sequence (opt1) from neuraminidase__InfluenzaB__AGX21539

SEQ ID NO: 93624 - RNA, 1401 nt, Artificial Sequence
  derived and/or modified CDS sequence (opt1) from neuraminidase__InfluenzaB__AGX21550
augcugcccagcaccauccagacccucacgcuguuccugaccuccggcggggugcuccugagccuguacgucuccgccagccucuccuaccugcuguacagcgacauccuccugaaguucuccccgaccgagaucaccgcccccacgaugccccuggacugcgcgaacgccagcaacgugcaggccgugaaccgcuccgccaccaagggcgucacccuccugcugcccgagccggaguggaccuacccccggcucagcugccccggguccacguuccagaaggcccugcugaucagcccccaccgcuucggcgagaccaaggggaacuccgcgccgcucaucauccgggagcccuucaucgccugcggccccaacgagugcaagcacuucgcccugacccacuacgccgcgcagcccggcggguacuacaacggcacccgcggggaccggaacaagcugcgccaccucaucagcgugaagcugggcaagaucccgacgguggagaacuccaucuuccacauggccgccuggagcggguccgccugccacgacggcaaggaguggaccuacaucggcgucgacgggcccgacaacaacgcccugcucaaggugaaguacggcgaggcguacaccgacaccuaccacagcuacgccaacaagauccugcggacgcaggaguccgccugcaacugcaucgggggcaacugcuaccugaugaucaccgacggcagcgccagcgggguguccgagugccgcuuccucaagauccgggagggccgcaucaucaaggagaucuuccccgccgggcgggucaagcacaccgaggagugcacgugcggcuucgcgagcaacaagaccaucgagugcgccugccgcgacaacuccuacaccgccaagcggcccuucgugaagcugaacguggagaccgacaccgccgagguccgccugaugugcacggacaccuaccucgacaccccgcggcccaacgacgggagcaucaccggccccugcgaguccgacggcgacaaggggagcggcgggaucaagggcggguucgugcaccagcgcauggaguccaagaucggccggugguacagccgcacgauguccaagaccgagcggaugggcauggggcuguacgugaaguacgacggcgaccccugggccgacagcgacgcgcugaccuucuccggggucauggugagcaugaaggagccgggcugguacuccuucggguucgagaucaaggacaagaagugcgacgugcccugcaucggcaucgagaugguccacgacggcgggaaggagaccuggcacagcgccgccacggccaucuacugccucaugggcuccgggcagcugcugugggacaccgugaccggcguggacauggcccucuga

SEQ ID NO: 93625 - RNA, 1401 nt, Artificial Sequence
  derived and/or modified CDS sequence (opt1) from neuraminidase__InfluenzaB__AGX21561
augcugcccagcaccauccagacccucacgcuguuccugaccuccggcggggugcuccugagccuguacgucuccgccagccucuccuaccugcuguacagcgacauccuccugaaguucuccccgaccgagaucaccgcccccacgaugccccuggacugcgcgaacgccagcaacgugcaggccgugaaccgcuccgccaccaagggcgucacccuccugcugcccgagccggaguggaccuacccccggcucagcugccccggguccacguuccagaaggcccugcugaucagcccccaccgcuucggcgagaccaaggggaacuccgcgccgcucaucauccgggagcccuucaucgccugcggccccaacgagugcaagcacuucgcccugacccacuacgccgcgcagcccggcggguacuacaacggcacccgcggggaccggaacaagcugcgccaccucaucagcgugaagcugggcaagaucccgacgguggagaacuccaucuuccacauggccgccuggagcggguccgccugccacgacggcaaggaguggaccuacaucggcgucgacgggcccgacaacaacgcccugcucaaggugaaguacggcgaggcguacaccgacaccuaccacagcuacgccaacaagauccugcggacgcaggaguccgccugcaacugcaucgggggcaacugcuaccugaugaucaccgacggcagcgccagcgggguguccgagugccgcuuccucaagguccgggagggccgcaucaucaaggagaucuuccccaccgggcgggugaagcacaccgaggagugcacgugcggcuucgccagcaacaagaccaucgagugcgcgugccgcgacaacuccuacaccgccaagcggcccuucgugaagcugaacgucgagaccgacacggccgaggugcgccugaugugcaccgacaccuaccucgacaccccgcggcccaacgacgggagcaucacgggccccugcgaguccgacggcgacaaggggagcggcgggaucaagggcggguucgugcaccagcgcauggaguccaagaucggccggugguacagccgcaccauguccaagaccgagcggaugggcauggggcuguacgucaaguacgacggcgaccccugggccgacagcgacgcccugaccuucuccggggugauggugagcaugaaggagccgggcugguacuccuucggguucgagaucaaggacaagaagugcgacguccccugcaucggcaucgagauggugcacgacggcgggaaggagacguggcacagcgcggccaccgccaucuacugccucaugggcuccgggcagcugcugugggacaccgugaccggcgucgacauggcccucuga

SEQ ID NO: 93626 - RNA, 1401 nt, Artificial Sequence; identical to SEQ ID NO: 92924
  derived and/or modified CDS sequence (opt1) from neuraminidase__InfluenzaB__AGX21572

SEQ ID NO: 93627 - RNA, 1401 nt, Artificial Sequence
  derived and/or modified CDS sequence (opt1) from neuraminidase__InfluenzaB__AGX21583
augcugcccagcaccauccagacccucacgcuguuccugaccuccggcggggugcuccugagccuguacgucuccgcccuccugagcuaccugcucuacuccgacauccugcugaaguucagcccgaccgagaucaccgcccccacgaugucccucgacugcgcgaacgccagcaacgugcaggccgugaaccgcuccgccaccaagggcgucaccuuccugcugcccgagcccgaguggaccuacccgcggcucagcugccccggguccacguuccagcgcgcccugcugaucagcccccaccgguucggcgaggcgaaggggaacuccgcgccccucaucauccgcgagccguucaucgccugcggccccaacgagugcaagcacuucgcccugacccacuacgccgcccagcccggcggguacuacaacggcacccgcggggaccggaacaagcugcggcaccucaucagcgugaagcugggcaagauccccaccguggagaacuccaucuuccacauggccgccuggagcggguccgccugccacgacggcaaggaguggacguacaucggcgucgacgggccggacaacgacgcgcugcucaaggugaaguacggcgaggccuacaccgacaccuaccacagcuacgccaacaagauccugcgcacccaggaguccgccugcaacugcaucgggggcaacugcuaccugaugaucacggacggcagcgccagcgggguguccgagugccgguuccucaagauccgcgagggccggaucaucaaggagauccugcccaccgggcgcgucaagcacaccgaggagugcacgugcggcuucgcgagcaacaagaccaucgagugcgccugccgggacaacuccuacaccgccaagcgccccuucgugaagcugaacguggagaccgacaccgccgagauccggcucaugugcacggacaccuaccuggacacgccccgcccggacgacgggagcaucaccggccccugcgaguccaacggcgacaaggggagcggcgggaucaagggcggguucguccaccagcggauggaguccaagaucggccgcugguacagccggaccauguccaagaccgagcgcaugggcauggagcuguacgugaaguacgacggggaccccugggccgacagcgacgcgcucgccuucuccggcgugauggucagcaugaaggagcccgggugguacuccuucggcuucgagaucaaggacaagaagugcgacgugccgugcaucgggaucgagauggugcacgacggcggcaaggagaccuggcacagcgccgccaccgccaucuacugccugaugggguccggccagcugcucugggacacggucaccgggguggacauggcgcuguga

SEQ ID NO: 93628 - RNA, 1401 nt, Artificial Sequence; identical to SEQ ID NO: 92924
  derived and/or modified CDS sequence (opt1) from neuraminidase__InfluenzaB__AGX21594

SEQ ID NO: 93629 - RNA, 1401 nt, Artificial Sequence; identical to SEQ ID NO: 93146
  derived and/or modified CDS sequence (opt1) from neuraminidase__InfluenzaB__AGX21605

SEQ ID NO: 93630 - RNA, 1401 nt, Artificial Sequence
  derived and/or modified CDS sequence (opt1) from neuraminidase__InfluenzaB__AGX21615
augcugcccagcaccauccagacccucacgcuguuccugaccuccggcggggugcuccugagccuguacgucuccgccagccucuccuaccugcuguacagcgacauccuccugaaguucuccaccaccgagaucacggccccgaccaugccccuggacugcgcgaacgccagcaacgugcaggccgugaaccgcuccgccaccaagggcgucacccuccugcugcccgagcccgaguggacguacccgcggcucagcugccccggguccaccuuccagaaggcccugcugaucagcccccaccgcuucggcgagaacaaggggaacuccgcgccccucaucauccgggagccguucaucgccugcggccccaacgagugcaagcacuucgcccugacccacuacgccgcgcagcccggcggguacuacaacggcacccgcggggaccggaacaagcugcgccaccucaucagcgugaagcugggcaagauccccacgguggagaacuccaucuuccacauggccgccuggagcggguccgccugccacgacggcaaggaguggaccuacaucggcgucgacgggccggacaacaacgcccugcucaaggugaaguacggcgaggcguacaccgacaccuaccacagcuacgccaacaagauccugcggacgcaggaguccgccugcaacugcaucgggggcaacugcuaccugaugaucaccgacggcagcgccagcgggguguccgagugccgcuuccucaagauccgggagggccgcaucaucaaggagaucuuccccaccgggcgggucaagcacaccgaggagugcacgugcggcuucgccagcaacaagaccaucgagugcgcgugccgcgacaacuccuacaccgccaagcggcccuucgugaagcugaacguggagaccgacacggccgagauccgccugaugugcaccgacaccuaccucgacacgccccggccgaacgacgggagcaucaccggccccugcgaguccgacggcgacaaggggagcggcgggaucaagggcggguucguccaccagcgcauggaguccaagaucggccggugguacagccgcaccauguccaagaccgagcggaugggcauggggcuguacgugaaguacgacggcgaccccugggccgacagcgacgcccuggcguucuccggggugauggucagcaugaaggagcccggcugguacuccuucggguucgagaucaaggacaagaagugcgacgugccgugcaucggcaucgagauggugcacgacggcgggaaggagaccuggcacagcgccgccacggccaucuacugccucaugggcuccgggcagcugcugugggacaccgucaccggcguggacauggcccucuga

SEQ ID NO: 93631 - RNA, 1401 nt, Artificial Sequence; identical to SEQ ID NO: 92980
  derived and/or modified CDS sequence (opt1) from neuraminidase__InfluenzaB__AGX21626

SEQ ID NO: 93632 - RNA, 1401 nt, Artificial Sequence; identical to SEQ ID NO: 92980
  derived and/or modified CDS sequence (opt1) from neuraminidase__InfluenzaB__AGX21637

SEQ ID NO: 93633 - RNA, 1401 nt, Artificial Sequence; identical to SEQ ID NO: 92980
  derived and/or modified CDS sequence (opt1) from neuraminidase__InfluenzaB__AGX21648

SEQ ID NO: 93634 - RNA, 1401 nt, Artificial Sequence
  derived and/or modified CDS sequence (opt1) from neuraminidase__InfluenzaB__AGX21659
augcugcccagcaccauccagacccucacgcuguuccugaccuccggcggggugcuccugagccuguacgucuccgcccuccugagcuaccugcucuacuccgacauccugcugaaguucagcccgaccgagaucaccgcccccacgaugucccucgacugcgcgaacgccagcaacgugcaggccgugaaccgcuccgccaccaagggcgucaccuuccugcugcccgagcccgaguggaccuacccgcggcucagcugccccggguccacguuccagaaggcccugcugaucagcccccaccgcuucggcgagaccaaggggaacuccgcgccccucaucauccgggagccguucaucgccugcggccccaacgagugcaagcacuucgcccugacccacuacgccgcgcagcccggcggguacuacaacggcacccgcggggaccggaacaagcugcgccaccucgugagcgugaagcugggcaagauccccacggucgagaacuccaucuuccacauggccgccuggagcggguccgccugccacgacggcaaggaguggaccuacaucggcguggacgggccggacaacgacgcccugcucaaggugaaguacggcgaggcguacaccgacaccuaccacagcuacgccaacaagauccugcggacgcaggaguccgccugcaacugcaucgggggcaacugcuaccugaugaucaccgacggcagcgccagcggggucuccgagugccgcuuccucaagauccgggagggccgcaucaucaaggagaucuuccccaccgggcgggugaagcacaccgaggagugcacgugcggcuucgccagcaacaagaccaucgagugcgcgugccgcgacaacuccuacaccgccaagcggcccuucgugaagcugaacgucgagaccgacacggccgagauccgccugaugugcaccgacaccuaccucgacacgccccggccggacgacgggagcaucaccggccccugcgaguccaacggcgacaaggggagcggcgggaucaagggcggguucgugcaccagcgcauggaguccaagaucggccggugguacagccgcaccauguccaagaccgagcggaugggcauggggcuguacgugaaguacggcggggaccccugggccgacagcgacgcccuggcguucuccggcgucauggugagcaugaaggagcccgggugguacuccuucggcuucgagaucaaggacaagaagugcgacgugccgugcaucggcaucgagaugguccacgacgggggcaaggagaccuggcacagcgccgccacggccaucuacugccucaugggguccggccagcugcugugggacaccgugaccggcguggacauggcccucuga

SEQ ID NO: 93635 - RNA, 1401 nt, Artificial Sequence
  derived and/or modified CDS sequence (opt1) from neuraminidase__InfluenzaB__AGX21670
augcugcccagcaccauccagacccucacgcuguuccugaccuccggcggggugcuccugagccuguacgucuccgcccuccugagcuaccugcucuacuccgacauccugcugaaguucagcccgaccgagaucaccgcccccacgaugucccucgacugcgcgaacgccagcaacgugcaggccgugaaccgcuccgccaccaagggcgucaccuuccugcugcccgagcccgaguggaccuacccgcggcucagcugccccggguccacguuccagaaggcccugcugaucagcccccaccgcuucggcgagaccaaggggaacuccgcgccccucaucauccgggagccguucaucgccugcggccccaacgagugcaagcacuucgcccugacccacuacgccgcgcagcccggcggguacuacaacggcacccgcggggaccggaacaagcugcgccaccucaucagcgugaagcugggcaagauccccacgguggagaacuccaucuuccacauggccgccuggagcggguccgccugccacgacggcaaggaguggaccuacaucggcgucgacgggccggacaacgacgcccugcucaaggugaaguacggcgaggcguacaccgacaccuaccacagcuacgccaacaagauccugcggacgcaggaguccgccugcaacugcaucgggggcaacugcuaccugaugaucaccgacggcagcgccagcgggguguccgagugccgcuuccucaagauccgggagggccgcaucaucaaggagaucuuccccaccgggcgggucaagcacaccgaggagugcacgugcggcuucgccagcaacaagaccaucgagugcgcgugccgcgacaacuccuacaccgccaagcggcccuucgugaagcugaacguggagaccgacacggccgagauccgccugaugugcaccgacaccuaccucgacacgccccggccggacgacgggagcaucaccggccccugcgaguccaacggcgacaaggggagcggcgggaucaagggcggguucguccaccagcgcauggaguccaagaucggccggugguacagccgcaccauguccaagaccgagcggaugggcauggggcuguacgugaaguacgacggcgaccccugggccgacagcgacgcccuggcguucuccggggugauggucagcaugaaggagcccggcugguacuccuucggguucgagaucaaggacaagaagugcgacgugccgugcaucggcaccgagauggugcacgacggcgggaaggagacguggcacagcgccgccaccgccaucuacugccucaugggcuccgggcagcugcugugggacaccgucaccggcguggacauggcccucuga

SEQ ID NO: 93636 - RNA, 1401 nt, Artificial Sequence
  derived and/or modified CDS sequence (opt1) from neuraminidase__InfluenzaB__AGX21681
augcugcccagcaccauccagaugcucacccuguuccugacguccggcggggugcuccugagccuguacgucuccgccagccucuccuaccugcuguacagcgacauccuccugaaguucuccccgaccgagaucaccgcccccaccaugccccuggacugcgcgaacgccagcaacgugcacgccgugaaccgcuccgccacgaagggcgucaccuuccuccugcccgagccggaguggaccuacccccggcugagcugccccggguccaccuuccagaaggcccuccugaucagcccccaccgcuucggcgagacgaaggggaacuccgcgccgcugaucauccgggagcccuucaucgccugcggccccaacgagugcaagcacuucgcccucacccacuacgccgcgcagcccggcggguacuacaacggcacccgcggggaccggaacaagcugcgccaccugaucagcgugaagcucggcaagaucccgaccguggagaacuccaucuuccacauggccgccuggagcggguccgccugccacgacggcaaggaguggacguacaucggcgucgacgggcccgacaacaacgcccugcugaagaucaaguacggcgaggcguacaccgacaccuaccacagcuacgccaacaacauccuccggacccaggaguccgccugcaacugcaucgggggcaacugcuaccugaugaucacggacggcagcgccagcgggguguccgagugccgcuuccugaagauccgggagggccgcaucaucaaggagaucuuccccaccgggcgggugaagcacaccgaggagugcacgugcggcuucgccagcaacaagaccaucgagugcgcgugccgcgacaacuccuacaccgccaagcggcccuucgucaagcucaacguggagaccgacaccgccgagauccgccugaugugcacggacaccuaccuggacaccccgcggcccgacgacgggagcaucaccggccccugcgaguccaacggcgacaaggggaacggcgggaucaagggcggguucgugcaccagcgcauggccagcaagaucggccggugguacucccgcacgaugagcaagaccgagcggaagggcauggggcucuacgucaaguacgacggcgaccccuggaccgacuccgacgcccuggcguuccgcggggugauggugagcaugaaggagccgggcugguacuccuucggguucgagaucaaggacaagaagugcgacguccccugcaucggcaucgagauggugcacgacggcgggaaggagaccuggcacagcgccgccacggccaucuacugccugaugggcuccgggcagcuccugugggacaccgugaccggcgucgacauggcccuguga

SEQ ID NO: 93637 - RNA, 1401 nt, Artificial Sequence; identical to SEQ ID NO: 92919
  derived and/or modified CDS sequence (opt1) from neuraminidase__InfluenzaB__AGX21692

SEQ ID NO: 93638 - RNA, 1401 nt, Artificial Sequence; identical to SEQ ID NO: 93146
  derived and/or modified CDS sequence (opt1) from neuraminidase__InfluenzaB__AGX21703

SEQ ID NO: 93639 - RNA, 1401 nt, Artificial Sequence
  derived and/or modified CDS sequence (opt1) from neuraminidase__InfluenzaB__AGX21714
augcugcccagcaccauccagacccucacgcuguuccugaccuccggcggggugcuccugagccuguacgucuccgccagccucuccuaccugcuguacagcgacauccuccugaaguucuccccgaccgagaucaccgcccccgcgaugccccuggacugcgccaacgccagcaacgugcaggccgugaaccgcuccgccacgaagggccucacccugcugcuccccgagccggaguggaccuacccccggcugagcugccccggguccaccuuccagaaggcgcugcucaucagcccccaccgcuucggcgagacgaaggggaacuccgccccgcugaucauccgggagcccuucaucgccugcggccccaacgagugcaagcacuucgcccugacccacuacgcggcccagcccggcggguacuacaacggcacccgcggggaccggaacaagcuccgccaccugaucagcgucaagcugggcaagaucccgaccguggagaacuccaucuuccacauggccgccuggagcggguccgccugccacgacggcaaggaguggacguacaucggcguggacgggcccgacaacaacgcgcuccugaaggucaaguacggcgaggccuacaccgacaccuaccacagcuacgccaacaagauccugcggacccaggaguccgccugcaacugcaucgggggcaacugcuaccucaugaucacggacggcagcgccagcgggguguccgagugccgcuuccugaagauccgggagggccgcaucaucaaggagaucuuccccaccgggcgggugaagcacaccgaggagugcacgugcggcuucgcgagcaacaagaccaucgagugcgccugccgcgacaacuccuacaccgccaagcggcccuucgucaagcugaacguggagaccgacaccgccgagauccgccucaugugcacggacaccuaccuggacaccccgcggcccaacgacgggagcaucaccggccccugcgaguccgacggcgacaaggggagcggcgggaucaagggcggguucgugcaccagcgcauggaguccaagaucggccggugguacagccgcacgauguccaagaccgagcggaugggcauggggcuguacgucaaguacgacggcgaccccugggccgacagcgacgcgcucgccuucuccggggugauggugagcaugaaggagccgggcugguacuccuucggguucgagaucaaggacaagaagugcgacguccccugcaucggcaucgagauggugcacgacggcgggaaggagaccuggcacagcgccgccaccgccaucuacugccugaugggcuccgggcagcugcucugggacacggugaccggcgucgacauggcgcuguga

SEQ ID NO: 93640 - RNA, 1401 nt, Artificial Sequence
  derived and/or modified CDS sequence (opt1) from neuraminidase__InfluenzaB__AGX21725
augcugcccagcaccauccagaugcucacccuguuccugacguccggcggggugcuccugagccuguacgucuccgccagccucuccuaccugcuguacagcgacauccuccugaaguucuccccgaccgagaucaccgcccccaccaugccccuggacugcgcgaacgccagcaacgugcacgccgugaaccgguccgccacgaagggcgucaccuuccuccugcccgagccggaguggaccuacccccggcugagcugccccggguccaccuuccagcgcgcccuccugaucagcccccaccgguucggcgagacgaaggggaacuccgcgccgcugaucauccgcgagcccuucaucgccugcggccccaacgagugcaagcacuucgcccucacccacuacgccgcgcagcccggcggguacuacaacggcacccgcggggaccggaacaagcugcggcaccugaucagcgugaagcucggcaagaucccgaccguggagaacuccaucuuccacauggccgccuggagcggguccgccugccacgacggcaaggaguggacguacaucggcgucgacgggcccgacaacaacgcccugcugaagaucaaguacggcgaggcguacaccgacaccuaccacagcuacgccaacaacauccuccgcacccaggaguccgccugcaacugcaucgggggcaacugcuaccugaugaucacggacggcagcgccagcgggguguccgagugccgguuccugaagauccgcgagggccggaucaucaaggagaucuuccccaccgggcgcgugaagcacaccgaggagugcacgugcggcuucgccagcaacaagaccaucgagugcgcgugccgggacaacuccuacaccgccaagcgccccuucgucaagcucaacguggagaccgacaccgccgagauccggcugaugugcacggacaccuaccuggacaccccgcgccccgacgacgggagcaucaccggccccugcgaguccaacggcgacaaggggagcggcgggaucaagggcggguucgugcaccagcggauggccuccaagaucggccgcugguacagccggacgauguccaagaccgagcgcaagggcauggggcucuacgucaaguacgacggcgaccccuggaccgacagcgacgcccuggcguuccgcggggugaugguguccaugaaggagccgggcugguacagcuucggguucgagaucaaggacaagaagugcgacguccccugcaucggcaucgagauggugcacgacggcgggaaggagaccuggcacuccgccgccacggccaucuacugccugaugggcagcgggcagcuccugugggacaccgugaccggcgucgacauggcccuguga

SEQ ID NO: 93641 - RNA, 1401 nt, Artificial Sequence
  derived and/or modified CDS sequence (opt1) from neuraminidase__InfluenzaB__AGX21747
augcugcccagcaccauccagacccucacgcuguuccugaccuccggcggggugcuccugagccuguacgucuccgccagccucuccuaccugcuguacagcgacauccuccugaaggugucccagaccgagaucaccgccccgacgaugccccuggacugcgcgaacgccagcaacgugcaggccgucaaccgcuccgccaccaagggcgugacccuccugcugcccgagcccgaguggaccuacccgcggcucagcugccccggguccacguuccagaaggcccugcugaucagcccccaccgcuucggcgagaccaaggggaacuccgcgccccucaucauccgggagccguucaucgccugcggccccaaggagugcaagcacuucgcccugacccacuacgccgcgcagcccggcggguacuacaacggcacccgcgaggaccggaacaagcugcgccaccucaucagcgugaagcuggggaagauccccacggucgagaacuccaucuuccacauggccgccuggagcggcuccgccugccacgacgggcgggaguggaccuacaucggcguggacggcccggacagcaacgcccugcucaagaucaaguacggggaggcguacaccgacaccuaccacuccuacgccaagaacauccugcgcacgcaggagagcgccugcaacugcaucggcggggacugcuaccugaugaucaccgacggcagcgccuccggcaucagcgagugccgguuccucaagauccgcgaggggcggaucaucaaggagaucuuccccaccggccgcgugaagcacaccgaggagugcacgugcggguucgccuccaacaagaccaucgagugcgcgugccgggacaacagcuacaccgccaagcgccccuucgucaagcugaacguggagaccgacacggccgagauccggcugaugugcaccgagaccuaccucgacacgccccgcccggacgacggcuccaucaccgggcccugcgagagcaacggcgacaagggcuccgggggcaucaagggcggguucgugcaccagcggauggccagcaagaucgggcgcugguacucccggaccaugagcaagaccaagcgcaugggcaugggccuguacgucaaguacgacggggaccccuggaccgacuccgaggcccuggcgcucagcggcgugaugguguccauggaggagcccgggugguacagcuucggcuucgagaucaaggacaagaagugcgacgucccgugcaucgggaucgagauggugcacgacggcggcaagacgaccuggcacuccgccgccaccgccaucuacugccugauggggagcggccagcugcucugggacaccgugacgggggucgacauggcccuguga

SEQ ID NO: 93642 - RNA, 1401 nt, Artificial Sequence
  derived and/or modified CDS sequence (opt1) from neuraminidase__InfluenzaB__AGX21758
augcugcccagcaccauccagacccucacgcuguuccugaccuccggcggggugcuccugagccuguacgucuccgccagccucuccuaccugcuguacagcgacauccuccugaaguucaccccgaccgagaucacggugcccaccaugccccuggacugcgccaacgcguccaacgugcaggccgucaaccgcagcgccaccaagggcgugacccuccugcugcccgagccggaguggacguacccccggcucuccugccccgggagcaccuuccagaaggcccugcugaucagcccccaccgcuucggcgagaccaaggggaacuccgccccgcucaucauccgggagcccuucaucgcgugcggccccaaggagugcaagcacuucgcccugacccacuacgccgcccagcccggcggguacuacaacggcacgcgcgaggaccggaacaagcugcgccaccucaucuccgugaagcuggggaagaucccgaccgucgagaacagcaucuuccacauggcggccugguccggcagcgccugccacgacgggaaggaguggaccuacaucggcguggacggccccgacuccaacgcccugcucaagaucaaguacggggaggccuacaccgacacguaccacagcuacgcgaacaacauccugcggacccaggaguccgccugcaacugcaucggcgggaacugcuaccugaugaucaccgacggcagcgccagcggcaucuccgagugccgcuuccucaagauccgggaggggcgcaucaucaaggagaucuuccccaccggccgggugaagcacacggaggagugcacgugcggguucgccagcaacaagaccaucgagugcgccugccgcgacaacuccuacaccgcgaagcggcccuucgucaagcugaacguggagaccgacaccgccgagauccgccugaugugcaccgagaccuaccucgacacgccgcggcccgacgacggcagcaucaccgggcccugcgaguccaacggcaacaagggcagcgggggcaucaagggcggguucgugcaccagcgcauggccuccaagaucgggcggugguacagccgcaccauguccaagaccaagcggaugggcaugggccuguacgucaaguacgacggggaccccuggacggacagcgacgcccuggcccucuccggcgugauggugagcauggaggagccggggugguacuccuucggcuucgagaucaaggacaagaagugcgacguccccugcaucgggaucgagauggugcacgacggcggcaaggagaccuggcacagcgcggccaccgccaucuacugccugaugggguccggccagcugcucugggacaccgugacgggggucgacauggcccuguga

SEQ ID NO: 93643 - RNA, 1401 nt, Artificial Sequence
  derived and/or modified CDS sequence (opt1) from neuraminidase__InfluenzaB__AGX21769
augcugcccagcaccauccagacccucacgcuguuccugaccuccggcggggugcuccugagccuguacgucuccgccagccucuccuaccugcuguacagcgacauccuccugaaguucucccagaccgagaucaccgccccgacgaugccccuggacugcgcgaacgccagcaacgugcaggccgccaaccgcuccgccaccaagggcgugacccuccugcugcccgagcccgaguggaccuacccgcggcucagcugccccggguccacguuccagaaggcgcugcugaucagcccccaccgcuucggcgagaccaaggggaacuccgcgccccucaucauccgggagccguucaucgccugcggccccaaggagugcaagcacuucgcccugacccacuacgccgcccagcccggcggguacuacaacggcacccgcgaggaccggaacaagcugcgccaccucaucagcgucaagcuggggaagauccccacgguggagaacuccaucuuccacauggccgccuggagcggcuccgccugccacgacgggcgggaguggaccuacaucggcguggacggcccggacagcaacgcgcugcucaagaucaaguacggggaggccuacaccgacaccuaccacuccuacgccaagaacauccugcgcacgcaggagagcgccugcaacugcaucggcggggacugcuaccugaugaucaccgacggcagcgccuccggcaucagcgagugccgguuccucaagauccgcgaggggcggaucaucaaggagaucuuccccaccggccgcgucaagcacaccgaggagugcacgugcggguucgcguccaacaagaccaucgagugcgccugccgggacaacagcuacaccgccaagcgccccuucgugaagcugaacguggagaccgacacggccgagauccggcugaugugcaccaagaccuaccucgacacgccccgcccgaacgacggcuccaucaccgggcccugcgagagcgacggcgacaagggcuccgggggcaucaagggcggguucguccaccagcggauggccagcaagaucgggcgcugguacucccggaccaugagcaagaccaagcgcaugggcaugggccuguacgugaaguacgacggggaccccuggaccgacuccgaggcgcuggcccucagcggcgugauggucuccauggaggagcccgggugguacagcuucggcuucgagaucaaggacaagaagugcgacgugccgugcaucgggaucgagauggugcacgacggcggcaagacgaccuggcacuccgccgccaccgccaucuacugccugauggggagcggccagcugcucugggacaccgucacggggguggacauggcgcuguga

SEQ ID NO: 93644 - RNA, 1401 nt, Artificial Sequence
  derived and/or modified CDS sequence (opt1) from neuraminidase__InfluenzaB__AGX21780
augcugcccagcaccauccagacccucacgcuguuccugaccuccggcggggugcuccugagccuguacgucuccgccagccucuccuaccugcuguacagcgacauccuccugaaguucucccagaccgagaucaccgccccgacgaugccccuggacugcgcgaacgccagcaacgugcaggccgugaaccgcuccgccaccaagggcgucacccuccugcugcccgagcccgaguggaccuacccgcggcucagcugccccggguccacguuccagaaggcccugcugaucagcccccaccgcuucggcgagaccaaggggaacuccgcgccccucaucauccgggagccguucaucgccugcggccccaaggagugcaagcacuucgcccugacccacuacgccgcgcagcccggcggguacuacaacggcacccgcgaggaccggaacaagcugcgccaccucaucagcgugaagcuggggaagauccccacgguggagaacuccaucuuccacauggccgccuggagcggcuccgccugccacgacgggcgggaguggaccuacaucggcgucgacggcccggacagcaacgcccugcucaagaucaaguacggggaggcguacaccgacaccuaccacuccuacgccaagaacauccugcgcacgcaggagagcgccugcaacugcaucggcggggacugcuaccugaugaucaccgacggcagcgccuccggcaucagcgagugccgguuccucaagauccgcgaggggcggaucaucaaggagaucuuccccaccggccgcgugaagcacaccgaggagugcacgugcggguucgccuccaacaagaccaucgagugcgcgugccgggacaacagcuacaccgccaagcgccccuucgugaagcugaacgucgagaccgacacggccgagauccggcugaugugcaccgagaccuaccucgacacgccccgcccgaacgacggcuccaucaccgggcccugcgagagcaacggcgacaagggcuccgggggcaucaagggcggguucgugcaccagcggauggagagcaagaucgggcgcugguacucccggaccaugagcaagaccaagcgcaugggcaugggccuguacgugaaguacgacggggaccccuggaccgacuccgaggcccuggcccucagcggcgucaugguguccauggaggagcccgggugguacagcuucggcuucgagaucaaggacaagaagugcgacgugccgugcaucgggaucgagaugguccacgacggcggcaagacgaccuggcacuccgcggccaccgccaucuacugccugauggggagcggccagcugcucugggacaccgugacggggguggacaugacccuguga

SEQ ID NO: 93645 - RNA, 1401 nt, Artificial Sequence
  derived and/or modified CDS sequence (opt1) from neuraminidase__InfluenzaB__AGX21791
augcugcccagcaccauccagacccucacgcuguuccugaccuccggcggggugcuccugagccuguacgucuccgccagccucuccuaccugcuguacagcgacauccuccugaaguucuccccgaccgagaucaccgcccccacgaugccccuggacugcgcgaacgccagcaacgugcaggccgugaaccgcuccgccaccaagggcgucacccuccugcugcccgagccggaguggaccuacccccggcucagcugccccggguccacguuccagaaggcccugcugaucagcccccaccgcuucggcgagaccaaggggaacuccgcgccgcucaucauccgggagcccuucaucgccugcggccccaaggagugcaagcacuucgcccugacccacuacgccgcgcagcccggcggguacuacagcggcacccgcggggaccggaacaagcugcgccaccucaucuccgugaagcugggcaagaucccgacgguggagaacagcaucuuccacauggccgccugguccgggagcgccugccacgacggcaaggaguggaccuacaucggcgucgacgggcccgacaacaacgcccugcucaagaucaaguacggcgaggcguacaccgacaccuaccacuccuacgccaacaacauccugcggacgcaggagagcgccugcaacugcaucgggggcaacugcuaccugaugaucaccgacggcagcgccuccgggaucagcgagugccgcuuccucaagauccgggagggccgcaucaucaaggagaucuuccccaccgggcgggugaagcacaccgaggagugcacgugcggcuucgccuccaacaagaccaucgagugcgcgugccgcgacaacaacuacaccgccaagcggcccuucgugaagcugaacgucgagaccgacacggccgagauccgccugaugugcaccgagaccuaccucgacaccccgcggcccgacgacgggagcaucacgggccccugcgaguccaacggcgacaaggggagcggcgggaucaagggcggguucgugcaccagcgcauggccuccaagaucggccggugguacagccgcaccauguccaagaacaagcggaugggcauggggcuguacgugaaguacgacggcgaccccugggccgacagcgacgcgcuggcccucuccggggucauggugagcauggaggagccgggcugguacuccuucggguucgagaucaaggacaagaagugcgacgugcccugcaucggcaucgagaugguccacgacggcgggaaggagaccuggcacagcgccgccaccgccaucuacugccugaugggcuccgggcagcugcucugggacacggugaccggcguggacauggcgcuguga

SEQ ID NO: 93646 - RNA, 1401 nt, Artificial Sequence
  derived and/or modified CDS sequence (opt1) from neuraminidase__InfluenzaB__AGX21802
augcugcccagcaccauccagacccucacgcuguuccugaccuccggcggggugcuccugagccuguacgucuccgccagccucuccuaccugcuguacagcgacauccuccugaaguucucccagaccgagaucaccgccccgacgaugccccuggacugcgcgaacgccagcaacgugcaggccgccaaccgcuccgccaccaagggcgugacccuccugcugcccgagcccgaguggaccuacccgcggcucagcugccccggguccacguuccagaaggcgcugcugaucagcccccaccgcuucggcgagaccaaggggaacuccgcgccccucaucauccgggagccguucaucgccugcggccccaaggagugcaagcacuucgcccugacccacuacgccgcccagcccggcggguacuacaacggcacccgcgaggaccggaacaagcugcgccaccucaucagcgucaagcuggggaagauccccacgguggagaacuccaucuuccacauggccgccuggagcggcuccgccugccacgacgggcgggaguggaccuacaucggcguggacggcccggacagcaacgcgcugcucaagaucaaguacggggaggccuacaccgacaccuaccacuccuacgccaagaacauccugcgcacgcaggagagcgccugcaacugcaucggcggggacugcuaccugaugaucaccgacggcagcgccuccggcaucagcgagugccgguuccucaagauccgcgaggggcggaucaucaaggagaucuuccccaccggccgcgucaagcacaccgaggagugcacgugcggguucgcguccaacaagaccaucgagugcgccugccgggacaacagcuacaccgccaagcgccccuucgugaagcugaacguggagaccgacacggccgagauccggcugaugugcaccgagaccuaccucgacacgccccgcccgaacgacggcuccaucaccgggcccugcgagagcgacggcgacaagggcuccgggggcaucaagggcggguucguccaccagcggauggccagcaagaucgggcgcugguacucccggaccaugagcaagaccaagcgcaugggcaugggccuguacgugaaguacgacggggaccccuggaccgacuccgaggcgcuggcccucagcggcgugauggucuccauggaggagcccgggugguacagcuucggcuucgagaucaaggacaagaagugcgacgugccgugcaucgggaucgagauggugcacgacggcggcaagacgaccuggcacuccgccgccaccgccaucuacugccugauggggagcggccagcugcucugggacaccgucacggggguggacauggcgcuguga

SEQ ID NO: 93647 - RNA, 1401 nt, Artificial Sequence
  derived and/or modified CDS sequence (opt1) from neuraminidase__InfluenzaB__AGX21813
augcugcccagcaccauccagacccucacgcuguuccugaccuccggcggggugcuccugagccuguacgucuccgccagccucuccuaccugcuguacagcgacauccuccugaaguucucccagaccgagaucaccgccccgaagaugccccuggacugcgcgaacgccagcaacgugcaggccgccaaccgcuccgccacgaagggcgugacccuccugcugcccgagcccgaguggaccuacccgcggcucagcugccccggguccaccuuccagaaggcgcugcugaucagcccccaccgcuucggcgagacgaaggggaacuccgcgccccucaucauccgggagccguucaucgccugcggccccaaggagugcaagcacuucgcccugacccacuacgccgcccagcccggcggguacuacaacggcacccgcgaggaccggaacaagcugcgccaccucaucagcgucaagcuggggaagauccccaccguggagaacuccaucuuccacauggccgccuggagcggcuccgccugccacgacgggcgggaguggacguacaucggcguggacggcccggacagcaacgcgcugcucaagaucaaguacggggaggccuacaccgacaccuaccacuccuacgccaagaacauccugcgcacccaggagagcgccugcaacugcaucggcggggacugcuaccugaugaucacggacggcagcgccuccggcaucagcgagugccgguuccucaagauccgcgaggggcggaucaucaaggagaucuuccccaccggccgcgucaagcacaccgaggagugcacgugcggguucgcguccaacaagaccaucgagugcgccugccgggacaacagcuacaccgccaagcgccccuucgugaagcugaacguggagaccgacaccgccgagauccggcugaugugcacggagaccuaccucgacacgccccgcccgaacgacggcuccaucaccgggcccugcgagagcgacggcgacaagggcuccgggggcaucaagggcggguucguccaccagcggauggccagcaagaucgggcgcugguacucccggaccaugagcaagaccaagcgcaugggcaugggccuguacgugaaguacgacggggaccccuggaccgacuccgaggcgcuggcccucagcggcgugauggucuccauggaggagcccgggugguacagcuucggcuucgagaucaaggacaagaagugcgacgugccgugcaucgggaucgagauggugcacgacggcggcaagaccacguggcacuccgccgccaccgccaucuacugccugauggggagcggccagcugcucugggacaccgucaccgggguggacauggcgcuguga

SEQ ID NO: 93648 - RNA, 1401 nt, Artificial Sequence
  derived and/or modified CDS sequence (opt1) from neuraminidase__InfluenzaB__AGX21824
augcugcccagcaccauccagacccucacgcuguuccugaccuccggcggggugcuccugagccuguacgucuccgccagccucuccuaccugcuguacagcgacauccuccugaaguucucccagaccgagaucaccgccccgaucaugccccuggacugcgcgaacgccagcaacgugcaggccgugaaccgcuccgccacgaagggcgucacccuccugcugcccgagcccgaguggaccuacccgcggcucagcugccccggguccaccuuccagaaggcccugcugaucagcccccaccgcuucggcgagacgaaggggaacuccgcgccccucaucauccgggagccguucaucgccugcggccccaaggagugcaagcacuucgcccugacccacuacgccgcgcagcccggcggguacuacaacggcacccgcgaggaccggaacaagcugcgccaccucaucagcgugaagcuggggaagauccccaccguggagaacuccaucuuccacauggccgccuggagcggcuccgccugccacgacgggcgggaguggacguacaucggcgucgacggcccggacagcaacgcccugcucaagaucaaguacggggaggcguacaccgacaccuaccacuccuacgccaagaacauccugcgcacccaggagagcgccugcaacugcaucggcggggacugcuaccugaugaucacggacggccccgccagcggcaucuccgagugccgguuccucaagauccgcgaggggcggaucaucaaggagaucuuccccaccggccgcgugaagaacaccgaggagugcacgugcggguucgccagcaacaagaccaucgagugcgcgugccgggacaacuccuacaccgccaagcgccccuucgugaagcugaacgucgagaccgacaccgccgagauccggcugaugugcacggagaccuaccucgacaccccgcgccccaacgacggcagcaucaccgggcccugcgaguccaacggcgacaagggcagcgggggcaucaagggcggguucgugcaccagcggauggccuccaagaucgggcgcugguacagccggacgauguccaagaccaagcgcaugggcaugggccuguacgugaaguacgacggggaccccuggaccgacagcgaggcccuggcgcucuccggcgucauggugagcauggaggagccggggugguacuccuucggcuucgagaucaaggacaagaagugcgacgugcccugcaucgggaucgagaugguccacgacggcggcaagaccacguggcacagcgccgccaccgccaucuacugccugaugggguccggccagcugcucugggacaccgugaccgggguggacauggcccuguga

SEQ ID NO: 93649 - RNA, 1401 nt, Artificial Sequence; identical to SEQ ID NO: 92767
  derived and/or modified CDS sequence (opt1) from neuraminidase__InfluenzaB__AGX21835

SEQ ID NO: 93650 - RNA, 1401 nt, Artificial Sequence; identical to SEQ ID NO: 93155
  derived and/or modified CDS sequence (opt1) from neuraminidase__InfluenzaB__AGX21846

SEQ ID NO: 93651 - RNA, 1401 nt, Artificial Sequence; identical to SEQ ID NO: 93155
  derived and/or modified CDS sequence (opt1) from neuraminidase__InfluenzaB__AGX21857

SEQ ID NO: 93652 - RNA, 1401 nt, Artificial Sequence; identical to SEQ ID NO: 92767
  derived and/or modified CDS sequence (opt1) from neuraminidase__InfluenzaB__AGX21868

SEQ ID NO: 93653 - RNA, 1401 nt, Artificial Sequence; identical to SEQ ID NO: 93153
  derived and/or modified CDS sequence (opt1) from neuraminidase__InfluenzaB__AGX21879

SEQ ID NO: 93654 - RNA, 1401 nt, Artificial Sequence
  derived and/or modified CDS sequence (opt1) from neuraminidase__InfluenzaB__AGX21890
augcugcccagcaccauccagacccucacgcuguuccugaccuccggcggggugcuccugagccuguacgucuccgccagccucuccuaccugcuguacagcgacauccuccugaaguucucccagaccgagaucaucgccccgaucaugccccuggacugcgcgaacgccagcaacgugcaggccgugaaccacuccgccaccaagggcgucacgcuccugcugcccgagcccgaguggaccuacccgcgccucagcugccccggguccaccuuccagaaggcccugcugaucagcccccaccgguucggcgagaccaaggggaacuccgcgccccucaucauccgcgagccguucaucgccugcggccccaaggagugcaagcacuucgcccugacgcacuacgccgcgcagcccggcggguacuacaacggcacccgggaggaccgcaacaagcugcggcaccucaucagcgugaagcuggggaagauccccaccguggagaacuccaucuuccacauggccgccuggagcggcuccgccugccacgacgggcgcgaguggaccuacaucggcgucgacggcccggacagcaacgcccugcucaagaucaaguacggggaggcguacacggacaccuaccacuccuacgccaagaacauccugcggacccaggagagcgccugcaacugcaucggcggggacugcuaccugaugaucaccgacggccccgccagcggcaucuccgagugccgcuuccucaagauccgggaggggcgcaucaucaaggagaucuuccccacgggccgggugaagcacaccgaggagugcacgugcggguucgccagcaacaagaccaucgagugcgcgugccgcgacaacuccuacaccgccaagcggcccuucgugaagcugaacgucgagaccgacaccgccgagauccgccugaugugcaccgagacguaccucgacaccccgcggcccaacgacggcagcaucaccgggcccugcgaguccaacggcgacaagggcagcgggggcaucaagggcggguucgugcaccagcgcauggccuccaagaucgggcggugguacagccgcaccauguccaagacgaagcggaugggcaugggccuguacgugaaguacgacggggaccccuggaccgacagcgaggcccuggcgcucuccggcgucauggugagcauggaggagccggggugguacuccuucggcuucgagaucaaggacaagaagugcgacgugcccugcaucgggaucgagaugguccacgacggcggcaagaccaccuggcacagcgccgccacggccaucuacugccugaugggguccggccagcugcucugggacaccgugaccgggguggacauggcccuguga

SEQ ID NO: 93655 - RNA, 1401 nt, Artificial Sequence; identical to SEQ ID NO: 92767
  derived and/or modified CDS sequence (opt1) from neuraminidase__InfluenzaB__AGX21901

SEQ ID NO: 93656 - RNA, 1401 nt, Artificial Sequence; identical to SEQ ID NO: 92767
  derived and/or modified CDS sequence (opt1) from neuraminidase__InfluenzaB__AGX21912

SEQ ID NO: 93657 - RNA, 1401 nt, Artificial Sequence
  derived and/or modified CDS sequence (opt1) from neuraminidase__InfluenzaB__AGX21923
augcugcccagcaccauccagacccucacgcuguuccugaccuccggcggggugcuccugagccuguacgucuccgccagccucuccuaccugcuguacagcgacauccuccugaaguucucccagaccgagaucaccgccccgaucaugccccuggacugcacgaacgcgagcaacgugcaggccgugaaccgcuccgccaccaagggcgucacccuccugcugcccgagcccgaguggaccuacccgcggcucagcugccccggguccacguuccagaaggcccugcugaucagcccccaccgcuucggcgagaccaaggggaacuccgcgccccucaucauccgggagccguucaucgccugcggccccaaggagugcaagcacuucgcccugacccacuacgccgcccagcccggcggguacuacaacggcacccgcgaggaccggaacaagcugcgccaccucaucagcgugaagcuggggaagauccccacgguggagaacuccaucuuccacauggcggccuggagcggcuccgccugccacgacgggcgggaguggaccuacaucggcgucgacggcccggacagcaacgcccugcucaagaucaaguacggggaggccuacaccgacaccuaccacuccuacgcgaagaacauccugcgcacgcaggagagcgccugcaacugcaucggcggggacugcuaccugaugaucaccgacggccccgccagcggcaucuccgagugccgguuccucaagauccgcgaggggcggaucaucaaggagaucuuccccaccggccgcgugaagcacaccgaggagugcacgugcggguucgccagcaacaagaccaucgagugcgccugccgggacaacuccuacaccgcgaagcgccccuucgugaagcugaacgucgagaccgacacggccgagauccggcugaugugcaccgagaccuaccucgacaccccgcgccccaacgacggcagcaucacggggcccugcgaguccaacggcgacaagggcagcgggggcaucaagggcggguucgugcaccagcggauggccuccaagaucgggcgcugguacagccggaccauguccaagaccaagcgcaugggcaugggccuguacgugaaguacgacggggaccccuggaccgacagcgaggcccuggcccucuccggcgucauggugagcauggaggagccggggugguacuccuucggcuucgagaucaaggacaagaagugcgacgugcccugcaucgggaucgagaugguccacgacggcggcaagacgaccuggcacagcgcggccaccgccaucuacugccugaugggguccggccagcugcucugggacaccgugacggggguggacauggcccuguga

SEQ ID NO: 93658 - RNA, 1401 nt, Artificial Sequence; identical to SEQ ID NO: 93654
  derived and/or modified CDS sequence (opt1) from neuraminidase__InfluenzaB__AGX21934

SEQ ID NO: 93659 - RNA, 1401 nt, Artificial Sequence; identical to SEQ ID NO: 93155
  derived and/or modified CDS sequence (opt1) from neuraminidase__InfluenzaB__AGX21945

SEQ ID NO: 93660 - RNA, 1401 nt, Artificial Sequence
  derived and/or modified CDS sequence (opt1) from neuraminidase__InfluenzaB__AGX21956
augcugcccagcaccauccagacccucacgcuguuccugaccuccggcggggugcuccugagccuguacgucuccgccagccucuccuaccugcuguacagcgacauccuccugaaguucucccagaccgagaucaccgccccgaucaugccccuggacugcgcgaacacgagcaacauccaggccgugaaccgcuccgccaccaagggcgugacccuccugcugcccgagcccgaguggaccuacccgcggcucagcugccccggguccacguuccagaaggcccugcugaucagcccccaccgcuucggcgagaccaaggggaacuccgcgccccucaucauccgggagccguucaucgccugcggccccaaggagugcaagcacuucgcccugacccacuacgccgcccagcccggcggguacuacaacggcacccgcgaggaccggaacaagcugcgccaccucaucagcgucaagcuggggaagauccccacgguggagaacuccaucuuccacauggcggccuggagcggcuccgccugccacgacgggcgggaguggaccuacaucggcguggacggcccggacagcaacgcccugcucaagaucaaguacggggaggccuacaccgacaccuaccacuccuacgcgaagaacauccugcgcacgcaggagagcgccugcaacugcaucggcggggacugcuaccugaugaucaccgacggccccgccagcggcaucuccgagugccgguuccucaagauccgcgaggggcggaucaucaaggagaucuuccccaccggccgcgucaagcacaccgaggagugcacgugcggguucgccagcaacaagaccaucgagugcgccugccgggacaacuccuacaccgcgaagcgccccuucgugaagcugaacguggagaccgacacggccgagauccggcugaugugcaccgagaccuaccucgacaccccgcgccccaacgacggcagcaucacggggcccugcgaguccaacggcgacaagggcagcgggggcaucaagggcggguucguccaccagcggauggccuccaagaucgggcgcugguacagccggaccauguccaagaccaagcgcaugggcaugggccuguacgugaaguacgacggggaccccuggaccgacagcgaggcccuggcccucuccggcgugauggucagcauggaggagccggggugguacuccuucggcuucgagaucaaggacaagaagugcgacgugcccugcaucgggaucgagauggugcacgacggcggcaagacgaccuggcacagcgcggccaccgccaucuacugccugaugggguccggccagcugcucugggacaccgucacggggguggacauggcccuguga

SEQ ID NO: 93661 - RNA, 1401 nt, Artificial Sequence; identical to SEQ ID NO: 93155
  derived and/or modified CDS sequence (opt1) from neuraminidase__InfluenzaB__AGX21967

SEQ ID NO: 93662 - RNA, 1401 nt, Artificial Sequence; identical to SEQ ID NO: 92767
  derived and/or modified CDS sequence (opt1) from neuraminidase__InfluenzaB__AGX21978

SEQ ID NO: 93663 - RNA, 1401 nt, Artificial Sequence; identical to SEQ ID NO: 93155
  derived and/or modified CDS sequence (opt1) from neuraminidase__InfluenzaB__AGX21989

SEQ ID NO: 93664 - RNA, 1401 nt, Artificial Sequence; identical to SEQ ID NO: 93153
  derived and/or modified CDS sequence (opt1) from neuraminidase__InfluenzaB__AGX22000

SEQ ID NO: 93665 - RNA, 1401 nt, Artificial Sequence
  derived and/or modified CDS sequence (opt1) from neuraminidase__InfluenzaB__AGX22011
augcugcccagcaccauccagacccucacgcuguuccugaccuccggcggggugcuccugagccuguacgucuccgccagccucuccuaccugcuguacagcgacauccuccugaaguucucccagaccgagaucaccgccccgaucaugccccuggacugcgcgaacgccagcaacgugcaggccgugaaccgcuccgccacgaagggcgucacccuccugcugcccgagcccgaguggaccuacccgcggcucagcugccccggguccaccuuccagaaggcccugcugaucagcccccaccgcuucggcgagacgaaggggaacuccgcgccccucaucauccgggagccguucaucgccugcggccccaaggagugcaagcacuucgcccugacccacuacgccgcgaagcccggcggguacuacaacggcacccgcgaggaccggaacaagcugcgccaccucaucagcgugaagcuggggaagauccccaccguggagaacuccaucuuccacauggccgccuggagcggcuccgccugccacgacgggcgggaguggacguacaucggcgucgacggcccggacagcaacgcccugcucaagaucaaguacggggaggcguacaccgacaccuaccacuccuacgccaagaacauccugcgcacccaggagagcgccugcaacugcaucggcggggacugcuaccugaugaucacggacggccccgccagcggcaucuccgagugccgguuccucaagauccgcgaggggcggaucaucaaggagaucuuccccaccggccgcgugaagcacaccgaggagugcacgugcggguucgccagcaacaagaccaucgagugcgcgugccgggacaacaacuacaccgccaagcgccccuucgugaagcugaacgucgagaccgacaccgccgagauccggcugaugugcacggagaccuaccucgacaccccgcgccccaacgacggcuccaucaccgggcccugcgagagcaacggcgacaagggcuccgggggcaucaagggcggguucgugcaccagcggauggccagcaagaucgggcgcugguacucccggacgaugagcaagaccaagcgcaugggcaugggccuguacgugaaguacgacggggaccccuggaccgacuccgaggcccuggcgcucagcggcgucaugguguccauggaggagccggggugguacagcuucggcuucgagaucaaggacaagaagugcgacgugcccugcaucgggaucgagaugguccacgacggcggcaagaccacguggcacuccgccgccaccgccaucuacugccugauggggagcggccagcugcucugggacaccgugaccgggguggacauggcccuguga

SEQ ID NO: 93666 - RNA, 1401 nt, Artificial Sequence; identical to SEQ ID NO: 92767
  derived and/or modified CDS sequence (opt1) from neuraminidase__InfluenzaB__AGX22033

SEQ ID NO: 93667 - RNA, 1401 nt, Artificial Sequence; identical to SEQ ID NO: 92767
  derived and/or modified CDS sequence (opt1) from neuraminidase__InfluenzaB__AGX22044

SEQ ID NO: 93668 - RNA, 1401 nt, Artificial Sequence; identical to SEQ ID NO: 93153
  derived and/or modified CDS sequence (opt1) from neuraminidase__InfluenzaB__AGX22055

SEQ ID NO: 93669 - RNA, 1401 nt, Artificial Sequence; identical to SEQ ID NO: 92767
  derived and/or modified CDS sequence (opt1) from neuraminidase__InfluenzaB__AGX22066

SEQ ID NO: 93670 - RNA, 1401 nt, Artificial Sequence; identical to SEQ ID NO: 93654
  derived and/or modified CDS sequence (opt1) from neuraminidase__InfluenzaB__AGX22077

SEQ ID NO: 93671 - RNA, 1401 nt, Artificial Sequence; identical to SEQ ID NO: 92769
  derived and/or modified CDS sequence (opt1) from neuraminidase__InfluenzaB__AGX22088

SEQ ID NO: 93672 - RNA, 1401 nt, Artificial Sequence; identical to SEQ ID NO: 93155
  derived and/or modified CDS sequence (opt1) from neuraminidase__InfluenzaB__AGX22099

SEQ ID NO: 93673 - RNA, 1401 nt, Artificial Sequence; identical to SEQ ID NO: 93153
  derived and/or modified CDS sequence (opt1) from neuraminidase__InfluenzaB__AGX22110

SEQ ID NO: 93674 - RNA, 1401 nt, Artificial Sequence; identical to SEQ ID NO: 93155
  derived and/or modified CDS sequence (opt1) from neuraminidase__InfluenzaB__AGX22132

SEQ ID NO: 93675 - RNA, 1401 nt, Artificial Sequence
  derived and/or modified CDS sequence (opt1) from neuraminidase__InfluenzaB__AGX22143
augcugcccagcaccauccagacccucacgcuguuccugaccuccggcggggugcuccugagccuguacgucuccgccagccucuccuaccugcuguacagcgacauccuccugaaguucucccagaccgagaucaccgccccgaucaugccccuggacugcgcgaacgccagcaacgugcaggccgugaaccgcuccgccacgaagggcgucacccuccugcugcccgagcccgaguggaccuacccgcggcucagcugccccggguccaccuuccagaaggcccugcugaucagcccccaccgcuucggcgagacgaaggggaacuccgcgccccucaucauccgggagccguucaucgccugcggccccaaggagugcaagcacuucgcccugacccacuacgccgcgcagcccggcggguacuacaacggcacccgcgaggaccggaacaagcugcgccaccucaucagcgugaagcuggggaagauccccaccguggagaacuccaucuuccacauggccgccuggagcggcuccgccugccacgacgggcgggaguggacguacaucggcgucgacggcccggacagcaacgcccugcucaagaucaaguacggggaggcguacaccgacaccuaccacuccuacgccaagaacauccugcgcacccaggagagcgccugcaacugcaucggcggggacugcuaccugaugaucacggacggccccgccagcggcaucuccgagugccgguuccucaagauccgcgaggggcggaucaucaaggagaucuuccccaccggccgcgugaagcacaccgaggagugcacgugcggguucgccagcaacaagaccaucgagugcgcgugccgggacaacuccuacaccgccaagcgccccuucgugaagcugaacgucgagaccgacaccgccgagauccggcugaugugcacggagaccuaccucgacaccccgcgccccaacgacggcagcaucaccgggcccugcgaguccaacggcgacaagggcagcgggggcaucaagggcggguucgugcaccagcggauggccuccaagaucgggcgcugguacagccggacgaucuccaagaccaagcgcaugggcaugggccuguacgugaaguacgacggggaccccuggaccgacagcgaggcccuggcgcucuccggcgucauggugagcauggaggagccggggugguacuccuucggcuucgagaucaaggacaagaagugcgacgugcccugcaucgggaucgagaugguccacgacggcggcaagaccacguggcacagcgccgccaccgccaucuacugccugaugggguccggccagcugcucugggacaccgugaccgggguggacauggcccuguga

SEQ ID NO: 93676 - RNA, 1401 nt, Artificial Sequence; identical to SEQ ID NO: 93675
  derived and/or modified CDS sequence (opt1) from neuraminidase__InfluenzaB__AGX22154

SEQ ID NO: 93677 - RNA, 1401 nt, Artificial Sequence; identical to SEQ ID NO: 93675
  derived and/or modified CDS sequence (opt1) from neuraminidase__InfluenzaB__AGX22165

SEQ ID NO: 93678 - RNA, 1401 nt, Artificial Sequence; identical to SEQ ID NO: 93654
  derived and/or modified CDS sequence (opt1) from neuraminidase__InfluenzaB__AGX22176

SEQ ID NO: 93679 - RNA, 1401 nt, Artificial Sequence; identical to SEQ ID NO: 93675
  derived and/or modified CDS sequence (opt1) from neuraminidase__InfluenzaB__AGX22187

SEQ ID NO: 93680 - RNA, 1401 nt, Artificial Sequence; identical to SEQ ID NO: 93675
  derived and/or modified CDS sequence (opt1) from neuraminidase__InfluenzaB__AGX22198

SEQ ID NO: 93681 - RNA, 1401 nt, Artificial Sequence; identical to SEQ ID NO: 93675
  derived and/or modified CDS sequence (opt1) from neuraminidase__InfluenzaB__AGX22209

SEQ ID NO: 93682 - RNA, 1401 nt, Artificial Sequence; identical to SEQ ID NO: 93153
  derived and/or modified CDS sequence (opt1) from neuraminidase__InfluenzaB__AGX22220

SEQ ID NO: 93683 - RNA, 1401 nt, Artificial Sequence; identical to SEQ ID NO: 93155
  derived and/or modified CDS sequence (opt1) from neuraminidase__InfluenzaB__AGX22231

SEQ ID NO: 93684 - RNA, 1401 nt, Artificial Sequence; identical to SEQ ID NO: 93654
  derived and/or modified CDS sequence (opt1) from neuraminidase__InfluenzaB__AGX22242

SEQ ID NO: 93685 - RNA, 1401 nt, Artificial Sequence; identical to SEQ ID NO: 93153
  derived and/or modified CDS sequence (opt1) from neuraminidase__InfluenzaB__AGX22253

SEQ ID NO: 93686 - RNA, 1401 nt, Artificial Sequence; identical to SEQ ID NO: 92767
  derived and/or modified CDS sequence (opt1) from neuraminidase__InfluenzaB__AGX22264

SEQ ID NO: 93687 - RNA, 1401 nt, Artificial Sequence; identical to SEQ ID NO: 93153
  derived and/or modified CDS sequence (opt1) from neuraminidase__InfluenzaB__AGX22275

SEQ ID NO: 93688 - RNA, 1401 nt, Artificial Sequence; identical to SEQ ID NO: 92767
  derived and/or modified CDS sequence (opt1) from neuraminidase__InfluenzaB__AGX22286

SEQ ID NO: 93689 - RNA, 1401 nt, Artificial Sequence
  derived and/or modified CDS sequence (opt1) from neuraminidase__InfluenzaB__AGX22297
augcugcccagcaccauccagacccucacgcuguuccugacccucggcggggugcugcugucccucuacgucagcgccucccugagcuaccugcucuacuccgacauccugcugaaguucagccagaccgagaucaccgccccgaucaugccccucgacugcgcgaacgccuccaacgugcaggccgugaaccgcagcgccacgaagggcgucacccugcugcuccccgagcccgaguggaccuacccgcggcuguccugccccgggagcaccuuccagaaggcccugcucaucagcccccaccgcuucggcgagacgaaggggaacuccgcgccccugaucauccgggagccguucaucgccugcggccccaaggagugcaagcacuucgcccugacccacuacgccgcgcagcccggcggguacuacaacggcacccgcgaggaccggaacaagcuccgccaccugaucuccgugaagcuggggaagauccccaccguggagaacagcaucuuccacauggccgccugguccggcagcgccugccacgacgggcgggaguggacguacaucggcgucgacggcccggacuccaacgcccuccugaagaucaaguacggggaggcguacaccgacaccuaccacagcuacgccaagaacauccugcgcacccaggaguccgccugcaacugcaucggcggggacugcuaccucaugaucacggacggccccgccagcggcaucagcgagugccgguuccugaagauccgcgaggggcggaucaucaaggagaucuuccccaccggccgcgugaagcacaccgaggagugcacgugcggguucgccuccaacaagaccaucgagugcgcgugccgggacaacagcuacaccgccaagcgccccuucgugaagcugaacgucgagaccgacaccgccgagauccggcucaugugcacggagaccuaccuggacaccccgcgccccaacgacggcuccaucaccgggcccugcgagagcaacggcgacaagggcuccgggggcaucaagggcggguucgugcaccagcggauggccagcaagaucgggcgcugguacucccggacgaugagcaagaccaagcgcaugggcaugggccuguacgugaaguacgacggggaccccuggaccgacuccgaggcccucgcgcugagcggcgucaugguguccauggaggagccggggugguacagcuucggcuucgagaucaaggacaagaagugcgacgugcccugcaucgggaucgagaugguccacgacggcggcaagaccacguggcacuccgccgccaccgccaucuacugccugauggggagcggccagcuccugugggacaccgugaccgggguggacauggcccuguga

SEQ ID NO: 93690 - RNA, 1401 nt, Artificial Sequence; identical to SEQ ID NO: 92767
  derived and/or modified CDS sequence (opt1) from neuraminidase__InfluenzaB__AGX22308

SEQ ID NO: 93691 - RNA, 1401 nt, Artificial Sequence
  derived and/or modified CDS sequence (opt1) from neuraminidase__InfluenzaB__AGX22330
augcugcccagcaccauccagacccucacgcuguuccugaccuccggcggggugcuccugagccuguacgucuccgccagccucuccuaccugcuguacagcgacauccuccugaaguucucccagaccgagaucaccgccccgaucaugccccuggacugcgcgaacgccagcaacgugcaggccgugaaccgcuccgccacgaagggcgucacccuccugcugcccgagcccgaguggaccuacccgcggcucagcugccccggguccaccuuccagaaggcccugcugaucagcccccaccgcuucggcgagacgaaggggaacuccgcgccccucaucauccgggagccguucaucgccugcggccccaaggagugcaagcacuucgcccugacccacuacgccgcgcagcccggcggguacuacaacggcacccgcgaggaccggaacaagcugcgccaccucaucagcgugaagcuggggaagauccccaccguggagaacuccaucuuccacaugacggccuggagcggcuccgccugccacgacgggaaggaguggaccuacaucggcgucgacggcccggacagcaacgcccugcucaagaucaaguacggggaggccuacaccgacaccuaccacuccuacgcgaagaacauccugcggacgcaggagagcgccugcaacugcaucggcggggacugcuaccugaugaucaccgacggccccgccagcggcaucuccgagugccgcuuccucaagauccgggaggggcgcaucaucaaggagaucuuccccaccggccgggugaagcacaccgaggagugcacgugcggguucgccagcaacaagaccaucgagugcgccugccgcgacaacuccuacaccgcgaagcggcccuucgugaagcugaacgucgagaccgacacggccgagauccgccugaugugcaccgagaccuaccucgacaccccgcggcccaacgacggcagcaucacggggcccugcgaguccgacggcgacaagggcagcgggggcaucaagggcggguucgugcaccagcgcauggccaccaagaucgggcggugguacucccgcaccaugagcaagaccaagcggaugggcaugggccuguacgugaaguacgacggggaccccuggacggacuccgaggcccuggcccucagcggcgucaugguguccauggaggagccggggugguacagcuucggcuucgagaucaaggacaagaagugcgacgugcccugcaucgggaucgagaugguccacgacggcggcaagaccaccuggcacuccgcggccaccgccaucuacugccugauggggagcggccagcugcucugggacacggugaccgggguggacauggcccuguga

SEQ ID NO: 93692 - RNA, 1401 nt, Artificial Sequence; identical to SEQ ID NO: 93155
  derived and/or modified CDS sequence (opt1) from neuraminidase__InfluenzaB__AGX22341

SEQ ID NO: 93693 - RNA, 1401 nt, Artificial Sequence; identical to SEQ ID NO: 93155
  derived and/or modified CDS sequence (opt1) from neuraminidase__InfluenzaB__AGX22352

SEQ ID NO: 93694 - RNA, 1401 nt, Artificial Sequence; identical to SEQ ID NO: 93155
  derived and/or modified CDS sequence (opt1) from neuraminidase__InfluenzaB__AGX22363

SEQ ID NO: 93695 - RNA, 1401 nt, Artificial Sequence; identical to SEQ ID NO: 93153
  derived and/or modified CDS sequence (opt1) from neuraminidase__InfluenzaB__AGX22374

SEQ ID NO: 93696 - RNA, 1401 nt, Artificial Sequence; identical to SEQ ID NO: 92767
  derived and/or modified CDS sequence (opt1) from neuraminidase__InfluenzaB__AGX22385

SEQ ID NO: 93697 - RNA, 1401 nt, Artificial Sequence; identical to SEQ ID NO: 92767
  derived and/or modified CDS sequence (opt1) from neuraminidase__InfluenzaB__AGX22396

SEQ ID NO: 93698 - RNA, 1401 nt, Artificial Sequence; identical to SEQ ID NO: 93654
  derived and/or modified CDS sequence (opt1) from neuraminidase__InfluenzaB__AGX22407

SEQ ID NO: 93699 - RNA, 1401 nt, Artificial Sequence
  derived and/or modified CDS sequence (opt1) from neuraminidase__InfluenzaB__AGX22418
augcugcccagcaccauccagacccucacgcuguuccugaccuccggcggggugcuccugagccuguacgucuccgccagccucuccuaccugcuguacagcgacauccuccugaaguucucccagaccgagaucaucgccccgaucaugccccuggacugcgcgaacgccagcaacgugcaggccgugaaccacuccgccaccaagggcgucacgcuccugcugcccgagcccgaguggaccuacccgcgccucagcugccccggguccaccuuccagaaggcccugcugaucagcccccaccgguucggcgagaccaaggggaacuccgcgccccucaucauccgcgagccguucaucgccugcggccccaaggagugcaagcacuucgcccugacgcacuacgccgcgcagcccggccgguacuacaacgggacccgcgaggaccggaacaagcugcgccaccucaucagcgugaagcugggcaagauccccaccguggagaacuccaucuuccacauggccgccuggagcggguccgccugccacgacggccgggaguggaccuacaucggggucgacggcccggacagcaacgcccugcucaagaucaaguacggcgaggcguacacggacaccuaccacuccuacgccaagaacauccugcgcacccaggagagcgccugcaacugcaucgggggcgacugcuaccugaugaucaccgacgggcccgccagcggcaucuccgagugccgguuccucaagauccgcgagggccggaucaucaaggagaucuuccccacggggcgcgugaagcacaccgaggagugcacgugcggcuucgccagcaacaagaccaucgagugcgcgugccgggacaacuccuacaccgccaagcgccccuucgugaagcugaacgucgagaccgacaccgccgagauccggcugaugugcaccgagacguaccucgacaccccgcgccccaacgacgggagcaucaccggccccugcgaguccaacggggacaagggcagcggcgggaucaagggcggguucgugcaccagcggauggccuccaagaucggccgcugguacagccggaccauguccaagacgaagcgcauggggaugggccuguacgugaaguacgacggcgaccccuggaccgacagcgaggcccuggcgcucuccggggucauggugagcauggaggagccgggcugguacuccuucggguucgagaucaaggacaagaagugcgacgugcccugcaucggcaucgagaugguccacgacgggggcaagaccaccuggcacagcgccgccacggccaucuacugccugaugggcuccgggcagcugcucugggacaccgugaccggcguggacauggcccuguga

SEQ ID NO: 93700 - RNA, 1401 nt, Artificial Sequence; identical to SEQ ID NO: 93153
  derived and/or modified CDS sequence (opt1) from neuraminidase__InfluenzaB__AGX22429

SEQ ID NO: 93701 - RNA, 1401 nt, Artificial Sequence; identical to SEQ ID NO: 93153
  derived and/or modified CDS sequence (opt1) from neuraminidase__InfluenzaB__AGX22440

SEQ ID NO: 93702 - RNA, 1401 nt, Artificial Sequence; identical to SEQ ID NO: 93153
  derived and/or modified CDS sequence (opt1) from neuraminidase__InfluenzaB__AGX22449

SEQ ID NO: 93703 - RNA, 1401 nt, Artificial Sequence
  derived and/or modified CDS sequence (opt1) from neuraminidase__InfluenzaB__AGX22460
augcugcccagcaccauccagacccucacgcuguuccugaccuccggcggggugcuccugagccuguacgucuccgccagccucuccuaccugcuguacagcgacauccuccugaaguucucccagaccgagaucaccgccccgacgaugccccuggacugcgcgaacgccagcaacgugcaggccgugaaccgcuccgccaccaagggcgucacccuccugcugcccgagcucgaguggaccuacccccggcugagcugcccgggguccacguuccagaaggcccugcucaucagcccccaccgcuucggcgagaccaaggggaacuccgcgccccugaucauccgggagcccuucaucgccugcggcccgaaggagugcaagcacuucgcccugacccacuacgccgcgcagcccggcggguacuacaacggcacccgcgaggaccggaacaagcuccgccaccugaucagcgugaagcuggggaagauccccacgguggagaacuccaucuuccacauggccgccuggagcggcuccgccugccacgacgggcgggaguggaccuacgucggcguggacggccccgacagcaacgcccuccugaagaucaaguacggggaggcguacaccgacaccuaccacuccuacgccaagaacauccugcgcacgcaggagagcgccugcaacugcaucggcggggacugcuaccucaugaucaccgacggcccggccagcggcaucuccgagugccgguuccugaagauccgcgaggggcggaucaucaaggagaucuuccccaccggccgcgugaagcacaccgaggagugcacgugcggguucgccagcaacaagaccaucgagugcgcgugccgggacaacuccuacaccgccaagcgccccuucgucaagcuggacguggagaccgacacggccgagauccggcucaugugcaccgagaccuaccuggacacgccccgcccgaacgacggcagcaucaccgggcccugcgaggccaacggcgacaagggcuccgggggcaucaagggcggguucgugcaccagcggauggccagcaagaucgggcgcugguacucccggaccaugagcaagaccaagcgcaugggcaugggccuguacgucaaguacgacggggaccccuggaccgacuccgaggcgcucgcccugagcggcgugaugguguccauggaggagcccgggugguacagcuucggcuucgagaucaaggacaagaagugcgacgucccgugcaucgggaucgagauggugcacgacggcggcaagacgaccuggcacuccgccgccaccgccaucuacugccugauggggagcggccagcuccugugggacaccgugacgggggucgacauggcgcuguga

SEQ ID NO: 93704 - RNA, 1401 nt, Artificial Sequence; identical to SEQ ID NO: 92767
  derived and/or modified CDS sequence (opt1) from neuraminidase__InfluenzaB__AGX22471

SEQ ID NO: 93705 - RNA, 1401 nt, Artificial Sequence; identical to SEQ ID NO: 92767
  derived and/or modified CDS sequence (opt1) from neuraminidase__InfluenzaB__AGX22482

SEQ ID NO: 93706 - RNA, 1401 nt, Artificial Sequence; identical to SEQ ID NO: 92767
  derived and/or modified CDS sequence (opt1) from neuraminidase__InfluenzaB__AGX22493

SEQ ID NO: 93707 - RNA, 1401 nt, Artificial Sequence
  derived and/or modified CDS sequence (opt1) from neuraminidase__InfluenzaB__AGX22504
augcugcccagcaccauccagacccucacgcuguuccugaccuccggcggggugcuccugagccuguacgucuccgccagccucuccuaccugcuguacagcgacauccuccugaaguucuccaccaccgagaucacggccccgaccaucccccuggacugcgcgaacgccagcaacgugcaggccgugaaccgcuccgccaccaagggcgucacccuccugcugcccgagcccgaguggacguacccgcggcucagcugccccggguccaccuuccagaaggcccugcugaucagcccccaccgcuucggcgagaccaaggggaacuccgcgccccucaucauccgggagccguucaucgccugcggccccaaggagugcaagcacuucgcccugacccacuacgccgcgcagcccggcggguacuacaacggcacgcgcgaggaccggaacaagcugcgccaccucaucagcgugaagcuggggaagauccccaccguggagaacuccaucuuccacauggccgccuggagcggcuccgccugccacgacgggaaggaguggaccuacaucggcgucgacggcccggacagcaacgcccugcucaagaucaaguacggggaggcguacaccgacacguaccacuccuacgccaacaacauccugcggacccaggagagcgccugcaacugcaucggcgggaacugcuaccugaugaucaccgacggcagcgccuccggcaucagcgagugccgcuuccucaagauccgggaggggcgcaucaucaaggagaucuuccccaccggccgggugaagcacacggaggagugcacgugcggguucgccuccaacaagaccaucgagugcgcgugccgcgacaacagcuacaccgccaagcggcccuucgugaagcugaacgucgagaccgacaccgccgagauccgccugaugugcaccgagaccuaccucgacacgccccggccggacgacggcuccaucaccgggcccugcgagagcaacggcaacaagggcuccgggggcaucaagggcggguucgugcaccagcgcauggccagcaagaucgggcggugguacucccgcaccaugagcaagaccaagcggaugggcaugggccuguacgugaaguacgacggggaccccuggacggacuccgacgcccuggcgcucagcggcgucaugguguccauggaggagcccgggugguacagcuucggcuucgagaucaaggacaagaagugcgacgugccgugcaucgggaucgagaugguccacgacggcggcaaggagaccuggcacuccgccgccaccgccaucuacugccugauggggagcggccagcugcucugggacaccgugacggggguggacauggcccuguga

SEQ ID NO: 93708 - RNA, 1401 nt, Artificial Sequence; identical to SEQ ID NO: 93153
  derived and/or modified CDS sequence (opt1) from neuraminidase__InfluenzaB__AGX22515

SEQ ID NO: 93709 - RNA, 1401 nt, Artificial Sequence
  derived and/or modified CDS sequence (opt1) from neuraminidase__InfluenzaB__AGX22526
augcugcccagcaccauccagacccucacgcuguuccugaccuccggcggggugcuccugagccuguacgucuccgccagccucuccuaccugcuguacagcgacauccuccagaaguucucccagaccgagaucaccgccccgaucaugccccuggacugcgcgaacgccagcaacgugcaggccgugaaccgcuccgccacgaagggcgucacccugcuccugcccgagcccgaguggaccuacccgcggcugagcugccccggguccaccuuccagaaggcccuccugaucagcccccaccgcuucggcgagacgaaggggaacuccgcgccccugaucauccgggagccguucaucgccugcggccccaccgagugcaagcacuucgcccucacccacuacgccgcgcagcccggcggguacuacaacggcacccgcgaggaccggaacaagcugcgccaccugaucagcgugaagcucgggaagauccccacgguggagaacuccaucuuccacauggccgccuggagcggcuccgccugccacgacgggaaggaguggaccuacaucggcgucgacggcccggacagcaacgcccugcugaagaucaaguacggggaggcguacaccgacaccuaccacuccuacgccaagaacauccuccggacgcaggagagcgccugcaacugcaucggcggggacugcuaccugaugaucaccgacggccccgccagcggcaucuccgagugccgcuuccugaagauccgggaggggcgcaucaucaaggagaucuuccccaccggccgggugaagcacaccgaggagugcacgugcggguucgccagcaacaagaccaucgagugcgcgugccgcgacaacuccuacaccgccaagcggcccuucgugaagcucaacgucgagaccgacacggccgagauccgccugaugugcaccgagaccuaccuggacaccccgcggcccaacgacggcagcaucacggggcccugcgaguccgacggcgacaagggcagcgggggcaucaagggcggguucgugcaccagcgcauggccuccaagaucgggcggugguacagccgcaccauguccaagaccaagcggaugggcaugggccucuacgugaaguacgacggggaccccuggaccgacagcgaggcccuggcgcuguccggcgucauggugagcauggaggagccggggugguacuccuucggcuucgagaucaaggacaagaagugcgacgugcccugcaucgggaucgagaugguccacgacggcggcaagacgaccuggcacagcgccgccaccgccaucuacugccucaugggguccggccagcugcugugggacaccgugacggggguggacauggcccucuga

SEQ ID NO: 93710 - RNA, 1401 nt, Artificial Sequence; identical to SEQ ID NO: 92812
  derived and/or modified CDS sequence (opt1) from neuraminidase__InfluenzaB__AGX22548

SEQ ID NO: 93711 - RNA, 1401 nt, Artificial Sequence; identical to SEQ ID NO: 92651
  derived and/or modified CDS sequence (opt1) from neuraminidase__InfluenzaB__AGX22559

SEQ ID NO: 93712 - RNA, 1401 nt, Artificial Sequence; identical to SEQ ID NO: 92812
  derived and/or modified CDS sequence (opt1) from neuraminidase__InfluenzaB__AGX22570

SEQ ID NO: 93713 - RNA, 1401 nt, Artificial Sequence
  derived and/or modified CDS sequence (opt1) from neuraminidase__InfluenzaB__AGX22581
augcugcccagcaccauccagacccucacgcuguuccugaccuccggcggggugcuccugagccuguacgucuccgccagccucuccuaccugcuguacagcgacauccuccugaaguucucccagaccgagaucaccgccccgaucaugccccuggacugcgcgaacgccagcaacgugcaggccgugaaccgcuccgccacgaagggcgucacccuccugcugcccgagcccgaguggaccuacccgcggcucagcugccccggguccaccuuccagaaggcccugcugaucagcccccaccgcuucggcgagacgaaggggaacuccgcgccccucaucauccgggagccguucaucgccugcggccccaaggagugcaagcacuucgcccugacccacuacgccgcgcagcccggcggguacuacaacggcacccgcgaggaccggaacaagcugcgccaccucaucagcgugaagcuggggaagauccccaccguggagaacuccaucuuccacauggccgccuggagcggcuccgccugccacgacgggcgggaguggacguacaucggcgucgacggcccggacaacaacgcccugcucaagaucaaguacggggaggcguacaccgacaccuaccacagcuacgccaagaacauccugcgcacccaggaguccgccugcaacugcaucggcggggacugcuaccugaugaucacggacggccccgccagcggcaucagcgagugccgguuccucaagauccgcgaggggcggaucaucaaggagaucuuccccaccggccgcgugaagcacaccgaggagugcacgugcggguucgccuccaacaagaccaucgagugcgcgugccgggacaacaacuacaccgccaagcgccccuucgugaagcugaacgucgagaccgacaccgccgagauccggcugaugugcacggagaccuaccucgacaccccgcgccccaacgacggcagcaucaccgggcccugcgaguccaacggcgacaagggcagcgggggcaucaagggcggguucgugcaccagcggauggccuccaagaucgggcgcugguacagccggacgauguccaagaccaagcgcaugggcaugggccuguacgugaaguacgacggggaccccuggaccgacagcgaggcccuggcgcucuccggcgucauggugagcauggaggagccggggugguacuccuucggcuucgagaucaaggacaagaagugcgacgugcccugcaucgggaucgagaugguccacgacggcggcaagaccacguggcacagcgccgccaccgccaucuacugccugaugggguccggccagcugcucugggacaccgugaccgggguggacauggcccuguga

SEQ ID NO: 93714 - RNA, 1401 nt, Artificial Sequence; identical to SEQ ID NO: 92812
  derived and/or modified CDS sequence (opt1) from neuraminidase__InfluenzaB__AGX22592

SEQ ID NO: 93715 - RNA, 1401 nt, Artificial Sequence; identical to SEQ ID NO: 92812
  derived and/or modified CDS sequence (opt1) from neuraminidase__InfluenzaB__AGX22603

SEQ ID NO: 93716 - RNA, 1401 nt, Artificial Sequence; identical to SEQ ID NO: 93052
  derived and/or modified CDS sequence (opt1) from neuraminidase__InfluenzaB__AGX22614

SEQ ID NO: 93717 - RNA, 1401 nt, Artificial Sequence; identical to SEQ ID NO: 92812
  derived and/or modified CDS sequence (opt1) from neuraminidase__InfluenzaB__AGX22625

SEQ ID NO: 93718 - RNA, 1401 nt, Artificial Sequence
  derived and/or modified CDS sequence (opt1) from neuraminidase__InfluenzaB__AGX22636
augcugcccagcaccauccagacccucacgcuguuccugaccuccggcggggugcuccugagccuguacgucuccgccagccucuccuaccugcuguacagcgacauccuccugaaguucucccagaccgagaucaccgccccgaucaugccccuggacugcgcgaacgccagcaacgugcaggccgugaaccgcuccgccgccaagggcgucgcgcuccugcugcccgagcccgaguggacguacccgcggcucagcugccccggguccaccuuccagaaggcccugcugaucagcccccaccgcuucggcgagaccaaggggaacuccgcgccccucaucauccgggagccguucaucgccugcggccccaccgagugcaagcacuucgcccugacgcacuacgccgcccagcccggcggguacuacaacggcacccgcgaggaccggaacaagcugcgccaccucaucagcgugaagcuggggaagauccccaccguggagaacuccaucuuccacauggccgccuggagcggcuccgcgugccacgacgggaaggaguggaccuacaucggcgucgacggcccggacagcaacgcccugcucaagaucaaguacggggaggccuacacggacaccuaccacuccuacgccaagaacauccugcggacccaggagagcgccugcaacugcaucggcggggacugcuaccugaugaucaccgacggccccgcgagcggcaucuccgagugccgcuuccucaagauccgggaggggcgcaucaucaaggagaucuuccccacgggccgggugaagcacaccgaggagugcacgugcggguucgccagcaacaagaccaucgagugcgccugccgcgacaacuccuacaccgccaagcggcccuucgugaagcugaacgucgagaccgacaccgccgagauccgccugaugugcaccgagacguaccucgacaccccgcggcccaacgacggcagcaucaccgggcccugcgaguccgacggcgacaagggcagcgggggcaucaagggcggguucgugcaccagcgcauggcguccaagaucgggcggugguacagccgcaccauguccaagacgaagcggaugggcaugggccuguacgugaaguacgacggggaccccuggaccgacagcgaggcccuggcccucuccggcgucauggugagcauggaggagccggggugguacuccuucggcuucgagaucaaggacaagaagugcgacgugcccugcaucgggaucgagaugguccacgacggcggcaagaccaccuggcacagcgccgccacggcgaucuacugccugaugggguccggccagcugcucugggacaccgugaccgggguggacauggcccuguga

SEQ ID NO: 93719 - RNA, 1401 nt, Artificial Sequence; identical to SEQ ID NO: 92812
  derived and/or modified CDS sequence (opt1) from neuraminidase__InfluenzaB__AGX22647

SEQ ID NO: 93720 - RNA, 1401 nt, Artificial Sequence; identical to SEQ ID NO: 92651
  derived and/or modified CDS sequence (opt1) from neuraminidase__InfluenzaB__AGX22658

SEQ ID NO: 93721 - RNA, 1401 nt, Artificial Sequence; identical to SEQ ID NO: 92812
  derived and/or modified CDS sequence (opt1) from neuraminidase__InfluenzaB__AGX22669

SEQ ID NO: 93722 - RNA, 1401 nt, Artificial Sequence; identical to SEQ ID NO: 92812
  derived and/or modified CDS sequence (opt1) from neuraminidase__InfluenzaB__AGX22680

SEQ ID NO: 93723 - RNA, 1401 nt, Artificial Sequence; identical to SEQ ID NO: 92812
  derived and/or modified CDS sequence (opt1) from neuraminidase__InfluenzaB__AGX22691

SEQ ID NO: 93724 - RNA, 1401 nt, Artificial Sequence; identical to SEQ ID NO: 92812
  derived and/or modified CDS sequence (opt1) from neuraminidase__InfluenzaB__AGX22702

SEQ ID NO: 93725 - RNA, 1401 nt, Artificial Sequence; identical to SEQ ID NO: 92812
  derived and/or modified CDS sequence (opt1) from neuraminidase__InfluenzaB__AGX22713

SEQ ID NO: 93726 - RNA, 1401 nt, Artificial Sequence
  derived and/or modified CDS sequence (opt1) from neuraminidase__InfluenzaB__AGX22724
augcugcccagcaccauccagacccucacgcuguuccugaccuccggcggggugcuccugagccuguacgucuccgcccuccugagcuaccugcucuacuccgacauccugcugaaguucagccagaccgagaucaccgccccgaucaugccccucgacugcgcgaacgccuccaacgugcaggccgugaaccgcagcgccacgaagggcgucacccugcugcuccccgagcccgaguggaccuacccgcggcuguccugccccgggagcaccuuccagaaggcccugcucaucagcccccaccgcuucggcgagacgaaggggaacuccgcgccccugaucauccgggagccguucaucgccugcggccccaaggagugcaagcacuucgcccugacccacuacgccgcgcagcccggcggguacuacaacggcacccgcgaggaccggaacaagcuccgccaccugaucuccgugaagcuggggaagauccccaccguggagaacagcaucuuccacauggccgccugguccggcagcgccugccacgacgggcgggaguggacguacaucggcgucgacggcccggacuccaacgcccuccugaagaucaaguacggggaggcguacaccgacaccuaccacagcuacgccaagaacauccugcgcacccaggaguccgccugcaacugcaucggcggggacugcuaccucaugaucacggacggccccgccagcggcaucagcgagugccgguuccugaagauccgcgaggggcggaucaucaaggagaucuuccccaccggccgcgugaagcacaccgaggagugcacgugcggguucgccuccaacaagaccaucgagugcgcgugccgggacaacagcuacaccgccaagcgccccuucgugaagcugaacgucgagaccgacaccgccgagauccggcucaugugcacggagaccuaccuggacaccccgcgccccaacgacggcuccaucaccgggcccugcgagagcaacggcgacaagggcuccgggggcaucaagggcggguucgugcaccagcggauggccagcaagaucgggcgcugguacucccggacgaugagcaagaccaagcgcaugggcaugggccuguacgugaaguacgacggggaccccuggaccgacuccgaggcccucgcgcugagcggcgucaugguguccauggaggagccggggugguacagcuucggcuucgagaucaaggacaagaagugcgacgugcccugcaucgggaucgagaugguccacgacggcggcaagaccacguggcacuccgccgccaccgccaucuacugccugauggggagcggccagcuccugugggacaccgugaccgggguggacauggcccuguga

SEQ ID NO: 93727 - RNA, 1401 nt, Artificial Sequence; identical to SEQ ID NO: 92812
  derived and/or modified CDS sequence (opt1) from neuraminidase__InfluenzaB__AGX22735

SEQ ID NO: 93728 - RNA, 1401 nt, Artificial Sequence
  derived and/or modified CDS sequence (opt1) from neuraminidase__InfluenzaB__AGX22746
augcugcccagcaccauccagacccucacgcuguuccugaccuccggcggggugcuccugagccuguacgucuccgccagccucuccuaccugcuguacagcgacauccuccugaaguucucccagaccgagaucaccgccccgaucaugccccuggacugcgcgaacgccagcaacgugcaggccgugaaccgcuccgccacgaagggcgucacccuccugcugcccgagcccgaguggaccuacccgcggcucagcugccccggguccaccuuccagaaggcccugcugaucagcccccaccgcuucggcgagacgaaggggaacuccgcgccccucaucauccgggagccguucaucgccugcggccccaccgagugcaagcacuucgcccugacccacuacgccgcgcagcccggcggguacuacaaccgcacccgggaggaccgcaacaagcugcggcaccucaucagcgugaagcugggcaagauccccacgguggagaacuccaucuuccacauggccgccuggagcggguccgccugccacgacggcaaggaguggaccuacaucggggucgacggcccggacagcaacgcccugcucaagaucaaguacggcgaggcguacaccgacaccuaccacuccuacgccaagaacauccugcgcacgcaggagagcgccugcaacugcaucgggggcgacugcuaccugaugaucaccgacgggcccgccagcggcaucuccgagugccgguuccucaagauccgcgagggccggaucaucaaggagaucuuccccaccgggcgcgugaagcacaccgaggagugcacgugcggcuucgccagcaacaagaccaucgagugcgcgugccgggacaacuccuacaccgccaagcgccccuucgugaagcugaacgucgagaccgacacggccgagauccggcugaugugcaccgagaccuaccucgacaccccgcgccccaacgacgggagcaucacgggccccugcgaguccgacggggacaagggcagcggcgggaucaagggcggguucgugcaccagcggauggccuccaagaucggccgcugguacagccggaccauguccaagaccaagcgcauggggaugggccuguacgugaaguacgacggcgaccccuggaccgacagcgaggcccuggcgcucuccggggucauggugagcauggaggagccgggcugguacuccuucggguucgagaucaaggacaagaagugcgacgugcccugcaucggcaucgagaugguccacgacgggggcaagacgaccuggcacagcgccgccaccgccaucuacugccugaugggcuccgggcagcugcucugggacaccgugacgggcguggacauggcccuguga

SEQ ID NO: 93729 - RNA, 1401 nt, Artificial Sequence; identical to SEQ ID NO: 92812
  derived and/or modified CDS sequence (opt1) from neuraminidase__InfluenzaB__AGX22757

SEQ ID NO: 93730 - RNA, 1401 nt, Artificial Sequence; identical to SEQ ID NO: 92812
  derived and/or modified CDS sequence (opt1) from neuraminidase__InfluenzaB__AGX22768

SEQ ID NO: 93731 - RNA, 1401 nt, Artificial Sequence; identical to SEQ ID NO: 93153
  derived and/or modified CDS sequence (opt1) from neuraminidase__InfluenzaB__AGX22779

SEQ ID NO: 93732 - RNA, 1401 nt, Artificial Sequence; identical to SEQ ID NO: 92812
  derived and/or modified CDS sequence (opt1) from neuraminidase__InfluenzaB__AGX22790

SEQ ID NO: 93733 - RNA, 1401 nt, Artificial Sequence
  derived and/or modified CDS sequence (opt1) from neuraminidase__InfluenzaB__AGX22801
augcugcccagcaccauccagacccucacgcuguuccugaccuccggcggggugcuccugagccuguacgucuccgccagccucuccuaccugcuguacagcgacauccuccugaaguucucccagaccgagaucaccgccccgaucaugccccuggacugcgcgaacgccagcaacgugcaggccgugaaccgcuccgccgccaagggcgucacgcuccugcugcccgagcccgaguggaccuacccgcggcucagcugccccggguccaccuuccagaaggcgcugcugaucagcccccaccgcuucggcgagaccaaggggaacuccgcgccccucaucauccgggagccguucaucgccugcggccccacggagugcaagcacuucgcccugacccacuacgccgcccagcccggcggguacuacaacggcacccgcggggaccggaacaagcugcgccaccucaucagcgugaagcugggcaagauccccaccguggagaacuccaucuuccacauggccgccuggagcggguccgccugccacgacggcaaggaguggacguacaucggcgucgacgggccggacagcaacgcgcugcucaagaucaaguacggcgaggccuacaccgacaccuaccacuccuacgccaagaacauccugcggacccaggagagcgccugcaacugcaucgggggcaacugcuaccugaugaucacggacggcagcgccuccggggugagcgagugccgcuuccucaagauccgggagggccgcaucaucaaggagaucuuccccaccgggcgggugaagcacaccgaggagugcacgugcggcuucgcguccaacaagaccaucgagugcgccugccgcgacaacagcuacaccgccaagcggcccuucgucaagcugaacguggagaccgacaccgccgagauccgccugaugugcacggagaccuaccucgacacgccccggccgaacgacggguccaucaccggccccugcgagagcgacggcgacaagggguccggcgggaucaagggcggguucgugcaccagcgcauggccagcaagaucggccggugguacucccgcaccaugagcaagaccaagcggaugggcauggggcuguacgucaaguacgacggcgaccccuggaccgacuccgaggcgcuggcccucagcggggugaugguguccauggaggagcccggcugguacagcuucggguucgagaucaaggacaagaagugcgacgucccgugcaucggcaucgagauggugcacgacggcgggaagaccacguggcacuccgccgccaccgccaucuacugccugaugggcagcgggcagcugcucugggacaccgugaccggcgucgacauggcgcuguga

SEQ ID NO: 93734 - RNA, 1401 nt, Artificial Sequence; identical to SEQ ID NO: 92812
  derived and/or modified CDS sequence (opt1) from neuraminidase__InfluenzaB__AGX22812

SEQ ID NO: 93735 - RNA, 1401 nt, Artificial Sequence; identical to SEQ ID NO: 92812
  derived and/or modified CDS sequence (opt1) from neuraminidase__InfluenzaB__AGX22823

SEQ ID NO: 93736 - RNA, 1401 nt, Artificial Sequence; identical to SEQ ID NO: 92812
  derived and/or modified CDS sequence (opt1) from neuraminidase__InfluenzaB__AGX22834

SEQ ID NO: 93737 - RNA, 1401 nt, Artificial Sequence; identical to SEQ ID NO: 92812
  derived and/or modified CDS sequence (opt1) from neuraminidase__InfluenzaB__AGX22845

SEQ ID NO: 93738 - RNA, 1401 nt, Artificial Sequence; identical to SEQ ID NO: 92812
  derived and/or modified CDS sequence (opt1) from neuraminidase__InfluenzaB__AGX22856

SEQ ID NO: 93739 - RNA, 1401 nt, Artificial Sequence; identical to SEQ ID NO: 92812
  derived and/or modified CDS sequence (opt1) from neuraminidase__InfluenzaB__AGX22867

SEQ ID NO: 93740 - RNA, 1401 nt, Artificial Sequence; identical to SEQ ID NO: 92812
  derived and/or modified CDS sequence (opt1) from neuraminidase__InfluenzaB__AGX22878

SEQ ID NO: 93741 - RNA, 1401 nt, Artificial Sequence
  derived and/or modified CDS sequence (opt1) from neuraminidase__InfluenzaB__AGX22889
augcugcccagcaccauccagacccucacgcuguuccugaccuccggcggggugcuccugagccuguacgucuccgccagccucuccuaccugcuguacagcgacauccuccugaaguucucccagaccgagaucaccgccccgaucaugccccuggacugcgcgaacgccagcaacgugcaggccgugaaccgcuccgccgccaagggcgucacgcuccugcugcccgagcccgaguggaccuacccgcggcucagcugccccggguccaccuuccagaaggcgcugcugaucagcccccaccgcuucggcgagaccaaggggaacuccgcgccccucaucauccgggagccguucaucgccugcggccccacggagugcaagcacuucgcccugacccacuacgccgcccagcccggcggguacuacaacggcacccgcgaggaccggaacaagcugcgccaccucaucagcgugaagcuggggaagauccccaccguggagaacuccaucuuccacauggccgccuggagcggcuccgccugccacgacgggaaggaguggacguacaucggcgucgacggcccggacagcaacgcgcugcucaagaucaaguacggggaggccuacaccgacaccuaccacuccuacgccaagaacauccugcggacccaggagagcgccugcaacugcaucggcggggacugcuaccugaugaucacggacggccccgccagcggcaucuccgagugccgcuuccucaagauccgggaggggcgcaucaucaaggagaucuuccccaccggccgggugaagcacaccgaggagugcacgugcggguucgcgagcaacaagaccaucgagugcgccugccgcgacaacucccacaccgccaagcggcccuucgugaagcugaacgucgagaccgacaccgccgagauccgccugaugugcacggagaccuaccucgacaccccgcggcccaacgacggcagcaucaccgggcccugcgaguccgacggcgacaagggcagcgggggcaucaagggcggguucgugcaccagcgcauggccuccaagaucgggcggugguacagccgcacgauguccaagaccaagcggaugggcaugggccuguacgugaaguacgacggggaccccuggaccgacagcgaggcgcuggcccucuccggcgucauggugagcauggaggagccggggugguacuccuucggcuucgagaucaaggacaagaagugcgacgugcccugcaucgggaucgagaugguccacgacggcggcaagaccacguggcacagcgccgccaccgccaucuacugccugaugggguccggccagcugcucugggacaccgugaccgggguggacauggcgcuguga

SEQ ID NO: 93742 - RNA, 1401 nt, Artificial Sequence; identical to SEQ ID NO: 92651
  derived and/or modified CDS sequence (opt1) from neuraminidase__InfluenzaB__AGX22900

SEQ ID NO: 93743 - RNA, 1401 nt, Artificial Sequence
  derived and/or modified CDS sequence (opt1) from neuraminidase__InfluenzaB__AGX22911
augcugcccagcaccauccagacccucacgcuguuccugaccuccggcggggugcuccugagccuguacgucuccgccagccucuccuaccugcuguacagcgacauccuccugaaguucucccagaccgagaucaccgccccgaucaugccccuggacugcgcgaacgccagcaacgugcaggccgugaaccgcuccgccgccaagggcgucacgcuccugcugcccgagcccgaguggaccuacccgcggcucagcugccccggguccaccuuccagaaggcgcugcugaucagcccccaccgcuucggcgagaccaaggggaacuccgcgccccucaucauccgggagccguucaucgccugcggccccacggagugcaagcacuucgcccugacccacuacgccgcccagcccggcggguacuacaacggcacccgcgaggaccggaacaagcugcgccaccucaucagcgugaagcuggggaagauccccaccguggagaacuccaucuuccacauggccgccuggagcggcuccgccugccacgacgggaaggaguggacguacaucggcgucgacggcccggacagcaacgcgcugcucaagaucaaguacggggaggccuacaccgacaccuaccacuccuacgccaagaacauccugcggacccaggagagcgccugcaacugcaucggcggggacugcuaccugaugaucacggacggccccgccagcggcaccuccgagugccgcuuccucaagauccgggaggggcgcaucaucaaggagaucuuccccaccggccgggugaagcacaccgaggagugcacgugcggguucgcgagcaacaagaccaucgagugcgccugccgcgacaacuccuacaccgccaagcggcccuucgugaagcugaacgucgagaccgacacggccgagauccgccugaugugcaccgagaccuaccucgacaccccgcggcccaacgacggcagcaucacggggcccugcgaguccgacggcgacaagggcagcgggggcaucaagggcggguucgugcaccagcgcauggccuccaagaucgggcggugguacagccgcaccauguccaagaccaagcggaugggcaugggccuguacgugaaguacgacggggaccccuggaccgacagcgaggcgcuggcccucuccggcgucauggugagcauggaggagccggggugguacuccuucggcuucgagaucaaggacaagaagugcgacgugcccugcaucgggaucgagaugguccacgacggcggcaagacgaccuggcacagcgccgccaccgccaucuacugccugaugggguccggccagcugcucugggacaccgugacggggguggacauggcgcuguga

SEQ ID NO: 93744 - RNA, 1401 nt, Artificial Sequence
  derived and/or modified CDS sequence (opt1) from neuraminidase__InfluenzaB__AGX22922
augcugcccagcaccauccagacccucacgcuguuccugaccuccggcggggugcuccugagccuguacgucuccgccagccucuccuaccugcuguacagcgacauccuccugaaguucucccagaccgagaucaccgccccgaucaugccccuggacugcgcgaacgccagcaacgugcaggccgugaaccgcuccgccacgaagggcgucacccuccugcugcccgagcccgaguggaccuacccgcggcucagcugccccggguccaccuuccagaaggcccugcugaucagcccccaccgcuucggcgagacgaaggggaacuccgcgccccucaucauccgggagccguucaucgccugcggccccaccgagugcaagcacuucgcccugacccacuacgccgcgcagcccggcggguacuacaacggcacccgcgaggaccggaacaagcugcgccaccucaucagcgugaagcuggggaagauccccacgguggagaacuccaucuuccacauggccgccuggagcggcuccgccugccacgacgggaaggaguggaccuacaucggcgucgacggcccggacagcaacgcccugcucaagaucaaguacggggaggcguacaccgacaccuaccacuccuacgccaagaacauccugcggacgcaggagagcgccugcaacugcaucggcggggacugcuaccugaugaucaccgacggccccgccagcggcaucuccgagugccgcuuccucaagauccgggaggggcgcaucaucaaggagaucuuccccaccggccgggugaagcacaccgaggagugcacgugcggguucgccagcaacaagaccaucgagugcgcgugccgcgacaacuccuacaccgccaagcggcccuucgugaagcugaacgucgagaccgacacggccgagauccgccugaugugcaccgagaccuaccucgacaccccgcggcccaacgacggcagcaucacggggcccugcgaguccgacggcgacaagggcagcgggggcaucaagggcggguucgugcaccagcgcauggccuccaagaucgggcggugguacagccgcaccauguccaagaccaagcggaugggcaugggccuguacgugaaguacgacggggaccccuggaccgacaacgaggcccuggcgcucagcggcgucaugguguccauggaggagccggggugguacagcuucggcuucgagaucaaggacaagaagugcgacgugcccugcaucgggaucgagaugguccacgacggcggcaagacgaccuggcacuccgccgccaccgccaucuacugccugauggggagcggccagcugcucugggacaccgugacggggguggacauggcccuguga

SEQ ID NO: 93745 - RNA, 1401 nt, Artificial Sequence; identical to SEQ ID NO: 92812
  derived and/or modified CDS sequence (opt1) from neuraminidase__InfluenzaB__AGX22933

SEQ ID NO: 93746 - RNA, 1401 nt, Artificial Sequence; identical to SEQ ID NO: 92812
  derived and/or modified CDS sequence (opt1) from neuraminidase__InfluenzaB__AGX22944

SEQ ID NO: 93747 - RNA, 1401 nt, Artificial Sequence; identical to SEQ ID NO: 92812
  derived and/or modified CDS sequence (opt1) from neuraminidase__InfluenzaB__AGX22955

SEQ ID NO: 93748 - RNA, 1401 nt, Artificial Sequence; identical to SEQ ID NO: 92812
  derived and/or modified CDS sequence (opt1) from neuraminidase__InfluenzaB__AGX22966

SEQ ID NO: 93749 - RNA, 1401 nt, Artificial Sequence; identical to SEQ ID NO: 92651
  derived and/or modified CDS sequence (opt1) from neuraminidase__InfluenzaB__AGX22977

SEQ ID NO: 93750 - RNA, 1401 nt, Artificial Sequence; identical to SEQ ID NO: 93067
  derived and/or modified CDS sequence (opt1) from neuraminidase__InfluenzaB__AGX22988

SEQ ID NO: 93751 - RNA, 1401 nt, Artificial Sequence
  derived and/or modified CDS sequence (opt1) from neuraminidase__InfluenzaB__AGX22999
augcugcccagcaccauccagacccucacgcuguuccugaccuccggcggggugcuccugagccuguacgucuccgccagccucuccuaccugcuguacagcgacauccuccugaaguucucccagaccgagaucaccgccccgaucaugccccuggacugcgcgaacgccagcaacgugcaggccgugaaccgcuccgccgccaagggcgucacgcuccugcugcccgagcccgagugggcguacccgcggcucagcugccccggguccaccuuccagaaggcccugcugaucagcccccaccgcuucggcgagaccaaggggaacuccgcgccccucaucauccgggagccguucaucgccugcggccccaccgagugcaagcacuucgcccugacgcacuacgccgcccagcccggcggguacuacaacggcacccgcgaggaccggaacaagcugcgccaccucaucagcgugaagcuggggaagauccccaccguggagaacuccaucuuccacauggccgccuggagcggcuccgcgugccacgacgggaaggaguggaccuacaucggcgucgacggcccggacagcaacgcccugcucaagaucaaguacggggaggccuacacggacaccuaccacuccuacgccaagaacauccugcggacccaggagagcgccugcaacugcaucggcggggacugcuaccugaugaucaccgacggccccgcgagcggcaucuccgagugccgcuuccucaagauccgggaggggcgcaucaucaaggagaucuuccccacgggccgggugaagcacaccgaggagugcacgugcggguucgccagcaacaagaccaucgagugcgccugccgcgacaacuccuacaccgccaagcggcccuucgugaagcugaacgucgagaccgacaccgccgagauccgccugaugugcaccgagacguaccucgacaccccgcggcccaacgacggcagcaucaccgggcccugcgaguccgacggcgacaagggcagcgggggcaucaagggcggguucgugcaccagcgcauggcguccaagaucgggcggugguacagccgcaccauguccaagacgaagcggaugggcaugggccuguacgugaaguacgacggggaccccuggaccgacagcgaggcccuggcccucuccggcgucauggugagcauggaggagccggggugguacuccuucggcuucgagaucaaggacaagaagugcgacgugcccugcaucgggaucgagaugguccacgacggcggcaagaccaccuggcacagcgccgccacggcgaucuacugccugaugggguccggccagcugcucugggacaccgugaccgggguggacauggcccuguga

SEQ ID NO: 93752 - RNA, 1401 nt, Artificial Sequence; identical to SEQ ID NO: 93751
  derived and/or modified CDS sequence (opt1) from neuraminidase__InfluenzaB__AGX23010

SEQ ID NO: 93753 - RNA, 1401 nt, Artificial Sequence; identical to SEQ ID NO: 92651
  derived and/or modified CDS sequence (opt1) from neuraminidase__InfluenzaB__AGX23021

SEQ ID NO: 93754 - RNA, 1401 nt, Artificial Sequence; identical to SEQ ID NO: 92812
  derived and/or modified CDS sequence (opt1) from neuraminidase__InfluenzaB__AGX23032

SEQ ID NO: 93755 - RNA, 1401 nt, Artificial Sequence
  derived and/or modified CDS sequence (opt1) from neuraminidase__InfluenzaB__AGX23043
augcugcccagcaccauccagacccucacgcuguuccugaccuccggcggggugcuccugagccuguacgucuccgccagccucuccuaccugcuguacagcgacauccuccugaaguucucccagaccgagaucaccgccccgaucaugccccuggacugcgcgaacgccagcaacgugcaggccgugaaccgcuccgccgccaagggcgucacgcuccugcugcccgagcccgaguggaccuacccgcggcucagcugccccggguccaccuuccagaaggcgcugcugaucagcccccaccgcuucggcgagaccaaggggaacuccgcgccccucaucauccgggagccguucaucgccugcggccccacggagugcaagcacuucgcccugacccacuacgccgcccagcccggcggguacuacaacggcacccgcgaggaccggaacaagcugcgccaccucaucagcgugaagcuggggaagauccccaccguggagaacuccaucuuccacauggccgccuggagcggcuccgccugccacgacgggaaggaguggacguacaucggcgucgacggcccggacagcaacgcgcugcucaagaucaaguacggggaggccuacaccgacaccuaccacuccuacgccaagaacauccugcggacccaggagagcgccugcaacugcaucggcggggacugcuaccugaugaucacggacggccccgcccucggcaucagcgagugccgcuuccugaagauccgggaggggcgcaucaucaaggagaucuuccccaccggccgggugaagcacaccgaggagugcacgugcggguucgcguccaacaagaccaucgagugcgccugccgcgacaacagcuacaccgccaagcggcccuucgugaagcugaacgucgagaccgacaccgccgagauccgccucaugugcacggagaccuaccuggacaccccgcggcccaacgacggcuccaucaccgggcccugcgagagcgacggcgacaagggcuccgggggcaucaagggcggguucgugcaccagcgcauggccagcaagaucgggcggugguacucccgcacgaugagcaagaccaagcggaugggcaugggccuguacgugaaguacgacggggaccccuggaccgacuccgaggcgcucgcccugagcggcgucaugguguccauggaggagccggggugguacagcuucggcuucgagaucaaggacaagaagugcgacgugcccugcaucgggaucgagaugguccacgacggcggcaagaccacguggcacuccgccgccaccgccaucuacugccugauggggagcggccagcuccugugggacaccgugaccgggguggacauggcgcuguga

SEQ ID NO: 93756 - RNA, 1401 nt, Artificial Sequence; identical to SEQ ID NO: 92651
  derived and/or modified CDS sequence (opt1) from neuraminidase__InfluenzaB__AGX23054

SEQ ID NO: 93757 - RNA, 1401 nt, Artificial Sequence; identical to SEQ ID NO: 92651
  derived and/or modified CDS sequence (opt1) from neuraminidase__InfluenzaB__AGX23065

SEQ ID NO: 93758 - RNA, 1401 nt, Artificial Sequence; identical to SEQ ID NO: 92651
  derived and/or modified CDS sequence (opt1) from neuraminidase__InfluenzaB__AGX23076

SEQ ID NO: 93759 - RNA, 1401 nt, Artificial Sequence; identical to SEQ ID NO: 92812
  derived and/or modified CDS sequence (opt1) from neuraminidase__InfluenzaB__AGX23087

SEQ ID NO: 93760 - RNA, 1401 nt, Artificial Sequence; identical to SEQ ID NO: 92651
  derived and/or modified CDS sequence (opt1) from neuraminidase__InfluenzaB__AGX23098

SEQ ID NO: 93761 - RNA, 1401 nt, Artificial Sequence
  derived and/or modified CDS sequence (opt1) from neuraminidase__InfluenzaB__AGX23109
augcugcccagcaccauccagacccucacgcuguuccugaccuccggcggggugcuccugagccuguacgucuccgccagccucuccuaccugcuguacagcgacauccuccugaaguucucccagaccgagaucaccgccccgaucaugccccuggacugcgcgaacgccagcaacgugcaggccgugaaccgcuccgccacgaagggcgucacccuccugcugcccgagcccgaguggaccuacccgcggcucagcugccccggguccaccuuccagaaggcccugcugaucagcccccaccgcuucggcgagacgaaggggaacuccgcgccccucaucauccgggagccguucaucgccugcggccccaccgagugcaagcacuucgcccugacccacuacgccgcgcagcccggcggguacuacaacggcacccgcgaggaccggaacaagcugcgccaccucaucagcgugaagcuggggaagauccccacgguggagaacuccaucuuccacauggccgccuggagcggcuccgccugccacgacgggaaggaguggaccuacaucggcgucgacggcccggacagcaacgcccugcucaagaucaaguacggggaggcguacaccgacaccuaccacuccuacgccaagaacauccugcggacgcaggagagcgccugcaacugcauccgcggcgacugcuaccugaugaucaccgacgggcccgccagcggcaucuccgagugccgguuccucaagauccgcgagggccggaucaucaaggagaucuuccccaccgggcgcgugaagcacaccgaggagugcacgugcggcuucgccagcaacaagaccaucgagugcgcgugccgggacaacuccuacaccgccaagcgccccuucgugaagcugaacgucgagaccgacacggccgagauccggcugaugugcaccgagaccuaccucgacaccccgcgccccaacgacgggagcaucacgggccccugcgaguccgacggggacaagggcagcggcgggaucaagggcggguucgugcaccagcggauggccuccaagaucggccgcugguacagccggaccauguccaagaccaagcgcauggggaugggccuguacgugaaguacgacggcgaccccuggaccgacagcgaggcccuggcgcucuccggggucauggugagcauggaggagccgggcugguacuccuucggguucgagaucaaggacaagaagugcgacgugcccugcaucggcaucgagaugguccacgacgggggcaagacgaccuggcacagcgccgccaccgccaucuacugccugaugggcuccgggcagcugcucugggacaccgugacgggcguggacauggcccuguga

SEQ ID NO: 93762 - RNA, 1401 nt, Artificial Sequence; identical to SEQ ID NO: 92812
  derived and/or modified CDS sequence (opt1) from neuraminidase__InfluenzaB__AGX23120

SEQ ID NO: 93763 - RNA, 1401 nt, Artificial Sequence
  derived and/or modified CDS sequence (opt1) from neuraminidase__InfluenzaB__AGX23131
augcugcccagcaccauccagacccucacgcuguuccugaccuccggcggggugcuccugagccuguacgucuccgccagccucuccuaccugcuguacagcgacauccuccugaaguucucccagaccgagaucaucgccccgaucaugccccuggacugcgcgaacgccagcaacgugcaggccgugaaccgcuccgccgccaagggcgucacccuccugcugcccgagcccgaguggacguacccgcggcucagcugccccggguccaccuuccagaaggcgcugcugaucagcccccaccgcuucggcgagaccaaggggaacuccgcgccccucaucauccgggagccguucaucgccugcggccccaccgagugcaagcacuucgcccugacgcacuacgccgcccagcccggcggguacuacaacggcacccgcgaggaccggaacaagcugcgccaccucaucagcgugaagcuggggaagauccccaccguggagaacuccaucuuccacauggccgccuggagcggcuccgccugccacgacgggaaggaguggaccuacaucggcgucgacggcccggacagcaacgcgcugcucaagaucaaguacggggaggccuacacggacaccuaccacuccuacgccaagaacauccugcggacccaggagagcgccugcaacugcaucggcggggacugcuaccugaugaucaccgacggccccgccagcggcaucuccgagugccgcuuccucaagauccgggaggggcgcaucaucaaggagaucuuccccacgggccgggugaagcacaccgaggagugcacgugcggguucgcgagcaacaagaccaucgagugcgccugccgcgacaacuccuacaccgccaagcggcccuucgugaagcugaacgucgagaccgacaccgccgagauccgccugaugugcaccgagacguaccucgacaccccgcggcccaacgacggcagcaucaccgggcccugcgaguccgacggcgacaagggcagcgggggcaucaagggcggguucgugcaccagcgcauggccuccaagaucgggcggugguacagccgcaccauguccaagacgaagcggaugggcaugggccuguacgugaaguacgacggggaccccuggaccgacagcgaggcgcuggcccucuccggcgucauggugagcauggaggagccggggugguacuccuucggcuucgagaucaaggacaagaagugcgacgugcccugcaucgggaucgagaugguccacgacggcggcaagaccaccuggcacagcgccgccacggccaucuacugccugaugggguccggccagcugcucugggacaccgugaccgggguggacauggcgcuguga

SEQ ID NO: 93764 - RNA, 1401 nt, Artificial Sequence; identical to SEQ ID NO: 92812
  derived and/or modified CDS sequence (opt1) from neuraminidase__InfluenzaB__AGX23142

SEQ ID NO: 93765 - RNA, 1401 nt, Artificial Sequence; identical to SEQ ID NO: 92651
  derived and/or modified CDS sequence (opt1) from neuraminidase__InfluenzaB__AGX23153

SEQ ID NO: 93766 - RNA, 1401 nt, Artificial Sequence; identical to SEQ ID NO: 92651
  derived and/or modified CDS sequence (opt1) from neuraminidase__InfluenzaB__AGX23164

SEQ ID NO: 93767 - RNA, 1401 nt, Artificial Sequence; identical to SEQ ID NO: 92651
  derived and/or modified CDS sequence (opt1) from neuraminidase__InfluenzaB__AGX23175

SEQ ID NO: 93768 - RNA, 1401 nt, Artificial Sequence
  derived and/or modified CDS sequence (opt1) from neuraminidase__InfluenzaB__AGX23186
augcugcccagcaccacccagacgcucacccuguuccugaccuccggcggggugcuccugagccuguacgucuccgccagccucuccuaccugcuguacagcgacauccuccugaaguucucccagaccgagaucacggccccgaucaugccccuggacugcgcgaacgccagcaacgugcaggccgugaaccgcuccgccgccaagggcgucacccuccugcugcccgagcccgaguggaccuacccgcggcucagcugccccggguccaccuuccagaaggcgcugcugaucagcccccaccgcuucggcgagacgaaggggaacuccgcgccccucaucauccgggagccguucaucgccugcggccccaccgagugcaagcacuucgcccugacccacuacgccgcccagcccggcggguacuacaacggcacccgcgaggaccggaacaagcugcgccaccucaucagcgugaagcuggggaagauccccacgguggagaacuccaucuuccacauggccgccuggagcggcuccgccugccacgacgggaaggaguggaccuacaucggcgucgacggcccggacagcaacgcgcugcucaagaucaaguacggggaggccuacaccgacaccuaccacuccuacgccaagaacauccugcggacgcaggagagcgccugcaacugcaucggcggggacugcuaccugaugaucaccgacggccccgccagcggcaucuccgagugccgcuuccucaagauccgggaggggcgcaucaucaaggagaucuuccccaccggccgggugaagcacaccgaggagugcacgugcggguucgcgagcaacaagaccaucgagugcgccugccgcgacaacuccuacaccgccaagcggcccuucgugaagcugaacgucgagaccgacacggccgagauccgccugaugugcaccgagaccuaccucgacaccccgcggcccaacgacggcagcaucacggggcccugcgaguccgacggcgacaagggcagcgggggcaucaagggcggguucgugcaccagcgcauggccuccaagaucgggcggugguacagccgcaccauguccaagaccaagcggaugggcaugggccuguacgugaaguacgacggggaccccuggaccgacagcgaggcgcuggcccucuccggcgucauggugagcauggaggagccggggugguacuccuucggcuucgagaucaaggacaagaagugcgacgugcccugcaucgggaucgagaugguccacgacggcggcaagacgaccuggcacagcgccgccaccgccaucuacugccugaugggguccggccagcugcucugggacaccgugacggggguggacauggcgcuguga

SEQ ID NO: 93769 - RNA, 1401 nt, Artificial Sequence; identical to SEQ ID NO: 92812
  derived and/or modified CDS sequence (opt1) from neuraminidase__InfluenzaB__AGX23197

SEQ ID NO: 93770 - RNA, 1401 nt, Artificial Sequence; identical to SEQ ID NO: 92812
  derived and/or modified CDS sequence (opt1) from neuraminidase__InfluenzaB__AGX23208

SEQ ID NO: 93771 - RNA, 1401 nt, Artificial Sequence; identical to SEQ ID NO: 92812
  derived and/or modified CDS sequence (opt1) from neuraminidase__InfluenzaB__AGX23219

SEQ ID NO: 93772 - RNA, 1401 nt, Artificial Sequence
  derived and/or modified CDS sequence (opt1) from neuraminidase__InfluenzaB__AGX23230
augcugcccagcaccauccagacccucacgcuguuccugaccuccggcggggugcuccugagccuguacgucuccgccagccucuccuaccugcuguacagcgacauccuccugaaguucucccagaccgagaucaccgccccgaucaugccccuggacugcgcgaacgccagcaacgugcaggccgugaaccgcuccgccgccaagggcgucacgcuccugcugcccgagcccgaguggaccuacccgcggcucagcugccccggguccaccuuccagaaggcgcugcugaucagcccccaccgcuucggcgagaccaaggggaacuccgcgccccucaucauccgggagccguucaucgccugcggccccacggagugcaagcacuucgcccugacccacuacgccgcccagcccggcgaguacuacaacgggacccgcgaggaccggaacaagcugcgccaccucaucagcgugaagcugggcaagauccccaccguggagaacuccaucuuccacauggccgccuggagcggguccgccugccacgacggcaaggaguggacguacaucggggucgacggcccggacagcaacgcgcugcucaagaucaaguacggcgaggccuacaccgacaccuaccacuccuacgccaagaacauccugcggacccaggagagcgccugcaacugcaucgggggcgacugcuaccugaugaucacggacgggcccagcuccggcaucagcgagugccgcuuccucaagauccgggagggccgcaucaucaaggagaucuuccccaccgggcgggugaagcacaccgaggagugcacgugcggcuucgccuccaacaagaccaucgagugcgcgugccgcgacaacagcuacaccgccaagcggcccuucgugaagcugaacgucgagaccgacaccgccgagauccgccugaugugcacggagaccuaccucgacaccccgcggcccaacgacggguccaucaccggccccugcgagagcgacggggacaagggcuccggcgggaucaagggcggguucgugcaccagcgcauggccagcaagaucggccggugguacucccgcacgaugagcaagaccaagcggauggggaugggccuguacgugaaguacgacggcgaccccuggaccgacuccgaggcccuggcgcucagcggggucaugguguccauggaggagccgggcugguacagcuucggguucgagaucaaggacaagaagugcgacgugcccugcaucggcaucgagaugguccacgacgggggcaagaccacguggcacuccgccgccaccgccaucuacugccugaugggcagcgggcagcugcucugggacaccgugaccggcguggacauggcccuguga

SEQ ID NO: 93773 - RNA, 1401 nt, Artificial Sequence; identical to SEQ ID NO: 92651
  derived and/or modified CDS sequence (opt1) from neuraminidase__InfluenzaB__AGX23241

SEQ ID NO: 93774 - RNA, 1401 nt, Artificial Sequence; identical to SEQ ID NO: 92812
  derived and/or modified CDS sequence (opt1) from neuraminidase__InfluenzaB__AGX23252

SEQ ID NO: 93775 - RNA, 1401 nt, Artificial Sequence; identical to SEQ ID NO: 92812
  derived and/or modified CDS sequence (opt1) from neuraminidase__InfluenzaB__AGX23263

SEQ ID NO: 93776 - RNA, 1401 nt, Artificial Sequence; identical to SEQ ID NO: 92812
  derived and/or modified CDS sequence (opt1) from neuraminidase__InfluenzaB__AGX23274

SEQ ID NO: 93777 - RNA, 1401 nt, Artificial Sequence; identical to SEQ ID NO: 92651
  derived and/or modified CDS sequence (opt1) from neuraminidase__InfluenzaB__AGX23285

SEQ ID NO: 93778 - RNA, 1401 nt, Artificial Sequence; identical to SEQ ID NO: 92812
  derived and/or modified CDS sequence (opt1) from neuraminidase__InfluenzaB__AGX23296

SEQ ID NO: 93779 - RNA, 1401 nt, Artificial Sequence
  derived and/or modified CDS sequence (opt1) from neuraminidase__InfluenzaB__AGX23307
augcugcccagcaccauccagacccucacgcuguuccugaccuccggcggggugcuccugagccuguacgucuccgccagccucuccuaccugcuguacagcgacauccuccugaaguucucccagaccgagaucaccgccccgaucaugccccuggacugcgcgaacgccagcaacgugcaggccgugaaccgcuccgccgccaagggcgucacgcuccugcugcccgagcccgaguggaccuacccgcggcucagcugccccggguccaccuuccagaaggcgcugcugaucagcccccaccgcuucggcgagaccaaggggaacuccgcgccccucaucauccgggagccguucaucgccugcggccccacggagugcaagcacuucgcccugacccacuacgccgcccagcccggcggguacuacaacggcacccgcgaggaccggaacaagcugcgccaccucaucagcgugaagcuggggaagauccccaccguggagaacuccaucuuccacauggccgccuggagcggcuccgccugccacgacgggaaggaguggacguacgucggcguggacggcccggacagcaacgcgcugcucaagaucaaguacggggaggccuacaccgacaccuaccacuccuacgccaagaacauccugcggacccaggagagcgccugcaacugcaucggcggggacugcuaccugaugaucacggacggccccgccagcggcaucuccgagugccgcuuccucaagauccgggaggggcgcaucaucaaggagaucuuccccaccggccgggugaagcacaccgaggagugcacgugcggguucgcgagcaacaagaccaucgagugcgccugccgcgacaacuccuacaccgccaagcggcccuucgucaagcugaacguggagaccgacaccgccgagauccgccugaugugcacggagaccuaccucgacaccccgcggcccaacgacggcagcaucaccgggcccugcgaguccgacggcgacaagggcagcgggggcaucaagggcggguucgugcaccagcgcauggccuccaagaucgggcggugguacagccgcacgauguccaagaccaagcggaugggcaugggccuguacgucaaguacgacggggaccccuggaccgacagcgaggcgcuggcccucuccggcgugauggugagcauggaggagccggggugguacuccuucggcuucgagaucaaggacaagaagugcgacguccccugcaucgggaucgagauggugcacgacggcggcaagaccacguggcacagcgccgccaccgccaucuacugccugaugggguccggccagcugcucugggacaccgugaccggggucgacauggcgcuguga

SEQ ID NO: 93780 - RNA, 1401 nt, Artificial Sequence; identical to SEQ ID NO: 93779
  derived and/or modified CDS sequence (opt1) from neuraminidase__InfluenzaB__AGX23318

SEQ ID NO: 93781 - RNA, 1401 nt, Artificial Sequence; identical to SEQ ID NO: 93779
  derived and/or modified CDS sequence (opt1) from neuraminidase__InfluenzaB__AGX23329

SEQ ID NO: 93782 - RNA, 1401 nt, Artificial Sequence; identical to SEQ ID NO: 93779
  derived and/or modified CDS sequence (opt1) from neuraminidase__InfluenzaB__AGX23340

SEQ ID NO: 93783 - RNA, 1401 nt, Artificial Sequence; identical to SEQ ID NO: 93779
  derived and/or modified CDS sequence (opt1) from neuraminidase__InfluenzaB__AGX23351

SEQ ID NO: 93784 - RNA, 1401 nt, Artificial Sequence; identical to SEQ ID NO: 93779
  derived and/or modified CDS sequence (opt1) from neuraminidase__InfluenzaB__AGX23362

SEQ ID NO: 93785 - RNA, 1401 nt, Artificial Sequence; identical to SEQ ID NO: 93779
  derived and/or modified CDS sequence (opt1) from neuraminidase__InfluenzaB__AGX23373

SEQ ID NO: 93786 - RNA, 1401 nt, Artificial Sequence; identical to SEQ ID NO: 93779
  derived and/or modified CDS sequence (opt1) from neuraminidase__InfluenzaB__AGX23384

SEQ ID NO: 93787 - RNA, 1401 nt, Artificial Sequence
  derived and/or modified CDS sequence (opt1) from neuraminidase__InfluenzaB__AGX23395
augcugcccagcaccauccagacccucacgcuguuccugaccuccggcggggugcuccugagccuguacgucuccgccagccucuccuaccugcuguacagcgacauccuccugaaguucucccagaccgagaucaccgccccgaucaugccccuggacugcgcgaacgccagcaacgugcaggccgugaaccgcuccgccgccaagggcgucacgcuccugcugcccgagcccgaguggaccuacccgcggcucagcugccccggguccaccuuccagaaggcgcugcugaucagcccccaccgcuucggcgagaccaaggggaacuccgcgccccucaucauccgggagccguucaucgccugcggccccacggagugcaagcacuucgcccugacccacuacgccgcccagcccggcggguacuacaacggcacccgcgaggaccggaacaagcugcgccaccucaucagcgugaagcuggggaagauccccaccguggagaacuccaucuuccacauggccgccuggagcggcuccgccugccacgacgggaaggaguggacguacgucggcguggacggcccggacagcaacgcgcugcucaagaucaaguacggggaggccuacaccgacaccuaccacuccuacgccaagaacauccugcggacccaggagagcgccugcaacugcaucggcggggacugcuaccugaugaucacggacggccccgccagcggcaucuccgagugccgcuuccucaagauccgggaggggcgcaucaucaaggagaucuuccccaccggccgggugaagcacaccgaggagugcacgugcggguucgcgagcaacaagaccaucgagugcgccugccgcgacaacuccuacaccgccaagcggcccuucgucaagcugaacguggagaccgacaccgccgagauccgccugaugugcacggagaccuaccucgacaccccgcggcccaacgacggcagcaucaccgggcccugcgaguccgacggcgacaagggcagcgggggcaucaagggcggguucgugcaccagcgcauggccuccaagaucgggcggugguacagccgcacgauguccaagaccaagcggaugggcaugggccuguacgucaaguacgacggggaccccuggaccgacagcgaggcgcuggcccucuccggcgugauggugagcauggaggagccggggugguacuccuucggcuucgagaucaaggacaagaagugcgacguccccugcaucgggaucgagauggugcacgacggcggcaagaccacguggcacagcgccgccaccgccaucuacugccugaugggguccggccagcugcucuggaacaccgugaccggggucgacauggcgcuguga

SEQ ID NO: 93788 - RNA, 1401 nt, Artificial Sequence
  derived and/or modified CDS sequence (opt1) from neuraminidase__InfluenzaB__AGX23417
augcugcccagcaccauccagacccucacgcuguuccugaccuccggcggggugcuccugagccuguacgucuccgccagccucuccuaccugcuguacagcgacauccuccugaaguucucccagaccgagaucaccgccccgaucaugccccuggacugcgcgaacgccagcaacgugcaggccgugaaccgcuccgccgccaagggcgucacguuccuccugcccgagcccgaguggaccuacccgcggcugagcugccccggguccaccuuccagaaggcgcuccugaucagcccccaccgcuucggcgagaccaaggggaacuccgcgccccugaucauccgggagccguucaucgccugcggccccacggagugcaagcacuucgcccucacccacuacgccgcccagcccggcggguacuacaacggcacccgcgaggaccggaacaagcugcgccaccugaucagcgugaagcucgggaagauccccaccguggagaacuccaucuuccacauggccgccuggagcggcuccgccugccacgacgggaaggaguggacguacaucggcgucgacggcccggacagcaacgcgcugcugaagaucaaguacggggaggccuacaccgacaccuaccacuccuacgccaagaacauccuccggacccaggagagcgccugcaacugcaucggcggggacugcuaccugaugaucacggacggccccgccagcggcaucuccgagugccgcuuccugaagauccgggaggggcgcaucaucaaggagaucuuccccaccggccgggugaagcacaccgaggagugcacgugcggguucgcgagcaacaagaccaucgagugcgccugccgcgacaacuccuacaccgccaagcggcccuucgugaagcucaacgucgagaccgacaccgccgagauccgccugaugugcacggagaccuaccuggacaccccgcggcccaacgacggcagcaucaccgggcccugcgaguccgacggcgacaagggcagcgggggcaucaagggcggguucgugcaccagcgcauggccuccaagaucgggcggugguacagccgcacgauguccaagaccaagcggaugggcaugggccucuacgugaaguacgacggggaccccuggaccgacagcgaggcgcuggcccuguccggcgucauggugagcauggaggagccggggugguacuccuucggcuucgagaucaaggacaagaagugcgacgugcccugcaucgggaucgagaugguccacgacggcggcaagaccacguggcacagcgccgccaccgccaucuacugccucaugggguccggccagcugcugugggacaccgugaccgggguggacauggcgcucuga

SEQ ID NO: 93789 - RNA, 1401 nt, Artificial Sequence; identical to SEQ ID NO: 93788
  derived and/or modified CDS sequence (opt1) from neuraminidase__InfluenzaB__AGX23428

SEQ ID NO: 93790 - RNA, 1401 nt, Artificial Sequence; identical to SEQ ID NO: 93171
  derived and/or modified CDS sequence (opt1) from neuraminidase__InfluenzaB__AGX23450

SEQ ID NO: 93791 - RNA, 1401 nt, Artificial Sequence
  derived and/or modified CDS sequence (opt1) from neuraminidase__InfluenzaB__AGX23461
augcugcccagcaccauccagacccucacgcuguuccugaccuccggcggggugcuccugagccuguacgucuccgccagccucuccuaccugcuguacagcgacauccuccugaaguucucccgcaccgagaucaccgccccgaucaugccccuggacugcgcgaacgccagcaacauccaggccgugaaccgguccgccacgaagggcgugacccuccugcugcccgagcccgaguggaccuacccgcgccucagcugccccggguccaccuuccagaaggcccugcugaucagcccccaccgguucggcgagacgaaggggaacuccgcgccccucaucauccgcgagccguucaucgccugcggccccaaggagugcaagcacuucgcccugacccacuacgccgcgcagcccggcggguacuacaacggcacccgggaggaccgcaacaagcugcggcaccucaucagcgucaagcuggggaagauccccaccguggagaacuccaucuuccacauggccgccuggagcggcuccgccugccacgacgggcgcgaguggacguacaucggcguggacggcccggacagcaacgcccugcucaagaucaaguacggggaggcguacaccgacaccuaccacuccuacgccaagaacauccugcggacccaggagagcgccugcaacugcaucggcggggacugcuaccugaugaucacggacggccccgccagcggcaucuccgagugccgcuuccucaagauccgggaggggcgcaucaucaaggagaucuuccccaccggccgggucaagcacaccgaggagugcacgugcggguucgccagcaacaagaccaucgagugcgcgugccgcgacaacuccuacaccgccaagcggcccuucgugaagcugaacguggagaccgacaccgccgagauccgccugaugugcacggagaccuaccucgacaccccgcggcccaacgacggcagcaucaccgggcccugcgaguccaacggcgacaagggcagcgggggcaucaagggcggguucguccaccagcgcauggccuccaagaucgggcggugguacagccgcacgauguccaagaccaagcggaugggcaugggccuguacgugaaguacgacggggaccccuggaccgacagcgaggcccuggcgcucuccggcgugauggucagcaucgaggagccggggugguacuccuucggcuucgagaucaaggacaagaagugcgacgugcccugcaucgggaucgagauggugcacgacggcggcaagaccacguggcacagcgccgccaccgccaucuacugccugaugggguccggccagcugcucugggacaccgucaccgggguggacauggcccuguga

SEQ ID NO: 93792 - RNA, 1401 nt, Artificial Sequence; identical to SEQ ID NO: 93171
  derived and/or modified CDS sequence (opt1) from neuraminidase__InfluenzaB__AGX23472

SEQ ID NO: 93793 - RNA, 1401 nt, Artificial Sequence; identical to SEQ ID NO: 92812
  derived and/or modified CDS sequence (opt1) from neuraminidase__InfluenzaB__AGX23483

SEQ ID NO: 93794 - RNA, 1401 nt, Artificial Sequence
  derived and/or modified CDS sequence (opt1) from neuraminidase__InfluenzaB__AGX23494
augcugcccagcaccauccagacccucacgcuguuccugaccuccggcggggugcuccugagccuguacgucuccgccagccucuccuaccugcuguacagcgacauccuccugaaguucucccagaccgagaucaccgccccgaucaugccccuggacugcgcgaacgccagcaacgugcaggccgugaaccgcuccgccgccaagggcgucacgcuccugcugcccgagcccgaguggaccuacccgcggcucagcugccccggguccaccuuccagaaggcgcugcugaucagcccccaccgcuucggcgagaccaaggggaacuccgcgccccucaucauccgggagccguucaucgccugcggccccacggagugcaagcacuucgcccugacccacuacgccgcccagcccggcggguacuacaacggcacccgcgaggaccggaacaagcugcgccaccucaucagcgugaagcuggggaagauccccaccguggagaacuccaucuuccacauggccgccuggagcggcuccgccugccacgacgggaaggaguggacguacgucggcguggacggcccggacagcaacgcgcugcucaagaucaaguacggggaggccuacaccgacaccuaccacuccuacgccaagaacauccugcggacccaggagagcgccugcaacugcaucggcggggacugcuaccugaugaucacggacggccccgccagcggcaucuccgagugccgcuuccucaagauccgggaggggcgcaucaucaaggagaucuuccccaccggccgggugaagcacaccgaggagugcacgugcggguucgcgagcaacaagaccaucgagugcgccugccgcgacaacuccuacaccgccaagcggcccuucgucaagcugaacguggagaccgacaccgccgagauccgccugaugugcacggagaccuaccucgacaccccgcggcccaacgacggcagcaucaccgggcccugcggcuccgacggcgacaaggggagcggcgggaucaagggcggguucgugcaccagcgcauggccuccaagaucggccggugguacagccgcacgauguccaagaccaagcggaugggcauggggcuguacgucaaguacgacggcgaccccuggaccgacagcgaggcgcuggcccucuccggggugauggugagcauggacgagccgggcugguacuccuucggguucgagaucaaggacaagaagugcgacguccccugcaucggcaucgagauggugcacgacggcgggaagaccacguggcacagcgccgccaccgccaucuacugccugaugggcuccgggcagcugcucugggacaccgugaccggcgucgacauggcgcuguga

SEQ ID NO: 93795 - RNA, 1401 nt, Artificial Sequence
  derived and/or modified CDS sequence (opt1) from neuraminidase__InfluenzaB__AGX23505
augcugcccagcaccauccagacccucacgcuguuccugaccuccggcggggugcuccugagccuguacgucuccgccagccucuccuaccugcuguacagcgacauccuccugaaguucucccagaccgagaucaccgccccgaucaugccccuggacugcgcgaacgccagcaacgugcaggccgugaaccgcuccgccgccaagggcgucacgcuccugcugcccgagcccgaguggaccuacccgcggcucagcugccccggguccaccuuccagaaggcgcugcugaucagcccccaccgcuucggcgagaccaaggggaacuccgcgccccucaucauccgggagccguucaucgccugcggccccacggagugcaagcacuucgcccugacccacuacgccgcccagcccggcggguacuacaacggcacccgcgaggaccggaacaagcugcgccaccucaucagcgugaagcuggggaagauccccaccguggagaacuccaucuuccacauggccgccuggagcggcuccgccugccacgacgggaaggaguggacguacaucggcgucgacggcccggacaacaacgcgcugcucaagaucaaguacggggaggccuacaccgacaccuaccacagcuacgccaagaacauccugcggacccaggaguccgccugcaacugcaucggcggggacugcuaccugaugaucacggacggccccgccagcggcaucagcgagugccgcuuccucaagauccgggaggggcgcaucaucaaggagaucuuccccaccggccgggugaagcacaccgaggagugcacgugcggguucgcguccaacaagaccaucgagugcgccugccgcgacaacagcuacaccgccaagcggcccuucgugaagcugaacgucgagaccgacaccgccgagauccgccugaugugcacggagaccuaccucgacaccccgcggcccaacgacggcuccaucaccgggcccugcgagagcgacggcgacaagggcuccgggggcaucaagggcggguucgugcaccagcgcauggccagcaagaucgggcggugguacucccgcacgaugagcaagaccaagcggaugggcaugggccuguacgugaaguacgacggggaccccuggaccgacuccgaggcgcuggcccucagcggcgucaugguguccauggaggagccggggugguacagcuucggcuucgagaucaaggacaagaagugcgacgugcccugcaucgggaucgagaugguccacgacggcggcaagaccacguggcacuccgccgccaccgccaucuacugccugauggggagcggccagcugcucugggacaccgugaccgggguggacauggcgcuguga

SEQ ID NO: 93796 - RNA, 1401 nt, Artificial Sequence
  derived and/or modified CDS sequence (opt1) from neuraminidase__InfluenzaB__AGX23516
augcugcccagcaccauccagacccucacgcuguuccugaccuccggcggggugcuccugagccuguacgucuccgccagccucuccuaccugcuguacagcgacauccuccugaaguucucccagaccgagaucaccgccccgaucaugccccuggacugcgcgaacgccagcaacgugcaggccgugaaccgcuccgccgccaagggcgucacgcuccugcugcccgagcccgaguggaccuacccgcggcucagcugccccggguccaccuuccagaaggcgcugcugaucagcccccaccgcuucggcgagaccaaggggaacuccgcgccccucaucauccgggagccguucaucgccugcggccccacggagugcaagcacuucgcccugacccacuacgccgcccagcccggcggguacuacaacggcacccgcgaggaccggaacaagcugcgccaccucaucagcgugaagcuggggaagauccccaccguggagaacuccaucuuccacauggccgccuggagcggcuccgccugccacgacgggaaggaguggacguacaucggcgucgacggcccggacagcaacgcgcugcucaagaucaaguacggggaggccuacaccgacaccuaccacuccuacgccaagaacauccugcggacccaggagagcgccugcaacugcaucggcggggacugcuaccugaugaucacggacggccccgccagcggcguguccgagugccgcuuccucaagauccgggaggggcgcaucaucaaggagaucuuccccaccggccgggugaagcacaccgaggagugcacgugcggguucgcgagcaacaagaccaucgagugcgccugccgcgacaacuccuacaccgccaagcggcccuucgucaagcugaacguggagaccgacaccgccgagauccgccugaugugcacggagaccuaccucgacaccccgcggcccaacgacggcagcaucaccgggcccugcgaguccgacggcgacaagggcagcgggggcaucaagggcggguucgugcaccagcgcauggccuccaagaucgggcggugguacagccgcacgauguccaaggcgaagcggaugggcaugggccuguacgucaaguacgacggggaccccuggaccgacagcgaggcccuggcccucuccggcgugauggugagcauggaggagccggggugguacuccuucggcuucgagaucaaggacaagaagugcgacguccccugcaucgggaucgagauggugcacgacggcggcaagaccaccuggcacagcgccgccacggcgaucuacugccugaugggguccggccagcugcucugggacaccgugaccggggucgacauggcccuguga

SEQ ID NO: 93797 - RNA, 1401 nt, Artificial Sequence; identical to SEQ ID NO: 92812
  derived and/or modified CDS sequence (opt1) from neuraminidase__InfluenzaB__AGX23527

SEQ ID NO: 93798 - RNA, 1401 nt, Artificial Sequence
  derived and/or modified CDS sequence (opt1) from neuraminidase__InfluenzaB__AGX23538
augcugcccagcaccauccagacccucacgcuguuccugaccuccggcggggugcuccugagccuguacgucuccgccagccucuccuaccugcuguacagcgacauccuccugaaguucucccagaccgagaucaccgccccgaucaugccccuggacugcgcgaacgccagcaacgugcaggccgugaaccgcuccgccgccaagggcgucacgcuccugcugcccaagcccgaguggaccuacccgcggcucagcugccccggguccaccuuccagaaggcgcugcugaucagcccccaccgcuucggcgagaccaaggggaacuccgcgccccucaucauccgggagccguucaucgccugcggccccacggagugcaagcacuucgcccugacccacuacgccgcccagcccggcggguacuacaacggcacccgcgaggaccggaacaagcugcgccaccucaucagcgugaagcuggggaagauccccaccguggagaacuccaucuuccacauggccgccuggagcggcuccgccugccacgacgggaaggaguggacguacaucggcgucgacggcccggacagcaacgcgcugcucaagaucaaguacggggaggccuacaccgacaccuaccacuccuacgccaagaacauccugcggacccaggagagcgccugcaacugcaucggcggggacugcuaccugaugaucacggacggccccgccagcggcguguccgagugccgcuuccucaagauccgggaggggcgcaucaucaaggagaucuuccccaccggccgggugaagcacaccgaggagugcacgugcggguucgcgagcaacaagaccaucgagugcgccugccgcgacaacuccuacaccgccaagcggcccuucgucaagcugaacguggagaccgacaccgccgagauccgccugaugugcacggagaccuaccucgacaccccgcggcccaacgacggcagcaucaccgggcccugcgaguccgacggcgacaagggcagcgggggcaucaagggcggguucgugcaccagcgcauggccuccaagaucgggcggugguacagccgcacgauguccaccaccaagcggaugggcaugggccuguacgucaaguacgacggggaccccuggaccgacagcgaggcgcuggcccucuccggcgugauggugagcauggaggagccggggugguacuccuucggcuucgagaucaaggacaagaagugcgacguccccugcaucgggaucgagauggugcacgacggcggcaagacgaccuggcacagcgccgccaccgccaucuacugccugaugggguccggccagcugcucugggacaccgugacgggggucgacauggcgcuguga

SEQ ID NO: 93799 - RNA, 1401 nt, Artificial Sequence
  derived and/or modified CDS sequence (opt1) from neuraminidase__InfluenzaB__AGX23549
augcugcccagcaccauccagacccucacgcuguuccugaccuccggcggggugcuccugagccuguacgucuccgccagccucuccuaccugcuguacagcgacauccuccugaaguucucccagaccgagaucaccgccccgaucaugccccuggacugcgcgaacgccagcaacgugcaggccgugaaccgcuccgccgccaagggcgucacgcuccugcugcccgagcccgaguggaccuacccgcggcucagcugccccggguccaccuuccagaaggcgcugcugaucagcccccaccgcuucggcgagaccaaggggaacuccgcgccccucaucauccgggagccguucaucgccugcggccccacggagugcaagcacuucgcccugacccacuacgccgcccagcccggcggguacuacaacggcacccgcgaggaccggaacaagcugcgccaccucaucagcgugaagcuggggaagauccccaccguggagaacuccaucuuccacauggccgccuggagcggcuccgccugccacgacgggaaggaguggacguacaucggcgucgacggcccggacagcaacgcgcugcucaagaucaaguacggggaggccuacaccgacaccuaccacuccuacgccaagaacauccugcggacccaggagagcgccugcaacugcaucggcggggacugcuaccugaugaucacggacggccccgccagcggcguguccgagugccgcuuccucaagauccgggaggggcgcaucaucaaggagaucuuccccaccggccgggugaagcacaccgaggagugcacgugcggguucgcgagcaacaagaccaucgagugcgccugccgcgacaacuccuacaccgccaagcggcccuucgucaagcugaacguggagaccgacaccgccgagauccgccugaugugcacggagaccuaccucgacaccccgcggcccaacgacggcagcaucaccgggcccugcgaguccgacggcgacaagggcagcgggggcaucaagggcggguucgugcaccagcgcauggccuccaagaucgggcggugguacagccgcacgauguccaccaccaagcggaugggcaugggccuguacgucaaguacgacggggaccccuggaccgacagcgaggcgcuggcccucuccggcgugauggugagcauggaggagccggggugguacuccuucggcuucgagaucaaggacaagaagugcgacguccccugcaucgggaucgagauggugcacgacggcggcaagacgaccuggcacagcgccgccaccgccaucuacugccugaugggguccggccagcugcucugggacaccgugacgggggucgacauggcgcuguga

SEQ ID NO: 93800 - RNA, 1401 nt, Artificial Sequence; identical to SEQ ID NO: 92812
  derived and/or modified CDS sequence (opt1) from neuraminidase__InfluenzaB__AGX23560

SEQ ID NO: 93801 - RNA, 1401 nt, Artificial Sequence; identical to SEQ ID NO: 93794
  derived and/or modified CDS sequence (opt1) from neuraminidase__InfluenzaB__AGX23571

SEQ ID NO: 93802 - RNA, 1401 nt, Artificial Sequence; identical to SEQ ID NO: 93794
  derived and/or modified CDS sequence (opt1) from neuraminidase__InfluenzaB__AGX23582

SEQ ID NO: 93803 - RNA, 1401 nt, Artificial Sequence
  derived and/or modified CDS sequence (opt1) from neuraminidase__InfluenzaB__AGX23593
augcugcccagcaccauccagacccucacgcuguuccugaccuccggcggggugcuccugagccuguacgucuccgccagccucuccuaccugcuguacagcgacauccuccugaaguucucccagaccgagaucaccgccccgaucaugccccuggacugcgcgaacgccagcaacgugcaggccgugaaccgcuccgccgccaagggcgucacgcuccugcugcccgagcccgaguggaccuacccgcggcucagcugccccggguccaccuuccagaaggcgcugcugaucagcccccaccgcuucggcgagaccaaggggaacuccgcgccccucaucauccgggagccguucaucgccugcggccccacggagugcaagcacuucgcccugacccacuacgccgcccagcccggcggguacuacaacggcacccgcgaggaccggaacaagcugcgccaccucaucagcgugaagcuggggaagauccccaccguggagaacuccaucuuccacauggccgccuggagcggcuccgccugccacgacgggaaggaguggacguacaucggcgucgacggcccggacagcaacgcgcugcucaagaucaaguacggggaggccuacaccgacaccuaccacuccuacgccaagaacauccugcggacccaggagagcgccugcaacugcaucggcggggacugcuaccugaugaucacggacggccccgccagcggcaucuccgagugccgcuuccucaagauccgggaggggcgcaucaucaaggagaucuuccccaccggccgggugaagcacaccgaggagugcacgugcggguucgcgagcaacaagaccaucgagugcgccugccgcgacaacuccuacaccgccaagcggcccuucgugaagcugaacgucgagaccgacaccgccgagauccgccugaugugcacggagaccuaccucgacaccccgcggcccaacgacggcagcaucaccgggcccugcgaguccgacggcgacaagggcagcgggggcaucaagggcggguucgugcaccagcgcauggccuccaagaucgggcggugguacagccgcacgauguccaagaccaagcggaugggcaugggccuguacgugaaguacgacggggaccccuggaccgacagcgaggcgcugacccucuccggcgucauggugagcauggaggagccggggugguacuccuucggcuucgagaucaaggacaagaagugcgacgugcccugcaucgggaucgagaugguccacgacggcggcaagacgaccuggcacagcgccgccaccgccaucuacugccugaugggguccggccagcugcucugggacaccgugacggggguggacauggcccuguga

SEQ ID NO: 93804 - RNA, 1401 nt, Artificial Sequence; identical to SEQ ID NO: 92812
  derived and/or modified CDS sequence (opt1) from neuraminidase__InfluenzaB__AGX23604

SEQ ID NO: 93805 - RNA, 1401 nt, Artificial Sequence
  derived and/or modified CDS sequence (opt1) from neuraminidase__InfluenzaB__AGX23615
augcugcccagcaccauccagacccucacgcuguuccugaccuccggcggggugcuccugagccuguacgucuccgccagccucuccuaccugcuguacagcgacauccuccugaaguucucccagaccgagaucaccacgccgaucaugccccuggacugcgccaacgcgagcaacgugcaggccgugaaccgcuccgccgccaagggcgucacccuccugcugcccgagcccgaguggaccuacccgcggcucagcugccccggguccaccuuccagaaggcccugcugaucagcccccaccgcuucggcgagacgaaggggaacuccgcgccccucaucauccgggagccguucaucgccugcggccccaccgagugcaagcacuucgcccugacccacuacgccgcgcagcccggcggguacuacaacggcacccgcgaggaccggaacaagcugcgccaccucaucagcgugaagcuggggaagauccccacgguggagaacuccaucuuccacauggccgccuggagcggcuccgccugccacgacgggaaggaguggaccuacaucggcgucgacggcccggacagcaacgcccugcucaagaucaaguacggggaggcguacaccgacaccuaccacuccuacgccaagaacauccugcggacgcaggagagcgccugcaacugcaucggcggggacugcuaccugaugaucaccgacggccccgccagcggcaucuccgagugccgcuuccucaagauccgggaggggcgcaucaucaaggagaucuuccccaccggccgggugaagcacaccgaggagugcacgugcggguucgccagcaacaagaccaucgagugcgcgugccgcgacaacuccuacaccgccaagcggcccuucgugaagcugaacgucgagaccgacacggccgagauccgccugaugugcaccgagaccuaccucgacaccccgcggcccaacgacggcagcaucacggggcccugcgaguccgacggcgacaagggcagcgggggcaucaagggcggguucgugcaccagcgcauggccuccaagaucgggcggugguacagccgcaccauguccaagaccaagcggaugggcaugggccuguacgugaaguacgacggggaccccuggaccgacagcgaggcccuggcgcucuccggcgucauggugagcauggaggagccggggugguacuccuucggcuucgagaucaaggacaagaagugcgacgugcccugcaucgggaucgagaugguccacgacggcggcaagacgaccuggcacagcgccgccaccgccaucuacugccugaugggguccggccagcugcucugggacaccgugacggggguggacauggcccuguga

SEQ ID NO: 93806 - RNA, 1401 nt, Artificial Sequence; identical to SEQ ID NO: 93794
  derived and/or modified CDS sequence (opt1) from neuraminidase__InfluenzaB__AGX23626

SEQ ID NO: 93807 - RNA, 1401 nt, Artificial Sequence; identical to SEQ ID NO: 93171
  derived and/or modified CDS sequence (opt1) from neuraminidase__InfluenzaB__AGX23637

SEQ ID NO: 93808 - RNA, 1401 nt, Artificial Sequence; identical to SEQ ID NO: 92812
  derived and/or modified CDS sequence (opt1) from neuraminidase__InfluenzaB__AGX23659

SEQ ID NO: 93809 - RNA, 1401 nt, Artificial Sequence; identical to SEQ ID NO: 93171
  derived and/or modified CDS sequence (opt1) from neuraminidase__InfluenzaB__AGX23670

SEQ ID NO: 93810 - RNA, 1401 nt, Artificial Sequence; identical to SEQ ID NO: 93171
  derived and/or modified CDS sequence (opt1) from neuraminidase__InfluenzaB__AGX23681

SEQ ID NO: 93811 - RNA, 1401 nt, Artificial Sequence; identical to SEQ ID NO: 93171
  derived and/or modified CDS sequence (opt1) from neuraminidase__InfluenzaB__AGX23692

SEQ ID NO: 93812 - RNA, 1401 nt, Artificial Sequence; identical to SEQ ID NO: 93171
  derived and/or modified CDS sequence (opt1) from neuraminidase__InfluenzaB__AGX23703

SEQ ID NO: 93813 - RNA, 1401 nt, Artificial Sequence
  derived and/or modified CDS sequence (opt1) from neuraminidase__InfluenzaB__AGX23714
augcugcccagcaccauccagacccucacgcuguuccugaccuccggcggggugcuccugagccuguacgucuccgccagccucuccuaccugcuguacagcgacauccuccugaaguucucccagaccgagaucaccgccccgaucaugccccuggacugcgcgaacgccagcaacgugcaggccgugaaccgcuccgccgccaagggcgucacgcuccugcugcccgagcccgaguggaccuacccgcggcucagcugccccggguccaccuuccagaaggcgcugcugaucagcccccaccgcuucggcgagaccaaggggaacuccgcgccccucaucauccgggagccguucaucgccugcggccccacggagugcaagcacuucgcccugacccacuacgccgcccagcccggcggguacuacaacggcacccgcgaggaccggaacaagcugcgccaccucaucagcgugaagcuggggaagauccccaccguggagaacuccaucuuccacauggccgccuggagcggcuccgccugccacgacgggaaggaguggacguacgucggcguggacggcccggacagcaacgcgcugcucaagaucaaguacggggaggccuacaccgacaccuaccacuccuacgagaagaacauccugcggacccaggagagcgccugcaacugcaucggcggggacugcuaccugaugaucacggacggccccgccagcggcaucuccgagugccgcuuccucaagauccgggaggggcgcaucaucaaggagaucuuccccaccggccgggugaagcacaccgaggagugcacgugcggguucgccagcaacaagaccaucgagugcgcgugccgcgacaacuccuacaccgccaagcggcccuucgucaagcugaacguggagaccgacaccgccgagauccgccugaugugcacggagaccuaccucgacaccccgcggcccaacgacggcagcaucaccgggcccugcggcuccgacggcgacaaggggagcggcgggaucaagggcggguucgugcaccagcgcauggccuccaagaucggccggugguacagccgcacgauguccaagaccaagcggaugggcauggggcuguacgucaaguacgacggcgaccccuggaccgacagcgaggcccuggcgcucuccggggugauggugagcauggacgagccgggcugguacuccuucggguucgagaucaaggacaagaagugcgacguccccugcaucggcaucgagauggugcacgacggcgggaagaccacguggcacagcgccgccaccgccaucuacugccugaugggcuccgggcagcugcucugggacaccgugaccggcgucgacauggcccuguga

SEQ ID NO: 93814 - RNA, 1401 nt, Artificial Sequence; identical to SEQ ID NO: 93171
  derived and/or modified CDS sequence (opt1) from neuraminidase__InfluenzaB__AGX23725

SEQ ID NO: 93815 - RNA, 1401 nt, Artificial Sequence; identical to SEQ ID NO: 93794
  derived and/or modified CDS sequence (opt1) from neuraminidase__InfluenzaB__AGX23736

SEQ ID NO: 93816 - RNA, 1401 nt, Artificial Sequence; identical to SEQ ID NO: 93171
  derived and/or modified CDS sequence (opt1) from neuraminidase__InfluenzaB__AGX23747

SEQ ID NO: 93817 - RNA, 1401 nt, Artificial Sequence; identical to SEQ ID NO: 93171
  derived and/or modified CDS sequence (opt1) from neuraminidase__InfluenzaB__AGX23758

SEQ ID NO: 93818 - RNA, 1401 nt, Artificial Sequence; identical to SEQ ID NO: 93794
  derived and/or modified CDS sequence (opt1) from neuraminidase__InfluenzaB__AGX23769

SEQ ID NO: 93819 - RNA, 1401 nt, Artificial Sequence
  derived and/or modified CDS sequence (opt1) from neuraminidase__InfluenzaB__AGX23780
augcugcccagcaccauccagacccucacgcugcugcucaccuccggcggggugcugcugagccucuacgucuccgccagccuguccuaccugcucuacagcgacauccugcugaaguucucccagaccgagaucaccgccccgaucaugccccucgacugcgcgaacgccagcaacgugcaggccgugaaccgcuccgccgccaagggcgucacgcugcugcuccccgagcccgaguggaccuacccgcggcugagcugccccggguccaccuuccagaaggcgcugcucaucagcccccaccgcuucggcgagaccaaggggaacuccgcgccccugaucauccgggagccguucaucgccugcggccccacggagugcaagcacuucgcccugacccacuacgccgcccagcccggcggguacuacaacggcacccgcgaggaccggaacaagcuccgccaccugaucagcgugaagcuggggaagauccccaccguggagaacuccaucuuccacauggccgccuggagcggcuccgccugccacgacgggaaggaguggacguacaucggcgucgacggcccggacagcaacgcgcuccugaagaucaaguacggggaggccuacaccgacaccuaccacuccuacgccaagaacauccugcggacccaggagagcgccugcaacugcaucggcggggacugcuaccucaugaucacggacggccccgccagcggcguguccgagugccgcuuccugaagauccgggaggggcgcaucaucaaggagaucuuccccaccggccgggugaagcacaccgaggagugcacgugcggguucgcgagcaacaagaccaucgagugcgccugccgcgacaacuccuacaccgccaagcggcccuucgucaagcugaacguggagaccgacaccgccgagauccgccucaugugcacggagaccuaccuggacaccccgcggcccaacgacggcagcaucaccgggcccugcgaguccgacggcgacaagggcagcgggggcaucaagggcggguucgugcaccagcgcauggccuccaagaucgggcggugguacagccgcacgauguccaagaccaagcggaugggcaugggccuguacgucaaguacgacggggaccccuggaccgacagcgaggcgcucgcccuguccggcgugauggugagcauggaggagccggggugguacuccuucggcuucgagaucaaggacaagaagugcgacguccccugcaucgggaucgagauggugcacgacggcggcaagaccacguggcacagcgccgccaccgccaucuacugccugaugggguccggccagcuccugugggacaccgugaccggggucgacauggcgcuguga

SEQ ID NO: 93820 - RNA, 1401 nt, Artificial Sequence
  derived and/or modified CDS sequence (opt1) from neuraminidase__InfluenzaB__AGX23791
augcugcccagcaccauccagacccucacgcuguuccugaccuccggcggggugcuccugagccuguacgucuccgccagccucuccuaccugcuguacagcgacauccuccugaaguucucccagaccgagaucaccgccccgaucaugccccuggacugcgcgaacgccagcaacgcccaggccgugaaccgcuccgccgcgaagggcgugacgcuccugcugcccgagcccgaguggaccuacccgcggcucagcugccccggguccaccuuccagaaggcccugcugaucagcccccaccgcuucggcgagaccaaggggaacuccgcgccccucaucauccgggagccguucaucgccugcggccccacggagugcaagcacuucgcccugacccacuacgccgcccagcccggcggguacuacaacggcacccgcgaggaccggaacaagcugcgccaccucaucagcgucaagcuggggaagauccccaccguggagaacuccaucuuccacauggccgccuggagcggcuccgcgugccacgacgggaaggaguggacguacaucggcguggacggcccggacagcaacgcccugcucaagaucaaguacggggaggccuacaccgacaccuaccacuccuacgccaagaacauccugcggacccaggagagcgccugcaacugcaucggcggggacugcuaccugaugaucacggacggccccgcgagcggcgucuccgagugccgcuuccucaagauccgggaggggcgcaucaucaaggagaucuuccccaccggccgggugaagcacaccgaggagugcacgugcggguucgccagcaacaagaccaucgagugcgccugccgcgacaacuccuacaccgccaagcggcccuucgugaagcugaacgucgagaccgacaccgccgagauccgccugaugugcacggagaccuaccucgacaccccgcggcccaacgacggcagcaucaccgggcccugcgaguccgacggcgacaagggcagcgggggcaucaagggcggguucgugcaccagcgcauggcguccaagaucgggcggugguacagccgcacgauguccaagaccaagcggaugggcaugggccuguacgugaaguacgacggggaccccuggaccgacagcgaggcccuggcccucuccggcgucauggugagcauggaggagccggggugguacuccuucggcuucgagaucaaggacaagaagugcgacgugcccugcaucgggaucgagaugguccacgacggcggcaagaccacguggcacagcgccgccaccgcgaucuacugccugaugggguccggccagcugcucugggacaccgugaccgggguggacauggcccuguga

SEQ ID NO: 93821 - RNA, 1401 nt, Artificial Sequence; identical to SEQ ID NO: 93794
  derived and/or modified CDS sequence (opt1) from neuraminidase__InfluenzaB__AGX23802

SEQ ID NO: 93822 - RNA, 1401 nt, Artificial Sequence; identical to SEQ ID NO: 93794
  derived and/or modified CDS sequence (opt1) from neuraminidase__InfluenzaB__AGX23813

SEQ ID NO: 93823 - RNA, 1401 nt, Artificial Sequence; identical to SEQ ID NO: 93794
  derived and/or modified CDS sequence (opt1) from neuraminidase__InfluenzaB__AGX23824

SEQ ID NO: 93824 - RNA, 1401 nt, Artificial Sequence; identical to SEQ ID NO: 93794
  derived and/or modified CDS sequence (opt1) from neuraminidase__InfluenzaB__AGX23846

SEQ ID NO: 93825 - RNA, 1401 nt, Artificial Sequence; identical to SEQ ID NO: 92812
  derived and/or modified CDS sequence (opt1) from neuraminidase__InfluenzaB__AGX23857

SEQ ID NO: 93826 - RNA, 1401 nt, Artificial Sequence; identical to SEQ ID NO: 93794
  derived and/or modified CDS sequence (opt1) from neuraminidase__InfluenzaB__AGX23868

SEQ ID NO: 93827 - RNA, 1401 nt, Artificial Sequence
  derived and/or modified CDS sequence (opt1) from neuraminidase__InfluenzaB__AGX23879
augcugcccagcaccauccagacccucacgcuguuccugaccuccggcggggugcuccugagccuguacgucuccgccagccucuccuaccugcuguacagcgacauccuccugaaguucucccagaccgagaucaccgccccgaucaugccccuggacugcgcgaacgccagcaacgugcaggccgugaaccgcuccgccgccaagggcgucacgcuccugcugcccgagcccgaguggaccuacccgcggcucagcugccccggguccaccuuccagaaggcgcugcugaucagcccccaccgcuucggcgagaccaaggggaacuccgcgccccucaucauccgggagccguucaucgccugcggccccacggagugcaagcacuucgcccugacccacuacgccgcccagcccggcggguacuacaacggcacccgcgaggaccggaacaagcugcgccaccucaucagcgugaagcuggggaagauccccaccguggagacguccaucuuccacauggccgccuggagcggcuccgccugccacgacgggaaggaguggaccuacaucggcgucgacggcccggacagcaacgcgcugcucaagaucaaguacggggaggccuacaccgacaccuaccacuccuacgccaagaacauccugcggacgcaggagagcgccugcaacugcaucggcggggacugcuaccugaugaucaccgacggccccgccagcggcguguccgagugccgcuuccucaagauccgggaggggcgcaucaucaaggagaucuuccccaccggccgggugaagcacaccgaggagugcacgugcggguucgcgagcaacaagaccaucgagugcgccugccgcgacaacuccuacaccgccaagcggcccuucgucaagcugaacguggagaccgacacggccgagauccgccugaugugcaccgagaccuaccucgacaccccgcggcccaacgacggcagcaucacggggcccugcgaguccgacggcgacaagggcagcgggggcaucaagggcggguucgugcaccagcgcauggccuccaagaucgggcggugguacagccgcaccauguccaagaccaagcggaugggcaugggccuguacgucaaguacgacggggaccccuggaccgacagcgaggcgcuggcccucuccggcgugauggugagcauggaggagccggggugguacuccuucggcuucgagaucaaggacaagaagugcgacguccccugcaucgggaucgagauggugcacgacggcggcaagacgaccuggcacagcgccgccaccgccaucuacugccugaugggguccggccagcugcucugggacaccgugacgggggucgacauggcgcuguga

SEQ ID NO: 93828 - RNA, 1401 nt, Artificial Sequence; identical to SEQ ID NO: 93794
  derived and/or modified CDS sequence (opt1) from neuraminidase__InfluenzaB__AGX23890

SEQ ID NO: 93829 - RNA, 1401 nt, Artificial Sequence; identical to SEQ ID NO: 92812
  derived and/or modified CDS sequence (opt1) from neuraminidase__InfluenzaB__AGX23901

SEQ ID NO: 93830 - RNA, 1401 nt, Artificial Sequence
  derived and/or modified CDS sequence (opt1) from neuraminidase__InfluenzaB__AGX23912
augcugcccagcaccauccagacccucacgcuguuccugaccuccggcggggugcuccugagccuguacgucuccgccagccucuccuaccugcuguacagcgacauccuccugaaguucucccagaccgagaucaccgccccgaucaugccccuggacugcgcgaacgccagcaacgugcaggccgugaaccgcuccgccgccaagggcgucacgcuccugcugcccgagcccgaguggaccuacccgcggcucagcugccccggguccaccuuccagaaggcgcugcugaucagcccccaccgcuucggcgagaccaaggggaacuccgcgccccucaucauccgggagccguucaucgccugcggccccacggagugcaagcacuucgcccugacccacuacgccgcccagcccggcggguacuacaacggcacccgcgaggaccggaaccgccugcggcaccucaucagcgugaagcuggggaagauccccaccguggagaacuccaucuuccacauggccgccuggagcggcuccgccugccacgacgggaaggaguggacguacgucggcguggacggcccggacagcaacgcgcugcucaagaucaaguacggggaggccuacaccgacaccuaccacuccuacgccaagaacauccugcgcacccaggagagcgccugcaacugcaucggcggggacugcuaccugaugaucacggacggccccgccagcggcaucuccgagugccgguuccucaagauccgcgaggggcggaucaucaaggagaucuuccccaccggccgcgugaagcacaccgaggagugcacgugcggguucgcgagcaacaagaccaucgagugcgccugccgggacaacuccuacaccgccaagcgccccuucgucaagcugaacguggagaccgacaccgccgagauccggcugaugugcacggagaccuaccucgacaccccgcgccccaacgacggcagcaucaccgggcccugcggcuccgacggcgacaaggggagcggcgggaucaagggcggguucgugcaccagcggauggccuccaagaucggccgcugguacagccggacgauguccaagaccaagcgcaugggcauggggcuguacgucaaguacgacggcgaccccuggaccgacagcgaggcgcuggcccucuccggggugauggugagcauggacgagccgggcugguacuccuucggguucgagaucaaggacaagaagugcgacguccccugcaucggcaucgagauggugcacgacggcgggaagaccacguggcacagcgccgccaccgccaucuacugccugaugggcuccgggcagcugcucugggacaccgugaccggcgucgacauggcgcuguga

SEQ ID NO: 93831 - RNA, 1401 nt, Artificial Sequence; identical to SEQ ID NO: 92984
  derived and/or modified CDS sequence (opt1) from neuraminidase__InfluenzaB__AGX23934

SEQ ID NO: 93832 - RNA, 1401 nt, Artificial Sequence
  derived and/or modified CDS sequence (opt1) from neuraminidase__InfluenzaB__AGX23945
augcugcccagcaccauccagacccucacgcuguuccugaccuccggcggggugcuccugagccuguacgucuccgccagccucuccuaccugcuguacagcgacauccuccugaaguucucccagaccgagaucaccgccccgaucaugccccuggacugcgcgaacgccagcaacgugcaggccgugaaccgcuccgccgccaagggcgucacgcuccugcugcccgagcccgaguggaccuacccgcggcucagcugccccggguccaccuuccagaaggcgcugcugaucagcccccaccgcuucggcgagaccaaggggaacuccgcgccccucaucauccgggagccguucaucgccugcggccccacggagugcaagcacuucgcccugacccacuacgccgcccagcccggcggguacuacaacggcacccgcgaggaccggaacaagcugcgccaccucaucagcgugaagcuggggaagauccccaccguggagaacuccaucuuccacauggccgccuggagcggcuccgccugccacgacgggaaggaguggacguacgucggcguggacggcccggacagcaacgcgcugcucaagaucaaguacggggaggccuacaccgacaccuaccacuccuacgccaagaacauccugcggacccaggagagcgccugcaacugcaucggcggggacugcuaccugaugaucacggacggccccgccagcggcaucuccgagugccgcuuccucaagauccgggaggggcgcaucaucaaggagaucuuccccaccggccggaucaagcacaccgaggagugcacgugcggguucgcgagcaacaagaccaucgagugcgccugccgcgacaacuccuacaccgccaagcggcccuucgugaagcugaacgucgagaccgacaccgccgagauccgccugaugugcacggagaccuaccucgacaccccgcggcccaacgacggcagcaucaccgggcccugcggcuccgacggcgacaaggggagcggcgggaucaagggcggguucgugcaccagcgcauggccuccaagaucggccggugguacagccgcacgauguccaagaccaagcggaugggcauggggcuguacgugaaguacgacggcgaccccuggaccgacagcgaggcgcuggcccucuccggggucauggugagcauggacgagccgggcugguacuccuucggguucgagaucaaggacaagaagugcgacgugcccugcaucggcaucgagaugguccacgacggcgggaagaccacguggcacagcgccgccaccgccaucuacugccugaugggcuccgggcagcugcucugggacaccgugaccggcguggacauggcgcuguga

SEQ ID NO: 93833 - RNA, 1401 nt, Artificial Sequence
  derived and/or modified CDS sequence (opt1) from neuraminidase__InfluenzaB__AGX23956
augcugcccagcaccauccagacccucacgcuguuccugaccuccggcggggugcuccugagccuguacgucuccgccagccucuccuaccugcuguacagcgacauccuccugaaguucucccagaccgagaucaccgccccgaucaugccccuggacugcgcgaacgccagcaacgugcaggccgugaaccgcuccgccgccaagggcgucacgcuccugcugcccgagcccgaguggaccuacccgcggcucagcugccccggguccaccuuccagaaggcgcugcugaucagcccccaccgcuucggcgagaccaaggggaacuccgcgccccucaucauccgggagccguucaucgccugcggccccacggagugcaagcacuucgcccugacccacuacgccgcccagcccggcggguacuacaacggcacccgcgaggaccggaacaagcugcgccaccucaucagcgugaagcuggggaagauccccaccguggagaacuccaucuuccacauggccgccuggagcggcuccgccugccacgacgggaaggaguggacguacaucggcaucgacggcccggacagcaacgcgcugcucaagaucaaguacggggaggccuacaccgacaccuaccacuccuacgccaagaacauccugcggacccaggagagcgccugcaacugcaucggcggggacugcuaccugaugaucacggacggccccgccagcggcgucuccgagugccgcuuccucaagauccgggaggggcgcaucaucaaggagaucuuccccaccggccgggugaagcacaccgaggagugcacgugcggguucgcgagcaacaagaccaucgagugcgccugccgcgacaacuccuacaccgccaagcggcccuucgugaagcugaacgucgagaccgacaccgccgagauccgccugaugugcacggagaccuaccucgacaccccgcggcccaacgacggcagcaucaccgggcccugcgaguccgacggcgacaagggcagcgggggcaucaagggcggguucgugcaccagcgcauggccuccaagaucgggcggugguacagccgcacgauguccaagaccaagcggaugggcaugggccuguacgugaaguacgacggggaccccuggaccgacagcgaggcgcuggcccucuccggcgucauggugagcauggaggagccggggugguacuccuucggcuucgagaucaaggacaagaagugcgacgugcccugcaucgggaucgagaugguccacgacggcggcaagaccacguggcacagcgccgccaccgccaucuacugccugaugggguccggccagcugcucugggacaccgugaccgggguggacauggcgcuguga

SEQ ID NO: 93834 - RNA, 1401 nt, Artificial Sequence; identical to SEQ ID NO: 93171
  derived and/or modified CDS sequence (opt1) from neuraminidase__InfluenzaB__AGX23967

SEQ ID NO: 93835 - RNA, 1401 nt, Artificial Sequence; identical to SEQ ID NO: 92984
  derived and/or modified CDS sequence (opt1) from neuraminidase__InfluenzaB__AGX23978

SEQ ID NO: 93836 - RNA, 1401 nt, Artificial Sequence
  derived and/or modified CDS sequence (opt1) from neuraminidase__InfluenzaB__AGX23989
augcugcccagcaccauccagacccucacgcuguuccugaccuccggcggggugcuccugagccuguacgucuccgccagccucuccuaccugcuguacagcgacauccuccugaaguucucccagaccgagaucaccgccccgaucaugccccuggacugcgcgaacgccagcaacgugcaggccgugaaccgcuccgccgccaagggcgucacgcuccugcugcccgagcccgaguggaccuacccgcggcucagcugccccggguccaccuuccagaaggcgcugcugaucagcccccaccgcuucggcgagaccaaggggaacuccgcgccccucaucauccgggagccguucaucgccugcggccccacggagugcaagcacuucgcccugacccacuacgccgcccagcccggcggguacuacaacggcacccgcgaggaccggaacaagcugcgccaccucaucagcgugaagcuggggaagauccccaccguggagaacuccaucuuccacauggccgccuggagcggcuccgccugccacgacgggaaggaguggacguacaucggcgucgacggcccggacagcaacgcgcugcucaagaucaaguacggggaggccuacaccgacaccuaccacuccuacgccaagaacauccugcggacccaggagagcgccugcaacugcaucggcggggacugcuaccugaugaucacggacggccccgccagcggcaucuccgagugccgcuuccucaagauccgggaggggcgcaucaucaaggagaucuuccccaccggccgggugaagcacaccgaggagugcacgugcggguucgcgagcaacaagaccaucgagugcgccugccgcgacaaccgguacaccgccaagcgccccuucgugaagcugaacgucgagaccgacaaggccgagauccggcugaugugcaccgagacguaccucgacaccccgcgccccaacgacggcuccaucaccgggcccugcgagagcgacggcgacaagggcuccgggggcaucaagggcggguucgugcaccagcggauggccagcaagaucgggcgcugguacucccggaccaugagcaagacgaagcgcaugggcaugggccuguacgugaaguacgacggggaccccuggaccgacuccggcgcgcuggcccucagcggggucaugguguccaucgaggagccgggcugguacagcuucggguucgagaucaaggacaagaagugcgacgugcccugcaucggcaucgagaugguccacgacggcgggaagaccaccuggcacuccgccgccacggccaucuacugccugaugggcagcgggcagcugcucugggacaccgugaccggcguggacauggcgcuguga

SEQ ID NO: 93837 - RNA, 1401 nt, Artificial Sequence; identical to SEQ ID NO: 93794
  derived and/or modified CDS sequence (opt1) from neuraminidase__InfluenzaB__AGX24000

SEQ ID NO: 93838 - RNA, 1401 nt, Artificial Sequence
  derived and/or modified CDS sequence (opt1) from neuraminidase__InfluenzaB__AGX24011
augcugcccagcaccauccagacccucacgcuguuccugaccuccggcggggugcuccugagccuguacgucuccgccagccucuccuaccugcuguacagcgacauccuccugaaguucucccagaccgagaucaccgccccgaucaugccccuggacuacgcgaacgccagcaacgugcaggccgugaaccacuccgccgccaagggcgucacgcuccugcugcccgagcccgaguggaccuacccgcgccucagcugccccggguccaccuuccagaaggcgcugcugaucagcccccaccgguucggcgagaccaaggggaacuccgcgccccucaucauccgcgagccguucaucgccugcggccccacggagugcaagcacuucgcccugacccacuacgccgcccagcccggcggguacuacaacggcacccgggaggaccgcaacaagcugcggcaccucaucagcgugaagcuggggaagauccccaccguggagaacuccaucuuccacauggccgccuggagcggcuccgccugccacgacgggaaggaguggacguacaucggcgucgacggcccggacagcaacgcgcugcucaagaucaaguacggggaggccuacaucgacaccuaccacuccuacgccaagaacauccugcgcacccaggagagcgccugcaacugcaucggcggggacugcuaccugaugaucaccgacggccccgccagcggcaucuccgagugccgguuccucaagauccgcgaggggcggaucaucaaggagaucuuccccacgggccgcgugaagcacaccgaggagugcacgugcggguucgcgagcaacaagaccaucgagugcgccugccgggacaacuccuacaccgccaagcgccccuucgugaagcugaacgucgagaccgacaccgccgagauccggcugaugugcaccgagacguaccucgacaccccgcgccccaacgacggcagcaucaccgggcccugcgaguccgacggcgacaagggcagcgggggcaucaagggcggguucgugcaccagcggauggccuccaagaucgggcgcugguacagccggaccauguccaagacgaagcgcaugggcaugggccuguacgugaaguacgacggggaccccuggaccgacagcgaggcgcuggcccucuccggcgucauggugagcauggaggagccggggugguacuccuucggcuucgagaucaaggacaagaagugcgacgugcccugcaucgggaucgagaugguccacgacggcggcaagaccaccuggcacagcgccgccacggccaucuacugccugaugggguccggccagcugcucugggacaccgugaccgggguggacauggcgcuguga

SEQ ID NO: 93839 - RNA, 1401 nt, Artificial Sequence; identical to SEQ ID NO: 92984
  derived and/or modified CDS sequence (opt1) from neuraminidase__InfluenzaB__AGX24022

SEQ ID NO: 93840 - RNA, 1401 nt, Artificial Sequence
  derived and/or modified CDS sequence (opt1) from neuraminidase__InfluenzaB__AGX24033
augcugcccagcaccauccagacccucacgcuguuccugaccuccggcggggugcuccugagccuguacgucuccgccagccucuccuaccugcuguacagcgacauccuccugaaguucucccagaccgagaucaccgcccagaucaugccgcuggacugcgcgaacgccagcaacgugcaggccgugaaccgcuccgccgccaagggcgucacgcuccugcugcccgagcccgaguggaccuacccccggcucagcugcccgggguccaccuuccagaaggcgcugcugaucagcccccaccgcuucggcgagaccaaggggaacuccgcgccccucaucauccgggagcccuucaucgccugcggcccgacggagugcaagcacuucgcccugacccacuacgccgcccagcccggcggguacuacaacggcacccgcgaggaccggaacaagcugcgccaccucaucagcgugaagcuggggaagauccccaccguggagaacuccaucuuccacauggccgccuggagcggcuccgccugccacgacgggaaggaguggacguacaucggcgucgacggccccgacagcaacgcgcugcucaagaucaaguacggggaggccuacaccgacaccuaccacuccuacgccaagaacauccugcggacccaggagagcgccugcaacugcaucggcggggacugcuaccugaugaucacggacggcccggccagcggcaucuccgagugccgcuuccucaagauccgggaggggcgcaucaucaaggagaucuuccccaccggccgggugaagcacaccgaggagugcacgugcggguucgcgagcaacaagaccaucgagugcgccugccgcgacaaccgguacaccgccaagcgccccuucgugaagcugaacgucgagaccgacaaggccgagauccggcugaugugcaccgagacguaccucgacacgccccgcccgaacgacggcuccaucaccgggcccugcgagagcgacggcgacaagggcuccgggggcaucaagggcggguucgugcaccagcggauggccagcaagaucgggcgcugguacucccggaccaugagcaagaccaagcgcaugggcaugggccuguacgugaaguacgacggggaccccuggaccgacuccggcgcgcuggcccucagcggggucaugguguccaucgaggagcccggcugguacagcuucggguucgagaucaaggacaagaagugcgacgugccgugcaucggcaucgagaugguccacgacggcgggaagaccaccuggcacuccgccgccacggccaucuacugccugaugggcagcgggcagcugcucugggacaccgugaccggcguggacauggcgcuguga

SEQ ID NO: 93841 - RNA, 1401 nt, Artificial Sequence; identical to SEQ ID NO: 92984
  derived and/or modified CDS sequence (opt1) from neuraminidase__InfluenzaB__AGX24044

SEQ ID NO: 93842 - RNA, 1401 nt, Artificial Sequence
  derived and/or modified CDS sequence (opt1) from neuraminidase__InfluenzaB__AGX24055
augcugcccagcaccauccagacccucacgcuguuccugaccuccggcggggugcuccugagccuguacgucuccgccagccucuccuaccugcuguacagcgacauccuccugaaguucucccagaccgagaucaccgccccgaucaugccccuggacugcgcgaacgccagcaacgugcaggccgugaaccgcuccgccacgaagggcgucacccuccugcugcccgagcucgaguggaccuacccccggcugagcugcccgggguccaccuuccagaaggcccugcucaucagcccccaccgcuucggcgagacgaaggggaacuccgcgccccugaucauccgggagcccuucguggccugcggcccgaccgagugcaagcacuucgcccugacccacuacgccgcgcagcccggcggguacuacaacggcacccgcgaggaccggaacaagcuccgccaccugaucagcgugaagcuggggaagauccccacggucgagaacuccaucuuccacauggccgccuggagcggcuccgccugccacgacgggaaggaguggaccuacaucggcguggacggccccaacagcaacgcccuccugaagaucaaguacggggaggcguacaccgacaccuaccacuccuacgccaagaacauccugcggacgcaggagagcgccugcaacugcaucggcggggacugcuaccucaugaucaccgacggcccggccagcggcguguccgagugccgcuuccugaagauccgggaggggcgcaucaucaaggagaucuuccccaccggccgggucaagcacaccgaggagugcacgugcggguucgccagcaacaagaccaucgagugcgcgugccgcgacaacuccuacaccgccaagcggcccuucgugaagcugaacguggagaccgacacggccgagauccgccucaugugcaccgagaccuaccuggacacgccccggccgaacgacggcagcaucaccgggcccugcgaguccgacggcgacaagggcagcgggggcaucaagggcggguucguccaccagcgcauggccuccaagaucgggcggugguacagccgcaccauguccaagaccaagcggaugggcaugggccuguacgugaaguacgacggggaccccuggaccgacagcgaggcccucgcgcuguccggcgugauggucagcauggaggagcccgggugguacuccuucggcuucgagaucaaggacaagaagugcgacgugccgugcaucgggaucgagauggugcacgacggcggcaagacgaccuggcacagcgccgccaccgccaucuacugccugaugggguccggccagcuccugugggacaccgucacggggguggacauggcccuguga

SEQ ID NO: 93843 - RNA, 1401 nt, Artificial Sequence; identical to SEQ ID NO: 92841
  derived and/or modified CDS sequence (opt1) from neuraminidase__InfluenzaB__AGX24066

SEQ ID NO: 93844 - RNA, 1401 nt, Artificial Sequence
  derived and/or modified CDS sequence (opt1) from neuraminidase__InfluenzaB__AGX24077
augcugcccagcaccauccagacccucacgcuguuccugaccuccggcggggugcuccugagccuguacgucuccgccagccucuccuaccugcuguacagcgacauccuccugaaguucucccagaccgagaucaccgccccgaucaugccccuggacugcgcgaacgccagcaacgugcaggccgugaaccgcuccgccgccaagggcgucacgcuccugcugcccgagcccgaguggaccuacccgcggcucagcugccccggguccaccuuccagaaggcgcugcugaucagcccccaccgcuucggcgagaccaaggggaacuccgcgccccucaucauccgggagccguucaucgccugcggccccacggagugcaagcacuucgcccugacccacuacgccgcccagcccggcggguacuacaacggcacccgcgaggaccggaacaagcugcgccaccucaucagcgugaagcuggggaagauccccaccguggagaacuccaucuuccacauggccgccuggagcggcuccgccugccacgacgggaaggaguggacguacaucggcgucgacggcccggacagcaacgcgcugcucaagaucaaguacggggaggccuacaccgacaccuaccacuccuacgccaagaacauccugcggacccaggagagcgccugcaacugcaucggcgggaacugcuaccugaugaucacggacggccccgccagcggcaucuccgagugccgcuuccucaagauccgggaggggcgcaucaucaaggagaucuuccccaccggccgggugaagcacaccgaggagugcacgugcggguucgcgagcaacaagaccaucgagugcgccugccgcgacaaccgguacaccgccaagcgccccuucgugaagcugaacgucgagaccgacaaggccgagauccggcugaugugcaccgagacguaccucgacaccccgcgccccaacgacggcuccaucaccgggcccugcgagagcgacggcgacaagggcuccgggggcaucaagggcggguucgugcaccagcggauggccagcaagaucgggcgcugguacucccggaccaugagcaagacgaagcgcaugggcaugggccuguacgugaaguacgacggggaccccugggcggacuccggcgcccuggcccucagcggggucaugguguccaucgaggagccgggcugguacagcuucggguucgagaucaaggacaagaagugcgacgugcccugcaucggcaucgagaugguccacgacggcgggaagaccaccuggcacuccgccgccaccgcgaucuacugccugaugggcagcgggcagcugcucugggacacggugaccggcguggacauggcccuguga

SEQ ID NO: 93845 - RNA, 1401 nt, Artificial Sequence
  derived and/or modified CDS sequence (opt1) from neuraminidase__InfluenzaB__AGX24088
augcugcccagcaccauccagacccucacgcuguucaucaccuccggcggggugcugcucagccuguacgucuccgccagccuguccuaccuccuguacagcgacauccugcucaaguucucccagaccgagaucaccgccccgaucaugccccuggacugcgcgaacgccagcaacgugcaggccgugaaccgcuccgccgccaagggcgucacgcugcuccugcccgagcccgaguggaccuacccgcggcugagcugccccggguccaccuuccagaaggcgcuccugaucagcccccaccgcuucggcgagaccaaggggaacuccgcgccccugaucauccgggagccguucaucgccugcggccccacggagugcaagcacuucgcccucacccacuacgccgcccagcccggcggguacuacaacggcacccgcgaggaccggaacaagcugcgccaccugaucagcgugaagcucgggaagauccccaccguggagaacuccaucuuccacauggccgccuggagcggcuccgccugccacgacgggaaggaguggacguacgucggcguggacggcccggacagcgacgcgcugcugaagaucaaguacggggaggccuacaccgacaccuaccacuccuacgccaagaacauccuccggacccaggagagcgccugcaacugcaucggcggggacugcuaccugaugaucacggacggccccgccagcggcaucuccgagugccgcuuccugaagauccgggaggggcgcaucaucaaggagaucuuccccaccggccgggugaagcacaccgaggagugcacgugcggguucgcgagcaacaagaccaucgagugcgccugccgcgacaacuccuacaccgccaagcggcccuucgucaagcucaacguggagaccgacaccgccgagauccgccugaugugcacggagaccuaccuggacaccccgcggcccaacgacggcagcaucaccgggcccugcggcuccgacggcgacaaggggagcggcgggaucaagggcggguucgugcaccagcgcauggccuccaagaucggccggugguacagccgcacgauguccaagaccaagcggaugggcauggggcucuacgucaaguacgacggcgaccccuggaccgacagcgaggcgcuggcccuguccggggugauggugagcauggacgagccgggcugguacuccuucggguucgagaucaaggacaagaagugcgacguccccugcaucggcaucgagauggugcacgacggcgggaagaccacguggcacagcgccgccaccgccaucuacugccucaugggcuccgggcagcugcugugggacaccgugaccggcgucgacauggcgcucuga

SEQ ID NO: 93846 - RNA, 1401 nt, Artificial Sequence; identical to SEQ ID NO: 92984
  derived and/or modified CDS sequence (opt1) from neuraminidase__InfluenzaB__AGX24099

SEQ ID NO: 93847 - RNA, 1401 nt, Artificial Sequence
  derived and/or modified CDS sequence (opt1) from neuraminidase__InfluenzaB__AGX24110
augcugcccagcaccauccagacccucacgcuguuccugaccuccggcggggugcuccugagccuguacgucuccgccagccucuccuaccugcuguacagcgacauccuccugaaguucucccagaccgagaucaccgccccgaucaugccccuggacugcgcgaacgccagcaacgugcaggccgugaaccgcuccgccgccaagggcgucacgcuccugcugcccgagcccgaguggaccuacccgcggcucagcugccccggguccaccuuccagaaggcgcugcugaucagcccccaccgcuucggcgagaccaaggggaacuccgcgccccucaucauccgggagccguucaucgccugcggccccacggagugcaagcacuucgcccugacccacuacgccgcccagcccggcggguacuacaacggcacccgcgaggaccggaacaagcugcgccaccucaucagcgugaagcuggggaagauccccaccguggagaacuccaucuuccacauggccgccuggagcggcuccgccugccacgacgggaaggaguggacguacgucggcguggacggcccggacagcaacgcgcugcucaagaucaaguacggggaggccuacaccgacaccuaccacuccuacgccaagaacauccugcggacccaggagagcgccugcaacugcaucggcggggacugcuaccugaugaucacggacggccccgccagcggcaucuccgagugccgcuuccucaagauccgggaggggcgcaucaucaaggagaucuuccccaccggccgggugaagcacaccgaggagugcacgugcggguucgcgagcaacaagaccaucgagugcacgugccgcgacaacuccuacaccgccaagcggcccuucgucaagcugaacguggagaccgacaccgccgagauccgccugaugugcaccgagaccuaccucgacaccccgcggcccaacgacggcagcaucacggggcccugcggcuccgacggcgacaaggggagcggcgggaucaagggcggguucgugcaccagcgcauggccuccaagaucggccggugguacagccgcaccauguccaagaccaagcggaugggcauggggcuguacgucaaguacgacggcgaccccuggaccgacagcgaggcccuggcgcucuccggggugauggugagcauggacgagccgggcugguacuccuucggguucgagaucaaggacaagaagugcgacguccccugcaucggcaucgagauggugcacgacggcgggaagacgaccuggcacagcgccgccaccgccaucuacugccugaugggcuccgggcagcugcucugggacaccgugacgggcgucgacauggcccuguga

SEQ ID NO: 93848 - RNA, 1401 nt, Artificial Sequence
  derived and/or modified CDS sequence (opt1) from neuraminidase__InfluenzaB__AGX24121
augcugcccagcaccauccagacccucacgcuguuccugaccuccggcggggugcuccugagccuguacgucuccgccagccucuccuaccugcuguacagcgacauccuccugaaguucucccagaccgagaucaccgccccgaucaugccccuggacuacgcgaacgccagcaacgugcaggccgugaaccacuccgccgccaagggcgucacgcuccugcugcccgagcccgaguggaccuacccgcgccucagcugccccggguccaccuuccagaaggcgcugcugaucagcccccaccgguucggcgagaccaaggggaacuccgcgccccucaucauccgcgagccguucaucgccugcggccccacggagugcaagcacuucgcccugacccacuacgccgccaagcccggcggguacuacaacggcacccgggaggaccgcaacaagcugcggcaccucaucagcgugaagcuggggaagauccccaccguggagaacuccaucuuccacauggccgccuggagcggcuccgccugccacgacgggaaggaguggacguacaucggcgucgacggcccggacagcaacgcgcugcucaagaucaaguacggggaggccuacaccgacaccuaccacuccuacgccaagaacauccugcgcacccaggagagcgccugcaacugcaucggcggggacugcuaccugaugaucacggacggccccgccagcggcaucuccgagugccgguuccucaagauccgcgaggggcggaucaucaaggagaucuuccccaccggccgcgugaagcacaccgaggagugcacgugcggguucgcgagcaacaagaccaucgagugcgccugccgggacaacuccuacaccgccaagcgccccuucgugaagcugaacgucgagaccgacaccgccgagauccggcugaugugcacggagaccuaccucgacaccccgcgccccaacgacggcagcaucaccgggcccugcgaguccgacggcgacaagggcagcgggggcaucaagggcggguucgugcaccagcggauggccuccaagaucgggcgcugguacagccggacgauguccaagaccaagcgcaugggcaugggccuguacgugaaguacgacggggaccccuggaccgacagcgaggcgcuggcccucuccggcgucauggugagcauggaggagccggggugguacuccuucggcuucgagaucaaggacaagaagugcgacgugcccugcaucgggaucgagaugguccacgacggcggcaagaccacguggcacagcgccgccaccgccaucuacugccugaugggguccggccagcugcucugggacaccgugaccgggguggacauggcgcuguga

SEQ ID NO: 93849 - RNA, 1401 nt, Artificial Sequence
  derived and/or modified CDS sequence (opt1) from neuraminidase__InfluenzaB__AGX24132
augcugcccagcaccauccagacccucacgcuguuccugaccuccggcggggugcuccugagccuguacgucuccgccagccucuccuaccugcuguacagcgacauccuccugaaguucucccgcaccgagaucaccgccccgaucaugccccuggacugcgcgaacgccagcaacgugcaggccgugaaccgguccgccacgaagggcgucacccucccccugcccgagccggaguggaccuacccccgccugagcugccccggguccaccuuccagaaggcccuccugaucagcccccaccgguucggcgagacgaaggggaacuccgcgccgcugaucauccgcgagcccuucaucgccugcggccccaaggagugcaagcacuucgcccucacccacuacgccgcgcagcccggcggguacuacaacggcacccgggaggaccgcaacaagcugcggcaccugaucagcgugaagcucgggaagaucccgaccguggagaacuccaucuuccacauggccgccuggagcggcuccgccugccacgacgggcgcgaguggacguacaucggcgucgacggccccgacagcaacgcccugcugaagaucaaguacggggaggcguacaccgacaccuaccacuccuacgccaagaacauccuccggacccaggagagcgccugcaacugcaucggcggggacugcuaccugaugaucacggacggccccgcccugggcaucagcgagugccgcuuccucaagauccgggaggggcgcaucaucaaggagaucuuccccaccggccgggugaagcacaccgaggagugcacgugcggguucgccuccaacaagaccaucgagugcgcgugccgcgacaacagcuacaccgccaagcggccguucgugaagcugaacgucgagaccgacaccgccgagauccgccugaugugcacggagaccuaccucgacacgccccggcccaacgacggcuccaucaccgggcccugcgagagcaacggcgacaagggcuccgggggcaucaagggcggguucgugcaccagcgcauggccagcaagaucgggcggugguacucccgcaccaugagcaagaccaagcggaugggcaugggccuguacgugaaguacgacggggacccguggaccgacuccgaggcccuggcgcucagcggcgucaugguguccauggaggagcccgggugguacagcuucggcuucgagaucaaggacaagaagugcgacgugcccugcaucgggaucgagaugguccacgacggcggcaagaccacguggcacuccgccgccaccgccaucuacugccugauggggagcggccagcugcucugggacaccgugaccggggugaacaugacgcuguga

SEQ ID NO: 93850 - RNA, 1401 nt, Artificial Sequence
  derived and/or modified CDS sequence (opt1) from neuraminidase__InfluenzaB__AGX24143
augcugcccagcaccauccagacccucacgcuguuccugaccuccggcggggugcuccugagccuguacgucuccgccagccucuccuaccugcuguacagcgacauccuccugaaguucucccagaccgagaucaccgccccgaucaugccccuggacugcgcgaacgccagcaacgugcaggccgugaaccgcuccgccgccaagggcgucacgcuccugcugcccgagcccgaguggaccuacccgcggcucagcugccccggguccaccuuccagaaggcgcugcugaucagcccccaccgcuucggcgagaccaaggggaacuccgcgccccucaucauccgggagccguucaucgccugcggccccacggagugcaagcacuucgcccugacccacuacgccgcccagcccggcggguacuacaacggcacccgcgaggaccggaacaagcugcgccaccucaucagcgugaagcuggggaagauccccaccguggagaacuccaucuuccacauggccgccuggagcggcuccgccugccacgacgggaaggaguggacguacaucggcgucgacggcccggacgggaacgcgcugcucaagaucaaguacggcgaggccuacaccgacaccuaccacagcuacgccaagaacauccugcggacccaggaguccgccugcaacugcaucgggggcgacugcuaccugaugaucacggacggccccgccagcgggaucagcgagugccgcuuccucaagauccgggagggccgcaucaucaaggagaucuuccccaccgggcgggugaagcacaccgaggagugcacgugcggcuucgcguccaacaagaccaucgagugcgccugccgcgacaacagcuacaccgccaagcggcccuucgugaagcugaacgucgagaccgacaccgccgagauccgccugaugugcacggagaccuaccucgacaccccgcggcccaacgacggguccaucaccggccccugcgagagcgacggcgacaagggguccggcgggaucaagggcggguucgugcaccagcgcauggccagcaagaucggccggugguacucccgcacgaugagcaagaccaagcggaugggcauggggcuguacgugaaguacgacggcgaccccuggaccgacuccgaggcgcuggcccucagcggggucaugguguccauggaggagccgggcugguacagcuucggguucgagaucaaggacaagaagugcgacgugcccugcaucggcaucgagaugguccacgacggcgggaagaccacguggcacuccgccgccaccgccaucuacugccugaugggcagcgggcagcugcucugggacaccgugaccggcguggacauggcgcuguga

SEQ ID NO: 93851 - RNA, 1401 nt, Artificial Sequence; identical to SEQ ID NO: 92984
  derived and/or modified CDS sequence (opt1) from neuraminidase__InfluenzaB__AGX24154

SEQ ID NO: 93852 - RNA, 1401 nt, Artificial Sequence
  derived and/or modified CDS sequence (opt1) from neuraminidase__InfluenzaB__AGX24165
augcugcccagcaccauccagacccucacgcuguuccugaccuccggcggggugcuccugagccuguacgucuccgccagccucuccuaccugcuguacagcgacauccuccugaaguucucccagaccgagaucaccgccccgaucaugccccuggacuacgcgaacgccagcaacgugcaggccgugaaccacuccgccgccaagggcgucacgcuccugcugcccgagcccgaguggaccuacccgcgccucagcugccccggguccaccuuccagaaggcgcugcugaucagcccccaccgguucggcgagaccaaggggaacuccgcgccccucaucauccgcgagccguucaucgccugcggccccacggagugcaagcacuucgcccugacccacuacgccgcccagcccggcggguacuacaacggcacccgggaggaccgcaacaagcugcggcaccucaucagcgugaagcuggggaagauccccaccguggagaacuccaucuuccacauggccgccuggagcggcuccgccugccacgacgggaaggaguggacguacaucggcgucgacggcccggacagcaacgcgcugcucaagaucaaguacggggaggccuacaccgacaccuaccacuccuacgccaagaacauccugcgcacccaggagagcgccugcaacugcaucggcggggacugcuaccugaugaucacggacggccccgccagcggcaucuccgagugccgguuccucaagauccgcgaggggcggaucaucaaggagaucuuccccaccggccgcgugaagcacaccgaggagugcacgugcggguucgcgagcaacaagaccaucgagugcgccugccgggacaacuccuacaccgccaagcgccccuucgugaagcugaacgucgagaccgacaccgccgagauccggcugaugugcacggagaccuaccucgacaccccgcgccccaacgacggcagcaucaccgggcccugcgaguccgacggcgacaagggcagcgggggcaucaagggcggguucgugcaccagcggauggccuccaagaucgggcgcugguacagccggacgauguccaagaccaagcgcaugggcaugggccuguacgugaaguacgacggggaccccuggaccgacagcgaggcgcuggcccucaacggcgucaugguguccauggaggagccggggugguacagcuucggcuucgagaucaaggacaagaagugcgacgugcccugcaucgggaucgagaugguccacgacggcggcaagaccacguggcacuccgccgccaccgccaucuacugccugauggggagcggccagcugcucugggacaccgugaccgggguggacauggcgcuguga

SEQ ID NO: 93853 - RNA, 1401 nt, Artificial Sequence; identical to SEQ ID NO: 92841
  derived and/or modified CDS sequence (opt1) from neuraminidase__InfluenzaB__AGX24176

SEQ ID NO: 93854 - RNA, 1401 nt, Artificial Sequence; identical to SEQ ID NO: 92841
  derived and/or modified CDS sequence (opt1) from neuraminidase__InfluenzaB__AGX24187

SEQ ID NO: 93855 - RNA, 1401 nt, Artificial Sequence; identical to SEQ ID NO: 92841
  derived and/or modified CDS sequence (opt1) from neuraminidase__InfluenzaB__AGX24198

SEQ ID NO: 93856 - RNA, 1401 nt, Artificial Sequence; identical to SEQ ID NO: 93171
  derived and/or modified CDS sequence (opt1) from neuraminidase__InfluenzaB__AGX24231

SEQ ID NO: 93857 - RNA, 1401 nt, Artificial Sequence; identical to SEQ ID NO: 92841
  derived and/or modified CDS sequence (opt1) from neuraminidase__InfluenzaB__AGX24242

SEQ ID NO: 93858 - RNA, 1401 nt, Artificial Sequence
  derived and/or modified CDS sequence (opt1) from neuraminidase__InfluenzaB__AGX24275
augcugcccagcaccauccagacccucacgcuguuccugaccuccggcggggugcuccugagccuguacgucuccgccagccucuccuaccugcuguacagcgacauccuccugaaguucucccagaccgagaucaccgccccgaucaugccccuggacugcgcgaacgccagcaacgugcaggccgugaaccgcuccgccgccaagggcgucacgcuccugcugcccgagcccgaguggaccuacccgcggcucagcugccccggguccaccuuccagaaggcgcugcugaucagcccccaccgcuucggcgagaccaaggggaacuccgcgccccucaucauccgggagccguucaucgccugcggccccacggagugcaagcacuucgcccugacccacuacgccgcccagcccggcggguacuacaacggcacccgcgaggaccggaacaagcugcgccaccucaucagcgugaagcuggggaagauccccaccguggagaacuccaucuuccacauggccgccuggagcggcuccgccugccacgacgggaaggaguggacguacaucggcgucgacggcccggacagcaacgcgcugcucaagaucaaguacggggaggccuacaccgacaccuaccacuccuacgccaagaacauccugcggacccaggagagcgccugcaacugcaucggcggggacugcuaccugaugaucacggacggccccgccagcggcaucuccgagugccgcuuccucaagauccgggaggggcgcaucaucaaggagaucuuccccaccggccgggugaagcacaccgaggagugcacgugcggguucgcgagcaaccgcaccaucgagugcgccugccgggacaacuccuacaccgccaagcgccccuucgugaagcugaacgucgagaccgacaccgccgagauccggcugaugugcacggagaccuaccucgacaccccgcgccccaacgacggcagcaucaccgggcccugcgaguccgacggcgacaagggcagcgggggcaucaagggcggguucgugcaccagcggauggccuccaagaucgggcgcugguacagccggacgauguccaagacccgccggaugggcaugggccuguacgugaaguacgacggggaccccuggaccgacagcgaggcgcuggcccucuccggcgucauggugagcauggaggagccggggugguacuccuucggcuucgagaucaaggacaagaagugcgacgugcccugcaucgggaucgagaugguccacgacggcggcaagaccacguggcacagcgccgccaccgccaucuacugccugaugggguccggccagcugcucugggacaccgugaccgggguggacauggcgcuguga

SEQ ID NO: 93859 - RNA, 1401 nt, Artificial Sequence; identical to SEQ ID NO: 93436
  derived and/or modified CDS sequence (opt1) from neuraminidase__InfluenzaB__AGX24286

SEQ ID NO: 93860 - RNA, 1401 nt, Artificial Sequence
  derived and/or modified CDS sequence (opt1) from neuraminidase__InfluenzaB__AGX24297
augcugcccagcaccauccagacccucacgcuguuccugaccuccggcggggugcuccugagccuguacgucuccgccagccucuccuaccugcuguacagcgacauccuccugaaguucucccagaccgagaucaccgccccgaucaugccccuggacugcgcgaacgccagcaacgugcaggccgugaaccgcuccgccgccaagggcgucacgcuccugcugcccgagcccgaguggaccuacccgcggcucagcugccccggguccaccuuccagaaggcgcugcugaucagcccccaccgcuucggcgagacccgggggaacuccgcgccccucaucauccgcgagccguucaucgccugcggccccacggagugcaagcacuucgcccugacccacuacgccgcccagcccggcggguacuacaacggcacccgggaggaccgcaacaagcugcggcaccucaucagcgugaagcuggggaagauccccaccguggagaacuccaucuuccacauggccgccuggagcggcuccgccugccacgacgggaaggaguggacguacaucggcgucgacggcccggacagcaacgcgcugcucaagaucaaguacggggaggccuacaccgacaccuaccacuccuacgccaagaacauccugcgcacccaggagagcgccugcaacugcaucggcggggacugcuaccugaugaucacggacggccccgccagcggcaucuccgagugccgguuccucaagauccgcgaggggcggaucaucaaggagaucuuccccaccggccgcgugaagcacaccgaggagugcacgugcggguucgcgagcaacaagaccaucgagugcgccugccgggacaacuccuacaccgccaagcgccccuucgugaagcugaacgucgagaccgacaccgccgagauccggcugaugugcacggagaccuaccucgacaccccgcgccccaacgacggcagcaucaccgggcccugcgaguccgacggcgacaagggcagcgggggcaucaagggcggguucgugcaccagcggauggccuccaagaucgggcgcugguacagccggacgauguccaagaccaagcgcaugggcaugggccuguacgugaaguacgacggggaccccuggaccgacagcgaggcgcuggcccucuccggcgucauggugagcauggaggagccggggugguacuccuucggcuucgagaucaaggacaagaagugcgacgugcccugcaucgggaucgagaugguccacgacggcggcaagaccacguggcacagcgccgccaccgccaucuacugccugaugggguccggccagcugcucugggacaccgugaccgggguggacauggcgcuguga

SEQ ID NO: 93861 - RNA, 1401 nt, Artificial Sequence; identical to SEQ ID NO: 93436
  derived and/or modified CDS sequence (opt1) from neuraminidase__InfluenzaB__AGX24319

SEQ ID NO: 93862 - RNA, 1401 nt, Artificial Sequence
  derived and/or modified CDS sequence (opt1) from neuraminidase__InfluenzaB__AGX24330
augcugcccagcaccauccagacccucacgcuguuccugaccuccggcggggugcuccugagccuguacgucuccgccagccucuccuaccugcuguacagcgacauccuccugaaguucucccagaccgagaucaccgccccgaucaugccccuggacuacgcgaacgccagcaacgugcaggccgugaaccacuccgccgccaagggcgucacgcuccugcugcccgagcccgaguggaccuacccgcgccucagcugccccggguccaccuuccagaaggcgcugcugaucagcccccaccgguucggcgagaccaaggggaacuccgcgccccucaucauccgcgagccguucaucgccugcggccccacggagugcaagcacuucgcccugacccacuacgccgcccagcccggcggguacuacaacggcacccgggaggaccgcaacaagcugcggcaccucaucagcgugaagcuggggaagauccccaccguggagaacuccaucuuccacauggccgccuggagcggcuccgccugccacgacgggaaggaguggacguacaucggcgucgacggcccggacagcaacgcgcugcucaagaucaaguacggggaggccuacaccgacaccuaccacuccuacgccaagaacauccugcgcacccaggagagcgccugcaacugcaucggcggggacugcuaccugaugaucacggacggccccgccagcggcaucuccgagugccgguuccucaagauccgcgaggggcggaucaucaaggagaucuuccccaccggccgcgugaagcacaccgaggagugcacgugcggguucgcgagcaacaagaccaucgagugcacgugccgggacaacuccuacaccgccaagcgccccuucgugaagcugaacgucgagaccgacaccgccgagauccggcugaugugcaccgagaccuaccucgacaccccgcgccccaacgacggcagcaucacggggcccugcgaguccgacggcgacaagggcagcgggggcaucaagggcggguucgugcaccagcggauggccuccaagaucgggcgcugguacagccggaccauguccaagaccaagcgcaugggcaugggccuguacgugaaguacgacggggaccccuggaccgacagcgaggcccuggcgcucuccggcgucaugaucagcauggaggagccggggugguacuccuucggcuucgagaucaaggacaagaagugcgacgugcccugcaucgggaucgagauggugcacgacggcggcaagacgaccugguacagcgccgccaccgccaucuacugccugaugggguccggccagcugcucugggacaccgucacggggguggacauggcccuguga

SEQ ID NO: 93863 - RNA, 1401 nt, Artificial Sequence
  derived and/or modified CDS sequence (opt1) from neuraminidase__InfluenzaB__AGX24341
augcugcccagcaccauccagacccucacgcuguuccugaccuccggcggggugcuccugagccuguacgucuccgccagccucuccuaccugcuguacagcgacauccuccugaaguucucccgcaccgagaucaccgccccgaucaugccccuggacugcgcgaacgccagcaacgugcaggccgugaaccgguccgccacgaagggcgucacccuccugcugcccgagcccgaguggaccuacccgcgccucagcugccccggguccaccuuccagaaggcccugcugaucagcccccaccgguucggcgagacgaaggggaacuccgcgccccucaucauccgcgagccguucaucgccugcggccccaaggagugcaagcacuucgcccugacccacuacgccgcgcagcccggcggguacuacaacggcacccgggaggaccgcaacaagcugcggcaccucaucagcgugaagcuggggaagauccccaccguggagaacuccaucuuccacauggccgccuggagcggcuccgccugccacgacgggcgcgaguggacguacaucggcgucgacggcccggacagcaacgcccugcucaagaucaaguacggggaggcguacaccgacaccuaccacuccuacgccaagaacauccugcggacccaggagagcgccugcaacugcaucggcggggacugcuaccugaugaucacggacggccccgccagcggcaucuccgagugccgcuuccucaagauccgggaggggcgcaucaucaaggagaucuuccccaccggccgggugaagcacaccgaggagugcacgugcggguucgccagcaacaagaccaucgagugcgcgugccgcgacaacuccuacaccgccaagcggcccuucgugaagcugaacgucgagaccgacaccgccgagauccgccugaugugcacggagaccuaccucgacaccccgcggcccaacgacggcagcaucaccgggcccugcgaguccaacggcgacaagggcagcgggggcaucaagggcggguucgugcaccagcgcauggccuccaagaucgggcggugguacagccgcacgauguccaagaccaagcggaugggcaugggccuguacgugaaguacgacggggaccccuggaccgacagcgaggcccugacccucuccggcgucauggugagcauggaggagccggggugguacuccuucggcuucgagaucaaggacaagaagugcgacgugcccugcaucgggaucgagaugguccacgacggcggcaagacgaccuggcacagcgcggccaccgccaucuacugccugaugggguccggccagcugcucugggacaccgugacgggggugaacaugacccuguga

SEQ ID NO: 93864 - RNA, 1401 nt, Artificial Sequence
  derived and/or modified CDS sequence (opt1) from neuraminidase__InfluenzaB__AGX24352
augcugcccagcaccauccagacccucacgcuguuccugaccuccggcggggugcuccugagccuguacgucuccgccagccucuccuaccugcuguacagcgacauccuccugaaguucucccgcaccgagaucaccgccccgaucaugccccuggacugcgcgaacgccagcaacgugcaggccgugaaccgguccgccacgaagggcgucacccuccugcugcccgagcccgaguggaccuacccgcgccucagcugccccggguccaccuuccagaaggcccugcugaucagcccccaccgguucggcgagacgaaggggaacuccgcgccccucaucauccgcgagccguucaucgccugcggccccaaggagugcaagcacuucgcccugacccacuacgccgcgcagcccggcggguacuacaacggcacccgggaggaccgcaacaagcugcggcaccucaucagcgugaagcuggggaagauccccaccguggagaacuccaucuuccacauggccgccuggagcggcuccgccugccacgacgggcgcgaguggacguacaucggcgucgacggcccggacaacaacgcccugcucaagaucaaguacggggaggcguacaccgacaccuaccacagcuacgccaagaacauccugcggacccaggaguccgccugcaacugcaucggcggggacugcuaccugaugaucacggacggccccgccagcggcaucagcgagugccgcuuccucaagauccgggaggggcgcaucaucaaggagaucuuccccaccggccgggugaagcacaccgaggagugcacgugcggguucgccuccaacaagaccaucgagugcgcgugccgcgacaacagcuacaccgccaagcggcccuucgugaagcugaacgucgagaccgacaccgccgagauccgccugaugugcacggagaccuaccucgacaccccgcggcccaacgacggcuccaucaccgggcccugcgagagcaacggcgacaagggcuccgggggcaucaagggcggguucgugcaccagcgcauggccagcaagaucgggcggugguacucccgcacgaugagcaagaccaagcggaugggcaugggccuguacgugaaguacgacggggaccccuggaccgacuccgaggcccuggcgcucagcggcgucaugguguccauggaggagccggggugguacagcuucggcuucgagaucaaggacaagaagugcgacgugcccugcaucgggaucgagaugguccacgacggcggcaagaccacguggcacuccgccgccaccgccaucuacugccugauggggagcggccagcugcucugggacaccgugaccggggugaacaugacgcuguga

SEQ ID NO: 93865 - RNA, 1401 nt, Artificial Sequence; identical to SEQ ID NO: 93860
  derived and/or modified CDS sequence (opt1) from neuraminidase__InfluenzaB__AGX24363

SEQ ID NO: 93866 - RNA, 1401 nt, Artificial Sequence; identical to SEQ ID NO: 93864
  derived and/or modified CDS sequence (opt1) from neuraminidase__InfluenzaB__AGX24374

SEQ ID NO: 93867 - RNA, 1401 nt, Artificial Sequence
  derived and/or modified CDS sequence (opt1) from neuraminidase__InfluenzaB__AGX24385
augcugcccagcaccauccagacccucacgcuguuccugaccuccggcggggugcuccugagccuguacgucuccgccagccucuccuaccugcuguacagcgacauccuccugaaguucucccgcaccgagaucaccgccccgacgaugccccuggacugcgcgaacgccagcaacgugcaggccgugaaccgguccgccaccaagggcgucacccuccugcugcccgagcccgaguggaccuacccgcgccucagcugccccggguccacguuccagaaggcccugcugaucagcccccaccgguucggcgagaccaaggggaacuccgcgccccucaucauccgcgagccguucaucgccugcggccccaaggagugcaagcacuucgcccugacccacuacgccgcgcagcccggcggguacuacaacggcacccgggaggaccgcaacaagcugcggcaccucaucagcgugaagcuggggaagauccccacgguggagaacuccaucuuccacauggccgccuggagcggcuccgccugccacgacgggcgcgaguggaccuacaucggcgucgacggcccggacagcaacgcccugcucaagaucaaguacggggaggcguacaccgacaccuaccacuccuacgccaagaacauccugcggacgcaggagagcgccugcaacugcaucggcggggacugcuaccugaugaucaccgacggccccgccagcggcaucuccgagugccgcuuccucaagauccgggaggggcgcaucaucaaggagaucuuccccaccggccgggugaagcacaccgaggagugcacgugcggguucgccagcaacaagaccaucgagugcgcgugccgcgacaacuccuacaccgccaagcggcccuucgugaagcugaacgucgagaccgacacggccgagauccgccugaugugcaccgagaccuaccucgacaccccgcggcccaacgacggcagcaucacggggcccugcgaguccaacggcgacaagggcagcgggggcaucaagggcggguucgugcaccagcgcauggccuccaagaucgggcggugguacagccgcaccauguccaagaccaagcggaugggcaugggccuguacgugaaguacgacggggaccccuggaccgacagcgaggcccuggcgcucuccggcgucauggugagcauggaggagccggggugguacuccuucggcuucgagaucaaggacaagaagugcgacgugcccugcaucgggaucgagaugguccacgacggcggcaagacgaccuggcacagcgccgccaccgccaucuacugccugaugggguccggccagcugcucugggacaccgugacgggggugaacaugacccuguga

SEQ ID NO: 93868 - RNA, 1401 nt, Artificial Sequence
  derived and/or modified CDS sequence (opt1) from neuraminidase__InfluenzaB__AGX24396
augcugcccagcaccauccagacccucacgcuguuccugaccuccggcggggugcuccugagccuguacgucuccgccagccucuccuaccugcuguacagcgacauccuccugaaguucucccagaccgagaucaccgccccgaucaugccccuggacugcgcgaacgccagcaacgugcaggccgugaaccgcuccgccgccaagggcgucacgcuccugcugcccgagcccgaguggaccuacccgcggcucagcugccccggguccaccuuccagaaggcgcugcugaucagcccccaccgcuucggcgagaccaaggggaacuccgcgccccucaucauccgggagccguucaucgccugcggccccacggagugcaagcacuucgcccugacccacuacgccgcccagcccggcggguacuacaacggcacccgcgaggaccggaacaagcugcgccaccucaucagcgugaagcuggggaagauccccaccguggagaacuccaucuuccacauggccgccuggagcggcuccgccugccacgacgggaaggaguggacguacaucggcgucgacggcccggacagcaacgcgcugcucaagaucaaguacggggaggccuacaccgacaccuaccacuccuacgccaagaacauccugcggacccaggagagcgccugcaacugcaucggcggggacugcuaccugaugaucacggacggccccgccagcggcaucuccgagugccgcuuccucaagauccgggaggggcgcaucaucaaggagaucuuccccaccggccgggugaagcacaccgaggagugcacgugcggguucgcgagcaacaagaccaucgagugcgccugccgcgacaaccgguacaccgccaagcgccccuucgugaagcugaacgucgagaccgacaccgccgagauccggcugaugugcacggagaccuaccucgacaccccgcgccccaacgacggcuccaucaccgggcccugcgagagcgacggcgacaagggcuccgggggcaucaagggcggguucgugcaccagcggauggccagcaagaucgggcgcugguacucccggacgaugagcaagaccaagcgcaugggcaugggccuguacgugaaguacgacggggaccccuggaccgacuccggcgcgcuggcccucagcggggucaugguguccaucgaggagccgggcugguacagcuucggguucgagaucaaggacaagaagugcgacgugcccugcaucggcaucgagaugguccacgacggcgggaagaccacguggcacuccgccgccaccgccaucuacugccugaugggcagcgggcagcugcucugggacaccgugaccggcguggacauggcgcuguga

SEQ ID NO: 93869 - RNA, 1401 nt, Artificial Sequence; identical to SEQ ID NO: 93868
  derived and/or modified CDS sequence (opt1) from neuraminidase__InfluenzaB__AGX24407

SEQ ID NO: 93870 - RNA, 1401 nt, Artificial Sequence; identical to SEQ ID NO: 92841
  derived and/or modified CDS sequence (opt1) from neuraminidase__InfluenzaB__AGX24418

SEQ ID NO: 93871 - RNA, 1401 nt, Artificial Sequence; identical to SEQ ID NO: 92812
  derived and/or modified CDS sequence (opt1) from neuraminidase__InfluenzaB__AGX24429

SEQ ID NO: 93872 - RNA, 1401 nt, Artificial Sequence
  derived and/or modified CDS sequence (opt1) from neuraminidase__InfluenzaB__AGX24440
augcugcccagcaccauccagacccucacgcuguuccugaccuccggcggggugcuccugagccuguacgucuccgccagccucuccuaccugcuguacagcgacauccuccugaaguucucccagaccgagaucaccgccccgaucaugccccuggacugcgcgaacgccagcaacgugcaggccgugaaccgcuccgccgccaagggcgucacgcuccugcugcccgagcccgaguggaccuacccgcggcucagcugccccggguccaccuuccagaaggcgcugcugaucagcccccaccgcuucggcgagaccaaggggaacuccgcgccccucaucauccgggagccguucaucgccugcggcacgaccgagugcaagcacuucgcccugacccacuacgccgcccagcccggcggguacuacaacggcacccgcgaggaccggaacaagcugcgccaccucaucagcgugaagcuggggaagauccccacgguggagaacuccaucuuccacauggccgccuggagcggcuccgccugccacgacgggaaggaguggaccuacaucggcgucgacggccccgacagcaacgcgcugcucaagaucaaguacggggaggccuacaccgacaccuaccacuccuacgccaagaacauccugcggacgcaggagagcgccugcaacugcaucggcggggacugcuaccugaugaucaccgacggcccggccagcggcaucuccgagugccgcuuccucaagauccgggaggggcgcaucaucaaggagaucuuccccaccggccgggugaagcacaccgaggagugcacgugcggguucgcgagcaacaagaccaucgagugcgccugccgcgacaaccgguacaccgccaagcgccccuucgugaagcugaacgucgagaccgacacggccgagauccggcugaugugcaccgagaccuaccucgacacgccccgcccgaacgacggcuccaucaccgggcccugcgagagcgacggcgacaagggcuccgggggcaucaagggcggguucgugcaccagcggauggccagcaagaucgggcgcugguacucccggaccaugagcaagaccaagcgcaugggcaugggccuguacgugaaguacgacggggaccccuggaccgacuccggcgcgcuggcccucagcggggucaugguguccaucgaggagcccggcugguacagcuucggguucgagaucaaggacaagaagugcgacgugccgugcaucggcaucgagaugguccacgacggcgggaagacgaccuggcacuccgccgccaccaccaucuacugccugaugggcagcgggcagcugcucugggacacggugaccggcguggacauggcccuguga

SEQ ID NO: 93873 - RNA, 1401 nt, Artificial Sequence; identical to SEQ ID NO: 93436
  derived and/or modified CDS sequence (opt1) from neuraminidase__InfluenzaB__AGX24451

SEQ ID NO: 93874 - RNA, 1401 nt, Artificial Sequence
  derived and/or modified CDS sequence (opt1) from neuraminidase__InfluenzaB__AGX24462
augcugcccagcaccauccagacccucacgcuguuccugaccuccggcggggugcuccugagccuguacgucuccgccagccucuccuaccugcuguacagcgacauccuccugaaguucucccagaccgagaucaccgccccgaucaugccccuggacuacgcgaacgccagcaacgugcaggccgugaaccacuccgccgccaagggcgucacgcuccugcugcccgagcccgaguggaccuacccgcgccucagcugccccggguccaccuuccagaaggcgcugcugaucagcccccaccgguucggcgagaccaaggggaacuccgcgccccucaucauccgcgagccguucaucgccugcggccccacggagugcaagcacuucgcccugacccacuacgccgcccagcccggcggguacuacaacggcacccgggaggaccgcaacaagcugcggcaccucaucagcgugaagcuggggaagauccccaccguggagaacuccaucuuccacauggccgccuggagcggcuccgccugccacgacgggaaggaguggacguacaucggcgucgacggcccggacagcaacgcgcugcucaagaucaaguacggggaggccuacaccgacaccuaccacuccuacgccaagaacauccugcgcacccaggagagcgccugcaacugcaucggcggggacugcuaccugaugaucacggacggccccgccagcggcaucuccgagugccgguuccucaagauccgcgaggggcggaucaucaaggagaucuuccccaccggccgcgugaagcacaccgaggagugcacgugcggguucgcgagcaacaagaccaucgagugcgccugccgggacaacuccuacaccgccaagcgccccuucgugaagcugaacgucgagaccgacaccgccgagauccggcugaugugcacggagaccuaccucgacaccccgcgccccaacgacggcagcaucaccgggcccugcgaguccgacggcgacaagggcagcgggggcaucaagggcggguucgugcaccagcggauggccuccaagaucgggcgcugguacagccggacgauguccaagaccaagcgcaugggcaugggccuguacgugaaguacgacggggaccccuggaccgacagcgaggcgcuggcccucuccggcgucaugaucagcauggaggagccggggugguacuccuucggcuucgagaucaaggacaagaagugcgacgugcccugcaucgggaucgagauggugcacgacggcggcaagaccacguggcacagcgccgccaccgccaucuacugccugaugggguccggccagcugcucugggacaccgucaccgggguggacauggcgcuguga

SEQ ID NO: 93875 - RNA, 1401 nt, Artificial Sequence; identical to SEQ ID NO: 93874
  derived and/or modified CDS sequence (opt1) from neuraminidase__InfluenzaB__AGX24473

SEQ ID NO: 93876 - RNA, 1401 nt, Artificial Sequence
  derived and/or modified CDS sequence (opt1) from neuraminidase__InfluenzaB__AGX24484
augcugcccagcaccauccagacccucacgcuguuccugaccuccggcggggugcuccugagccuguacgucuccgccagccucuccuaccugcuguacagcgacauccuccugaaguucucccagaccgagaucaccgccccgaucaugccccuggacugcgcgaacgccagcaacgugcaggccgugaaccgcuccgccgccaagggcgucacgcuccugcugcccgagcccgaguggaccuacccgcggcucagcugccccggguccaccuuccagaaggcgcugcugaucagcccccaccgcuucggcgagaccaaggggaacuccgcgccccucaucauccgggagccguucaucgccugcggccccacggagugcaagcacuucgcccugacccacuacgccgcccagcccggcggguacuacaacggcacccgcgaggaccggaacaagcugcgccaccucaucagcgugaagcuggggaagauccccaccguggagaacuccaucuuccacauggccgccuggagcggcuccgccugccacgacgggaaggaguggacguacaucggcgucgacggcccggacagcaacgcgcugcucaagaucaaguacggggaggccuacaccgacaccuaccacuccuacgccaagaacauccugcggacccaggagagcgccugcaacugcaucggcggggacugcuaccugaugaucacggacggccccgccagcggcaucuccgagugccgcuuccucaagauccgggaggggcgcaucaucaaggagaucuuccccaccggccgggugaagcacaccgaggagugcacgugcggguucgcgagcaacaagaccaucgagugcgccugccgcgacaacggcuacaccgccaagcggcccuucgugaagcugaacgucgagaccgacaccgccgagauccgccugaugugcacggagaccuaccucgacaccccgcggcccaacgacggguccaucaccggccccugcgagagcgacggcgacaagggguccggcgggaucaagggcggguucgugcaccagcgcauggccagcaagaucggccggugguacucccgcacgaugagcaagacccggcgcaugggcauggggcuguacgugaaguacgacggcgaccccuggaccgacuccgaggcgcuggcccucagcggggucaugguguccauggaggagccgggcugguacagcuucggguucgagaucaaggacaagaagugcgacgugcccugcaucggcaucgagaugguccacgacggcgggaagaccacguggcacuccgccgccaccgccaucuacugccugaugggcagcgggcagcugcucugggacaccgugaccggcguggacauggcgcuguga

SEQ ID NO: 93877 - RNA, 1401 nt, Artificial Sequence
  derived and/or modified CDS sequence (opt1) from neuraminidase__InfluenzaB__AGX24495
augcugcccagcaccauccagacccucacgcuguuccugaccuccggcggggugcuccugagccuguacgucuccgccagccucuccuaccugcuguacagcgacauccuccugaaguucucccagaccgagaucaccgccccgaucaugccccuggacugcgcgaacgccagcaacguccagguggugaaccgcuccgccgccaagggcgugacgcuccugcugcccgagcccgaguggaccuacccgcggcucagcugccccggguccaccuuccagaaggcccugcugaucagcccccaccgcuucggcgagaccaaggggaacuccgcgccccucaucauccgggagccguucaucgccugcggccccacggagugcaagcacuucgcccugacccacuacgccgcgcagcccggcggguacuacaacggcacccgcgaggaccggaacaagcugcgccaccucaucagcgugaagcuggggaagauccccaccgucgagaacuccaucuuccacauggccgccuggagcggcuccgccugccacgacgggaaggaguggacguacaucggcguggacggcccggacagcaacgcccugcucaagaucaaguacggggaggcguacaccgacaccuaccacuccuacgccaagaacauccugcggacccaggagagcgccugcaacugcaucggcggggacugcuaccugaugaucacggacggccccgccagcggcaucuccgagugccgcuuccucaagauccgggaggggcgcaucaucaaggagaucuuccccaccggccgggugaagcacaccgaggagugcacgugcggguucgccagcaacaagaccaucgagugcgcgugccgcgacaacuccuacaccgccaagcggcccuucgucaagcugaacguggagaccgacaccgccgagauccgccugaugugcacggagaccuaccucgacaccccgcggcccaacgacggcagcaucaccgggcccugcgaguccgacggcgacaagggcagcgggggcaucaagggcggguucgugcaccagcgcauggccuccaagaucgggcggugguacagccgcacgauguccaagacccggcgcaugggcaugggccuguacgucaaguacgacggggaccccuggaccgacagcgaggcccuggcgcucuccggcgugauggugagcauggaggagccggggugguacuccuucggcuucgagaucaaggacaagaagugcgacguccccugcaucgggaucgagauggugcacgacggcggcaagaccacguggcacagcgccgccaccgccaucuacugccugaugggguccggccagcugcucugggacaccgugaccggggucgacauggcccuguga

SEQ ID NO: 93878 - RNA, 1401 nt, Artificial Sequence; identical to SEQ ID NO: 93436
  derived and/or modified CDS sequence (opt1) from neuraminidase__InfluenzaB__AGX24506

SEQ ID NO: 93879 - RNA, 1401 nt, Artificial Sequence
  derived and/or modified CDS sequence (opt1) from neuraminidase__InfluenzaB__AGX24517
augcugcccagcaccauccagacccucacgcuguuccugaccuccggcggggugcuccugagccuguacgucuccgccagccucuccuaccugcuguacagcgacauccuccugaaguucucccagaccgagaucaccgccccgaucaugccccuggacugcgcgaacgccagcaacgugcaggccgugaaccacuccgccgccaagggcgucacgcuccugcugcccgagcccgaguggaccuacccgcgccucagcugccccggguccaccuuccagaaggcgcugcugaucagcccccaccgguucggcgagaccaaggggaacuccgcgccccucaucauccgcgagccguucaucgccugcggccccacggagugcaagcacuucgcccugacccacuacgccgcccagcccggcggguacuacaacggcacccgggaggaccgcaacaagcugcggcaccucaucagcgugaagcuggggaagauccccaccguggagaacuccaucuuccacauggccgccuggagcggcuccgccugccacgacgggaaggaguggacguacaucggcgucgacggcccggacagcaacgcgcugcucaagaucaaguacggggaggccuacaccgacaccuaccacuccuacgccaagaacauccugcgcacccaggagagcgccugcaacugcaucggcggggacugcuaccugaugaucacggacggccccgccagcggcguguccgagugccgguuccucaagauccgcgaggggcggaucaucaaggagaucuuccccaccggccgcgugaagcacaccgaggagugcacgugcggguucgcgagcaacaagaccaucgagugcgccugccgggacaacuccuacaccgccaagcgccccuucgucaagcugaacguggagaccgacaccgccgagauccggcugaugugcacggagaccuaccucgacaccccgcgccccaacgacggcagcaucaccgggcccugcgaguccgacggcgacaagggcagcgggggcaucaagggcggguucgugcaccagcggauggccuccaagaucgggcgcugguacagccggacgauguccaagaccaagcgcaugggcaugggccuguacgucaaguacgacggggaccccuggaccgacagcgaggcgcuggcccucuccggcgugauggugagcauggaggagccggggugguacuccuucggcuucgagaucaaggacaagaagugcgacguccccugcaucgggaucgagauggugcacgacggcggcaagaccacguggcacagcgccgccaccgccaucuacugccugaugggguccggccagcugcucugggacaccgugaccggggucgacauggcgcuguga

SEQ ID NO: 93880 - RNA, 1401 nt, Artificial Sequence; identical to SEQ ID NO: 93436
  derived and/or modified CDS sequence (opt1) from neuraminidase__InfluenzaB__AGX24528

SEQ ID NO: 93881 - RNA, 1401 nt, Artificial Sequence; identical to SEQ ID NO: 93864
  derived and/or modified CDS sequence (opt1) from neuraminidase__InfluenzaB__AGX24539

SEQ ID NO: 93882 - RNA, 1401 nt, Artificial Sequence
  derived and/or modified CDS sequence (opt1) from neuraminidase__InfluenzaB__AGX24550
augcugcccagcaccauccagacccucacgcuguuccugaccuccggcggggugcuccugagccuguacgucuccgccagccucuccuaccugcuguacagcgacauccuccugaaguucucccagaccgagaucaccgccccgaucaugccccuggacugcgcgaacgccagcaacgugcaggccgugaaccgcuccgccgccaagggcgucacgcuccugauccccgagcccgaguggaccuacccgcggcugagcugccccggguccaccuuccagaaggcgcuccugaucagcccccaccgcuucggcgagaccaaggggaacuccgcgccccugaucauccgggagccguucaucgccugcggccccacggagugcaagcacuucgcccucacccacuacgccgcccagcccggcggguacuacaacggcacccgcgaggaccggaacaagcugcgccaccugaucagcgugaagcucgggaagauccccaccguggagaacuccaucuuccacauggccgccuggagcggcuccgccugccacgacgggaaggaguggacguacaucggcgucgacggcccggacagcaacgcgcugcugaagaucaaguacggggaggccuacaccgacaccuaccacuccuacgccaagaacauccuccggacccaggagagcgccugcaacugcaucggcggggacugcuaccugaugaucacggacggccccgccagcggcaucuccgagugccgcuuccugaagauccgggaggggcgcaucaucaaggagaucuuccccaccggccgggugaagcacaccgaggagugcacgugcggguucgcgagcaacaagaccaucgagugcgccugccgcgacaacuccuacaccgccaagcggcccuucgugaagcucaacgucgagaccgacaccgccgagauccgccugaugugcacggagaccuaccuggacaccccgcggcccaacgacggcagcaucaccgggcccugcgaguccgacggcgacaagggcagcgggggcaucaagggcggguucgugcaccagcgcauggccuccaagaucgggcggugguacagccgcacgauguccaagaccaagcggaugggcaugggccucuacgugaaguacgacggggaccccuggaccgacagcgaggcgcuggcccuguccggcgucauggugagcauggaggagccggggugguacuccuucggcuucgagaucaaggacaagaagugcgacgugcccugcaucgggaucgagaugguccacgacggcggcaagaccacguggcacagcgccgccaccgccaucuacugccucaugggguccggccagcugcugugggacaccgugaccgggguggacauggcgcucuga

SEQ ID NO: 93883 - RNA, 1401 nt, Artificial Sequence; identical to SEQ ID NO: 93874
  derived and/or modified CDS sequence (opt1) from neuraminidase__InfluenzaB__AGX24561

SEQ ID NO: 93884 - RNA, 1401 nt, Artificial Sequence; identical to SEQ ID NO: 92841
  derived and/or modified CDS sequence (opt1) from neuraminidase__InfluenzaB__AGX24572

SEQ ID NO: 93885 - RNA, 1401 nt, Artificial Sequence
  derived and/or modified CDS sequence (opt1) from neuraminidase__InfluenzaB__AGX24583
augcugcccagcaccauccagacccucacgcuguuccugaccuccggcggggugcuccugagccuguacgucuccgccagccucuccuaccugcuguacagcgacauccuccugaaguucucccagaccgagaucaccgccccgaucaugccccuggacugcgcgaacgccagcaacgugcaggccgugaaccgcuccgccgccaagggcgucacgcuccugcugcccgagcccgaguggaccuacccgcggcucagcugccccggguccaccuuccagaaggcgcugcugaucagcccccaccgcuucggcgagaccaaggggaacuccgcgccccucaucauccgggagccguucaucgccugcggccccacggagugcaagcacuucgcccugacccacuacgccgcccagcccggcggguacuacaacggcacccgcgaggaccggaacaagcugcgccaccucaucagcgugaagcuggggaagauccccaccguggagaacuccaucuuccacauggccgccuggagcggcuccgccugccacgacgggaaggaguggacguacaucggcgucgacggcccggacagcaacgcgcugcucaagaucaaguacggggaggccuacaccgacaccuaccacuccuacgccaagaacauccugcggacccaggagagcgccugcaacugcaucggcggggacugcuaccugaugaucacggacggccccgccagcggcaucuccgagugccgcuuccucaagauccgggaggggcgcaucaucaaggagaucuuccccaccggccgggugaagcacaccgaggagugcacgugcggguucgcgagcaacaagaccaucgagugcgccugccgcgacaacuccuacaccgccaagcggcccuucgugaagcugaacgucgagaccgacaccgccgagauccgccugaugugcacggagaccuaccucgacaccccgcggcccaacgacggcagcaucaccgggcccugcgaguccgacggcgacaagggcagcgggggcaucaagggcggguucgugcaccagcgcauggccuccaagaucgggcggugguacagccgcacgauguccaagacccggcgcaugggcaugggccuguacgugaaguacgacggggaccccuggaccgacagcggcgcgcuggcccucuccggggucauggugagcaucgaggagccgggcugguacuccuucggguucgagaucaaggacaagaagugcgacgugcccugcaucggcaucgagaugguccacgacggcgggaagaccacguggcacagcgccgccaccgccaucuacugccugaugggcuccgggcagcugcucugggacaccgugaccggcguggacauggcgcuguga

SEQ ID NO: 93886 - RNA, 1401 nt, Artificial Sequence; identical to SEQ ID NO: 93436
  derived and/or modified CDS sequence (opt1) from neuraminidase__InfluenzaB__AGX24594

SEQ ID NO: 93887 - RNA, 1401 nt, Artificial Sequence; identical to SEQ ID NO: 93436
  derived and/or modified CDS sequence (opt1) from neuraminidase__InfluenzaB__AGX24605

SEQ ID NO: 93888 - RNA, 1401 nt, Artificial Sequence; identical to SEQ ID NO: 93436
  derived and/or modified CDS sequence (opt1) from neuraminidase__InfluenzaB__AGX24616

SEQ ID NO: 93889 - RNA, 1401 nt, Artificial Sequence; identical to SEQ ID NO: 93860
  derived and/or modified CDS sequence (opt1) from neuraminidase__InfluenzaB__AGX24627

SEQ ID NO: 93890 - RNA, 1401 nt, Artificial Sequence; identical to SEQ ID NO: 93436
  derived and/or modified CDS sequence (opt1) from neuraminidase__InfluenzaB__AGX24638

SEQ ID NO: 93891 - RNA, 1401 nt, Artificial Sequence
  derived and/or modified CDS sequence (opt1) from neuraminidase__InfluenzaB__AGX24660
augcugcccagcaccauccagacccucacgcuguuccugaccuccggcggggugcuccugagccuguacgucuccgccagccucuccuaccugcuguacagcgacauccuccugaaguucucccgcaccgagaucaccgccccgaucaugccccuggacugcgcgaacgccagcaacgugcaggccgugaaccgguccgccacgaagggcgucacccuccugcugcccgagcccgaguggaccuacccgcgccucagcugccccggguccaccuuccagaaggcccugcugaucagcccccaccgguucggcgagacgaaggggaacuccgcgccccucaucauccgcgagccguucaucgccugcggccccaaggagugcaagcacuucgcccugaccuacuacgccgcgcagcccggcggguacuacaacggcacccgggaggaccgcaacaagcugcggcaccucaucagcgugaagcuggggaagauccccaccguggagaacuccaucuuccacauggccgccuggagcggcuccgccugccacgacgggcgcgaguggacguacaucggcgucgacggcccggacagcaacgcccugcucaagaucaaguacggggaggcguacaccgacaccuaccacuccuacgccaagaacauccugcggacccaggagagcgccugcaacugcaucggcggggacugcuaccugaugaucacggacggccccgccagcggcaucuccgagugccgcuuccucaagauccgggaggggcgcaucaucaaggagaucuuccccaccggccgggugaagcacaccgaggagugcacgugcggguucgccagcaacaagaccaucgagugcgcgugccgcgacaacuccuacaccgccaagcggcccuucgugaagcugaacgucgagaccgacaccgccgagauccgccugaugugcacggagaccuaccucgacaccccgcggcccaacgacggcagcaucaccgggcccugcgaguccaacggcgacaagggcagcgggggcaucaagggcggguucgugcaccagcgcauggccuccaagaucgggcggugguacagccgcacgauguccaagaccaagcggaugggcaugggccuguacgugaaguacgacggggaccccuggaccgacagcgaggcccuggcgcucuccggcgucauggugagcauggaggagccggggugguacuccuucggcuucgagaucaaggacaagaagugcgacgugcccugcaucgggaucgagaugguccacgacggcggcaagaccacguggcacagcgccgccaccgccaucuacugccugaugggguccggccagcugcucugggacaccgugaccggggugaacaugacgcuguga

SEQ ID NO: 93892 - RNA, 1401 nt, Artificial Sequence
  derived and/or modified CDS sequence (opt1) from neuraminidase__InfluenzaB__AGX24671
augcugcccagcaccauccagacccucacgcuguuccugaccuccggcggggugcuccugcugcucuacgucagcgccucccugagcuaccugcucuacuccgacauccugcugaaguucagccagaccgagaucaccgccccgaucaugccccucgacugcgcgaacgccuccaacgugcaggccgugaaccgcagcgccgccaagggcgucacgcugcugcuccccgagcccgaguggaccuacccgcggcuguccugccccgggagcaccuuccagaaggcgcugcucaucagcccccaccgcuucggcgagaccaaggggaacuccgcgccccugaucauccgggagccguucaucgccugcggccccacggagugcaagcacuucgcccugacccacuacgccgcccagcccggcggguacuacaacggcacccgcgaggaccggaacaagcuccgccaccugaucuccgugaagcuggggaagauccccaccguggagaacagcaucuuccacauggccgccugguccggcagcgccugccacgacgggaaggaguggacguacaucggcgucgacggcccggacuccaacgcgcuccugaagaucaaguacggggaggccuacaccgacaccuaccacagcuacgccaagaacauccugcggacccaggaguccgccugcaacugcaucggcggggacugcuaccucaugaucacggacggccccgccagcggcaucagcgagugccgcuuccugaagauccgggaggggcgcaucaucaaggagaucuuccccaccggccgggugaagcacaccgaggagugcacgugcggguucgcguccaacaagaccaucgagugcgccugccgcgacaacagcuacaccgccaagcggcccuucgugaagcugaacgucgagaccgacaccgccgagauccgccucaugugcacggagaccuaccuggacaccccgcggcccaacgacggcuccaucaccgggcccugcgagagcgacggcgacaagggcuccgggggcaucaagggcggguucgugcaccagcgcauggccagcaagaucgggcggugguacucccgcacgaugagcaagaccaagcggaugggcaugggccuguacgugaaguacgacggggaccccuggaccgacuccgaggcgcucgcccugagcggcgucaugguguccauggaggagccggggugguacagcuucggcuucgagaucaaggacaagaagugcgacauccccugcaucgggaucgagauggugcacgacggcggcaagaccacguggcacuccgccgccaccgccaucuacugccugauggggagcggccagcuccugugggacaccgucaccgggguggacauggcgcuguga

SEQ ID NO: 93893 - RNA, 1401 nt, Artificial Sequence
  derived and/or modified CDS sequence (opt1) from neuraminidase__InfluenzaB__AGX24682
augcugcccagcaccauccagacccucacgcuguuccugaccuccggcggggugcuccugagccuguacgucuccgccagccucuccuaccugcuguacagcgacauccuccugaaguucucccgcaccgagaucaccgccccgaucaugccccuggacugcgcgaacgccagcaacgugcaggccgugaaccgguccgccacgaagggcgucacccuccugcugcccgagcccgaguggaccuacccgcgccucagcugccccggguccaccuuccagaaggcccugcugaucagcccccaccgguucggcgagacgaaggggaacuccgcgccccucaucauccgcgagccguucaucgccugcggccccaaggagugcaagcacuucgcccugacccacuacgccgcgcagcccggcggguacuacaacggcacccgggaggaccgcaacaagcugcggcaccucaucagcgugaagcuggggaagauccccaccguggagaacuccaucuuccacauggccgccuggagcggcuccgccugccacgacgggcgcgaguggacguacaucggcgucgacggcccggacagcaacgcccugcucaagaucaaguacggggaggcguacaccgacaccuaccacuccuacgccaagaacauccugcggacccaggagagcgccugcaacugcaucggcggggacugcuaccugaugaucacggacggccccgccagcggcaucuccgagugccgcuuccucaagauccgggaggggcgcaucaucaaggagaucuuccccaccggccgggugaagcacaccgaggagugcacgugcggguucgccagcaacaagaccaucgagugcgcgugccgcgacaacuccuacaccgccaagcggcccuucgugaagcugaacgucgagaccgacaccgccgagauccgccugaugugcacggagaccuaccucgacaccccgcggcccaacgacggcagcaucaccgggcccugcgaguccaacggcgacaagggcagcgggggcaucaagggcggguucgugcaccagcgcauggccuccaagaucgggcggugguacagccgcacgauguccaagaccaagcggaugggcaugggccuguacgugaaguacgacggggaccccuggaccgacagcgaggcccugguccucuccggcgugauggugagcauggaggagccggggugguacuccuucggcuucgagaucaaggacaagaagugcgacguccccugcaucgggaucgagauggugcacgacggcggcaagaccacguggcacagcgcggccaccgccaucuacugccugaugggguccggccagcugcucugggacaccgugaccggggucaacaugacgcuguga

SEQ ID NO: 93894 - RNA, 1401 nt, Artificial Sequence; identical to SEQ ID NO: 93436
  derived and/or modified CDS sequence (opt1) from neuraminidase__InfluenzaB__AGX24693

SEQ ID NO: 93895 - RNA, 1401 nt, Artificial Sequence; identical to SEQ ID NO: 93436
  derived and/or modified CDS sequence (opt1) from neuraminidase__InfluenzaB__AGX24704

SEQ ID NO: 93896 - RNA, 1401 nt, Artificial Sequence; identical to SEQ ID NO: 93436
  derived and/or modified CDS sequence (opt1) from neuraminidase__InfluenzaB__AGX24715

SEQ ID NO: 93897 - RNA, 1401 nt, Artificial Sequence
  derived and/or modified CDS sequence (opt1) from neuraminidase__InfluenzaB__AGX24737
augcugcccagcaccauccagacccucacgcuguuccugaccuccggcggggugcuccugagccuguacgucuccgccagccucuccuaccugcuguacagcgacauccuccugaaguucucccagaccgagaucaccgccccgaucaugccccuggacugcgcgaacgccagcaacgugcaggccgugaaccgcuccgccgccaagggcgucacgcuccugcugcccgagcccgaguggaccuacccgcggcucagcugccccggguccaccuuccagaaggcgcugcugaucagcccccaccgcuucggcgagaccaaggggaacuccgcgccccucaucauccgggagccguucaucgccugcggcacgaccgagugcaagcacuucgcccugacccacuacgccgcccagcccggcggguacuacaacggcacccgcgaggaccggaacaagcugcgccaccucaucagcgugaagcuggggaagauccccacgguggagaacuccaucuuccacauggccgccuggagcggcuccgccugccacgacgggaaggaguggaccuacaucggcgucgacggccccgacagcaacgcgcugcucaagaucaaguacggggaggccuacaccgacaccuaccacuccuacgccaagaacauccugcggacgcaggagagcgccugcaacugcaucggcggggacugcuaccugaugaucaccgacggcccggccagcggcaucuccgagugccgcuuccucaagauccgggaggggcgcaucaucaaggagaucuuccccaccggccgggugaagcacaccgaggagugcacgugcggguucgcgagcaacaagaccaucgagugcgccugccgcgacaaccgguacaccgccaagcgccccuucgugaagcugaacgucgagaccgacacggccgagauccggcugaugugcaccgagaccuaccucgacacgccccgcccgaacgacggcuccaucaccgggcccugcgagagcgacggcgacaagggcuccgggggcaucaagggcggguucgugcaccagcggauggccagcaagaucgggcgcugguacucccggaccaugagcaagaccaagcgcaugggcaugggccuguacgugaaguacgacggggaccccuggaccgacuccggcgcgcuggcccucagcggggucaugguguccaucgaggagcccggcugguacagcuucggguucgagaucaaggacaagaagugcgacgugccgugcaucggcaucgagaugguccacgacggcgggaagacgaccuggcacuccgccgccaccgccaucuacugccugaugggcagcgggcagcugcucugggacaccgugacgggcguggacauggcgcuguga

SEQ ID NO: 93898 - RNA, 1401 nt, Artificial Sequence
  derived and/or modified CDS sequence (opt1) from neuraminidase__InfluenzaB__AGX24748
augcugcccagcaccauccagacccucacgcuguuccugaccuccggcggggugcuccugagccuguacgucuccgccagccucuccuaccugcuguacagcgacauccuccugaaguucucccagaccgagaucaccgccccgaucaugccccuggacugcgcgaacgccagcaacgugcaggccgugaaccgcuccgccgccaagggcgucacgcuccugcugcccgagcccgaguggaccuacccgcggcucagcugccccggguccaccuuccagaaggcgcugcugaucagcccccaccgcuucggcgagaccaaggggaacuccgcgccccucaucauccgggagccguucaucgccugcggccccacggagugcaagcacuucgcccugacccacuacgccgcccagcccggccgcuacuacaacgggacccgggaggaccgcaacaagcugcggcaccucaucagcgugaagcugggcaagauccccaccguggagaacuccaucuuccacauggccgccuggagcggguccgccugccacgacggcaaggaguggacguacaucggggucgacggcccggacagcaacgcgcugcucaagaucaaguacggcgaggccuacaccgacaccuaccacuccuacgccaagaacauccugcgcacccaggagagcgccugcaacugcaucgggggcgacugcuaccugaugaucacggacgggcccgccagcggcaucuccgagugccgguuccucaagauccgcgagggccggaucaucaaggagaucuuccccaccgggcgcgugaagcacaccgaggagugcacgugcggcuucgcgagcaacaagaccaucgagugcgccugccgggacaacuccuacaccgccaagcgccccuucgugaagcugaacgucgagaccgacaccgccgagauccggcugaugugcacggagaccuaccucgacaccccgcgccccaacgacgggagcaucaccggccccugcgaguccgacggggacaagggcagcggcgggaucaagggcggguucgugcaccagcggauggccuccaagaucggccgcugguacagccggacgauguccaagaccaagcgcauggggaugggccuguacgugaaguacgacggcgaccccuggaccgacagcgaggcgcuggcccucuccggggucauggugagcauggaggagccgggcugguacuccuucggguucgagaucaaggacaagaagugcgacgugcccugcaucggcaucgagaugguccacgacgggggcaagaccacguggcacagcgccgccaccgccguguacugccugaugggcuccgggcagcugcucugggacaccgugaccggcgucgacauggcgcuguga

SEQ ID NO: 93899 - RNA, 1401 nt, Artificial Sequence
  derived and/or modified CDS sequence (opt1) from neuraminidase__InfluenzaB__AGX24759
augcugcccagcaccauccagacccucacgcuguuccugaccuccggcggggugcuccugagccuguacgucuccgccagccucuccuaccugcuguacagcgacauccuccugaaguucucccagaccgagaucaccgccccgaucaugccccuggacugcgcgaacgccagcaacgugcaggccgugaaccgcuccgccgccaagggcgucacgcuccugcugcccgagcccgaguggaccuacccgcggcucagcugccccggguccaccuuccagaaggcgcugcugaucagcccccaccgcuucggcgagaccaaggggaacuccgcgccccucaucauccgggagccguucaucgccugcggccccacggagugcaagcacuucgcccugacccacuacgccgcccagcccggcggguacuacaacggcacccgcgaggaccggaacaagcugcgccaccucaucagcgugaagcuggggaagauccccaccguggagaacuccaucuuccacauggccgccuggagcggcuccgccugccacgacgggaaggaguggacguacaucggcgucgacggcccggacagcaacgcgcugcucaagaucaaguacggggaggccuacaccgacaccuaccacuccuacgccaagaacauccugcggacccaggagagcgccugcaacugcaucggcggggacugcuaccugaugaucacggacggccccgccagcggcaucuccgagugccgcuuccucaagauccgggaggggcgcaucaucaaggagaucuuccccaccggccgggugaagcacaccgaggagugcacgugcggguucgcgagcaacaagaccaucgagugcgccugccgcgacaacuccuacaccgccaagcggcccuucgugaagcugaacgucgagaccgacaccgccgagauccgccugaugugcacggagaccuaccucgacaccccgcggcccaacgacggcagcaucaccgggcccugcgaguccgacggcgacaagggcagcgggggcaucaagggcggguucgugcaccagcgcauggccuccaagaucgggcggugguacagccgcacgauguccaagaccaagcggaugggcaugggccuguacgugaaguacgacggggaccccuggaccgacagcgaggcgcuggcccucuccggcgucauggugagcauggaggagccggggugguacuccuucggcuucgagaucaaggacaagaagugcgacauccccugcaucgggaucgagauggugcacgacggcggcaagaccacguggcacagcgccgccaccgccaucuacugccugaugggguccggccagcugcucugggacaccgucaccgggguggacauggcgcuguga

SEQ ID NO: 93900 - RNA, 1401 nt, Artificial Sequence; identical to SEQ ID NO: 93436
  derived and/or modified CDS sequence (opt1) from neuraminidase__InfluenzaB__AGX24770

SEQ ID NO: 93901 - RNA, 1401 nt, Artificial Sequence; identical to SEQ ID NO: 93898
  derived and/or modified CDS sequence (opt1) from neuraminidase__InfluenzaB__AGX24781

SEQ ID NO: 93902 - RNA, 1401 nt, Artificial Sequence; identical to SEQ ID NO: 92812
  derived and/or modified CDS sequence (opt1) from neuraminidase__InfluenzaB__AGX24792

SEQ ID NO: 93903 - RNA, 1401 nt, Artificial Sequence; identical to SEQ ID NO: 93860
  derived and/or modified CDS sequence (opt1) from neuraminidase__InfluenzaB__AGX24803

SEQ ID NO: 93904 - RNA, 1401 nt, Artificial Sequence; identical to SEQ ID NO: 93436
  derived and/or modified CDS sequence (opt1) from neuraminidase__InfluenzaB__AGX24814

SEQ ID NO: 93905 - RNA, 1401 nt, Artificial Sequence
  derived and/or modified CDS sequence (opt1) from neuraminidase__InfluenzaB__AGX24825
augcugcccagcaccauccagacccucacgcuguuccugaccuccggcggggugcuccugagccuguacgucuccgccagccucuccuaccugcuguacagcgacauccuccugaaguucucccagaccgagaucaccgccccgaucaugccccuggacugcgcgaacgccagcaacgugcaggccgugaaccgcuccgccgccaagggcgucacgcuccugcugcccgagcccgaguggaccuacccgcggcucagcugccccggguccaccuuccagaaggcgcugcugaucagcccccaccgcuucggcgagaccaaggggaacuccgcgccccucaucauccgggagccguucaucgccugcggccccacggagugcaagcacuucgcccugacccacuacgccgcccagcccggcgaguacuacaacgggacccgcgaggaccggaacaagcugcgccaccucaucagcgugaagcugggcaagauccccaccguggagaacuccaucuuccacauggccgccuggagcggguccgccugccacgacggcaaggaguggacguacaucggggucgacggcccggacagcaacgcgcugcucaagaucaaguacggcgaggccuacaccgacaccuaccacuccuacgccaagaacauccugcggacccaggagagcgccugcaacugcaucgggggcgacugcuaccugaugaucacggacgggcccgccagcggcaucuccgagugccgcuuccucaagauccgggagggccgcaucaucaaggagaucuuccccaccgggcgggugaagcacaccgaggagugcacgugcggcuucgcgagcaacaagaccaucgagugcgccugccgcgacaacuccuacaccgccaagcggcccuucgugaagcugaacgucgagaccgacaccgccgagauccgccugaugugcacggagaccuaccucgacaccccgcggcccaacgacgggagcaucaccggccccugcgaguccgacggggacaagggcagcggcgggaucaagggcggguucgugcaccagcgcauggccuccaagaucggccggugguacagccgcacgauguccaagacccggcgcauggggaugggccuguacgugaaguacgacggcgaccccuggaccgacagcgaggcgcuggcccucuccggggucauggugagcauggaggagccgggcugguacuccuucggguucgagaucaaggacaagaagugcgacgugcccugcaucggcaucgagaugguccacgacgggggcaagaccacguggcacagcgccgccaccgccaucuacugccugaugggcuccgggcagcugcucugggacaccgugaccggcguggacauggcgcuguga

SEQ ID NO: 93906 - RNA, 1401 nt, Artificial Sequence; identical to SEQ ID NO: 93436
  derived and/or modified CDS sequence (opt1) from neuraminidase__InfluenzaB__AGX24836

SEQ ID NO: 93907 - RNA, 1401 nt, Artificial Sequence
  derived and/or modified CDS sequence (opt1) from neuraminidase__InfluenzaB__AGX24847
augcugcccagcaccauccagacccucacgcuguuccugaccuccggcggggugcuccugagccuguacgucuccgccagccucuccuaccugcuguacagcgacauccuccugaaguucucccgcaccgagaucaccgccccgaucaugccccuggacugcgcgaacgccagcaacgugcaggccgugaaccgguccgccacgaagggcgucacccuccugcugcccgagcccgaguggaccuacccgcgccucagcugccccggguccaccuuccagaaggcccugcugaucagcccccaccgguucggcgagacgaaggggaacuccgcgccccucaucauccgcgagccguucaucgccugcggccccaaggagugcaagcacuucgcccugacccacuacgccgcgcagcccggcggguacuacaacggcacccgggaggaccgcaacaagcugcggcaccucaucagcgugaagcuggggaagauccccaccguggagaacuccaucuuccacauggccgccuggagcggcuccgccugccacgacgggcgcgaguggacguacaucggcgucgacggcccggacagcaacgcccugcucaagaucaaguacggggaggcguacaccgacaccuaccacuccuacgccaagaacauccugcggacccaggagagcgccugcaacugcaucggcggggacugcuaccugaugaucacggacggccccgccagcggcaucuccgagugccgcuuccucaagauccgggaggggcgcaucaucaaggagaucuuccccaccggccgggugaagcacaccgaggagugcacgugcggguucgccagcaacaagaccaucgagugcgcgugccgcgacaacuccuacaccgccaagcggcccuucgugaagcugaacgucgagaccgacaccgccgagauccgccugaugugcacggagaccuaccucgacaccccgcggcccaacgacggcagcaucaccgggcccugcgaguccaacggcgacaagggcagcgggggcaucaagggcggguucgugcaccagcgcauggccuccaagaucgggcggugguacagccgcacgauguccaagaccaagcggaugggcaugggccuguacgugaaguacgacggggaccccuggaccgacagcgaggcccuggcgcucuccggcgucauggugagcauggaggagccggggugguacuccuucggcuucgagaucaaggacaagaagugcgacgugcccugcaucgggaucgagaugguccacgacggcggcaagaccacguggcacagcgccgccaccgccguguacugccugaugggguccggccagcugcucugggacaccgugaccggggucaacaugacgcuguga

SEQ ID NO: 93908 - RNA, 1401 nt, Artificial Sequence; identical to SEQ ID NO: 92920
  derived and/or modified CDS sequence (opt1) from neuraminidase__InfluenzaB__AGX24858

SEQ ID NO: 93909 - RNA, 1401 nt, Artificial Sequence
  derived and/or modified CDS sequence (opt1) from neuraminidase__InfluenzaB__AGX24869
augcugcccagcaccauccagacccucacgcuguuccugaccuccggcggggugcuccugagccuguacgucuccgccagccucuccuaccugcuguacagcgacauccuccugaaguucucccgcaccgagaugaccgccccgaucaugccccugggcugcgcgaacgccagcaacgugcaggccgugaaccgguccgccacgaagggggucacccuccugcugcccgagcccgaguggaccuacccgcgccucagcugccccggcuccaccuuccagaaggcccugcugaucagcccccaccgguucggggagacgaagggcaacuccgcgccccucaucauccgcgagccguucaucgccugcggccccaaggagugcaagcacuucgcccugacccacuacgccgcgcagcccgggggcuacuacaacgggacccgggaggaccgcaacaagcugcggcaccucaucagcgugaagcugggcaagauccccaccguggagaacuccaucuuccacauggccgccuggagcggguccgccugccacgacggccgcgaguggacguacaucggcgucgacgggccggacagcaacgcccugcucaagaucaaguacggcgaggcguacaccgacaccuaccacuccuacgccaagaacauccugcggacccaggagagcgccugcaacugcaucgggggcgacugcuaccugaugaucacggacggccccgccagcgggaucuccgagugccgcuuccucaagauccgggagggccgcaucaucaaggagaucuuccccaccgggcgggugaagcacaccgaggagugcacgugcggcuucgccagcaacaagaccaucgagugcgcgugccgcgacaacuccuacaccgccaagcggcccuucgugaagcugaacgucgagaccgacaccgccgagauccgccugaugugcacggagaccuaccucgacaccccgcggcccaacgacgggagcaucaccggccccugcgaguccaacggcgacaaggggagcggcgggaucaagggcggguucgugcaccagcgcauggccuccaagaucggccggugguacagccgcacgauguccaagaccaagcggaugggcauggggcuguacgugaaguacgacggcgaccccuggaccgacagcgaggcccuggcgcucuccggggucauggugagcauggaggagccgggcugguacuccuucggguucgagaucaaggacaagaagugcgacgugcccugcaucggcaucgagaugguccacgacggcgggaagaccacguggcacagcgccgccaccgccaucuacugccugaugggcuccgggcagcugcucugggacaccgugaccggcgugaacaugacgcuguga

SEQ ID NO: 93910 - RNA, 1401 nt, Artificial Sequence
  derived and/or modified CDS sequence (opt1) from neuraminidase__InfluenzaB__AGX24880
augcugcccagcaccauccagaugcucacccuguuccugacguccggcggggugcuccugagccuguacgucuccgccagccucuccuaccugcuguacagcgacauccuccugaaguucucccgcaccgagaucaccgccccgaucaugccccuggacugcgcgaacgccagcaacgugcaggccgugaaccgguccgccaccaagggcgucacgcuccugcugcccgagcccgaguggaccuacccgcgccucagcugccccggguccaccuuccagaaggcccugcugaucagcccccaccgguucggcgagaccaaggggaacuccgcgccccucaucauccgcgagccguucaucgccugcggccccaaggagugcaagcacuucgcccugacgcacuacgccgcgcagcccggcggguacuacaacggcacccgggaggaccgcaacaagcugcggcaccucaucagcgugaagcuggggaagauccccaccguggagaacuccaucuuccacauggccgccuggagcggcuccgccugccacgacgggcgcgaguggaccuacaucggcgucgacggcccggacagcaacgcccugcucaagaucaaguacggggaggcguacacggacaccuaccacuccuacgccaagaacauccugcggacccaggagagcgccugcaacugcaucggcggggacugcuaccugaugaucaccgacggccccgccagcggcaucuccgagugccgcuuccucaagauccgggaggggcgcaucaucaaggagaucuuccccacgggccgggugaagcacaccgaggagugcacgugcggguucgccagcaacaagaccaucgagugcgcgugccgcgacaacuccuacaccgccaagcggcccuucgugaagcugaacgucgagaccgacaccgccgagauccgccugaugugcaccgagacguaccucgacaccccgcggcccaacgacggcagcaucaccgggcccugcgaguccaacggcgacaagggcagcgggggcaucaagggcggguucgugcaccagcgcauggccuccaagaucgggcggugguacagccgcaccauguccaagacgaagcggaugggcaugggccuguacgugaaguacgacggggaccccuggaccgacagcgaggcccuggcgcucuccggcgucauggugagcauggaggagccggggugguacuccuucggcuucgagaucaaggacaagaagugcgacgugcccugcaucgggaucgagaugguccacgacggcggcaagaccaccuggcacagcgccgccacggccaucuacugccugaugggguccggccagcugcucugggacaccgugaccggggugaacaugacccuguga

SEQ ID NO: 93911 - RNA, 1401 nt, Artificial Sequence
  derived and/or modified CDS sequence (opt1) from neuraminidase__InfluenzaB__AGX24902
augcugcccagcaccauccagacccucacgcuguuccugaccuccggcggggugcuccugagccuguacgucuccgcccuccugagcuaccugcucuacuccgacauccugcugaaguucagccgcaccgagaucaccgccccgaucaugccccucgacugcgcgaacgccuccaacgugcaggccgugaaccggagcgccacgaagggcgucacccugcugcuccccgagcccgaguggaccuacccgcgccuguccugccccgggagcaccuuccagaaggcccugcucaucagcccccaccgguucggcgagaacaaggggaacuccgcgccccugaucauccgcgagccguucaucgccugcggccccaaggagugcaagcacuucgcccugacgcacuacgccgcgcagcccggcggguacuacaacggcacccgggaggaccgcaacaagcuccggcaccugaucuccgugaagcuggggaagauccccaccguggagaacagcaucuuccacauggccgccugguccggcagcgccugccacgacgggcgcgaguggaccuacaucggcgucgacggcccggacuccaacgcccuccugaagaucaaguacggggaggcguacacggacaccuaccacagcuacgccaagaacauccugcggacccaggaguccgccugcaacugcaucggcggggacugcuaccucaugaucaccgacggccccgccagcggcaucagcgagugccgcuuccugaagauccgggaggggcgcaucaucaaggagaucuuccccacgggccgggugaagcacaccgaggagugcacgugcggguucgccuccaacaagaccaucgagugcgcgugccgcgacaacaacuacaccgccaagcggcccuucgugaagcugaacgucgagaccgacaccgccgagauccgccucaugugcaccgagacguaccuggacaccccgcggcccaacgacggcagcaucaccgggcccugcgaguccaacggcgacaagggcagcgggggcaucaagggcggguucgugcaccagcgcauggccuccaagaucgggcggugguacagccgcaccauguccaagacgaagcggaugggcaugggccuguacgugaaguacgacggggaccccuggaccgacagcgaggcccucgcgcuguccggcgucauggugagcauggaggagccggggugguacuccuucggcuucgagaucaaggacaagaagugcgacgugcccugcaucgggaucgagaugguccacgacggcggcaagaccaccuggcacagcgccgccacggccaucuacugccugaugggguccggccagcuccugugggacaccgugaccggggugaacaugacccuguga

SEQ ID NO: 93912 - RNA, 1401 nt, Artificial Sequence; identical to SEQ ID NO: 92925
  derived and/or modified CDS sequence (opt1) from neuraminidase__InfluenzaB__AGX84846

SEQ ID NO: 93913 - RNA, 1401 nt, Artificial Sequence; identical to SEQ ID NO: 92980
  derived and/or modified CDS sequence (opt1) from neuraminidase__InfluenzaB__AGX84858

SEQ ID NO: 93914 - RNA, 1401 nt, Artificial Sequence; identical to SEQ ID NO: 92925
  derived and/or modified CDS sequence (opt1) from neuraminidase__InfluenzaB__AGX84869

SEQ ID NO: 93915 - RNA, 1401 nt, Artificial Sequence
  derived and/or modified CDS sequence (opt1) from neuraminidase__InfluenzaB__AGX84880
augcugcccagcaccauccagacccucacgcuguuccugaccuccggcggggugcuccugagccuguacgucuccgccagccucuccuaccugcuguacagcgacauccuccugaaguucuccccgaccgagaucaccgcccccacgaugagccuggacugcgcgaacgccuccaacgugcaggccgugaaccgcagcgccaccaagggcgucaucuuccuccugcccgagcccgaguggaccuacccgcggcuguccugccccgggagcaccuuccagaaggcccuccugaucagcccccaccgcuucggcgagacgaaggggaacuccgcgccccugaucauccgggagccguucaucgccugcggccccaacgagugcaagcacuucgcccucacccacuacgccgcgcagcccggcggguacuacaacggcacccgcggggaccggaacaagcugcgccaccugaucuccgugaagcucggcaagauccccaccguggagaacagcaucuuccacauggccgccugguccgggagcgccugccacgacggcaaggaguggacguacaucggcgucgacgggccggacaacgacgcccugcugaaggugaaguacggcgaggcguacaccgacaccuaccacuccuacgccaacaagauccuccggacccaggagagcgccugcaacugcaucgggggcaacugcuaccugaugaucacggacggcagcgccuccggggugagcgagugccgcuuccugaagauccgggagggccgcaucaucaaggagaucuuccccaccgggcgggucaagcacaccgaggagugcacgugcggcuucgccuccaacaagaccaucgagugcgcgugccgcgacaacagcuacaccgccaagcggcccuucgugaagcucaacguggagaccgacaccgccgagauccgccugaugugcacggacaccuaccuggacacgccccggccggacgacggguccaucaccggccccugcgagagcaacggcgacaagggguccggcgggaucaagggcggguucguccaccagcgcauggagagcaagaucggccggugguacucccgcaccaugagcaagaccgagcggaugggcauggggcucuacgugaaguacgacggcgaccccugggccgacuccgacgcccuggcguucagcggggugauggucuccaugaaggagcccggcugguacagcuucggguucgagaucaaggacaagaagugcgacgugccgugcaucggcaucgagauggugcacgacggcgggaaggagaccuggcacuccgccgccaccgccaucuacugccugaugggcagcgggcagcuccugugggacacggucaccggcguggacauggcccuguga

SEQ ID NO: 93916 - RNA, 1401 nt, Artificial Sequence; identical to SEQ ID NO: 92925
  derived and/or modified CDS sequence (opt1) from neuraminidase__InfluenzaB__AGX84891

SEQ ID NO: 93917 - RNA, 1401 nt, Artificial Sequence; identical to SEQ ID NO: 92980
  derived and/or modified CDS sequence (opt1) from neuraminidase__InfluenzaB__AGX84902

SEQ ID NO: 93918 - RNA, 1401 nt, Artificial Sequence
  derived and/or modified CDS sequence (opt1) from neuraminidase__InfluenzaB__AGX84924
augcugcccagcaccauccagacccucacgcuguuccugaccuccggcggggugcuccugagccuguacgucuccgcccuccugagcuaccugcucuacuccgacauccugcugaaguucagcccgaccgagaucaccgcccccacgaugucccucgacuacgcgaacgccagcaacgugcaggccgugaaccgcuccgccaccaagggcgucaccuuccugcugcccgagcccgaguggaccuacccgcggcucagcugccccggguccacguuccagaaggcccugcugaucagcccccaccgcuucggcgagaccaaggggaacuccgcgccccucaucauccgggagccguucaucgccugcggccccaacgagugcaagcacuucgcccugacccacuacgccgcgcagcccggcggguacuacaacggcacccgcggggaccggaacaagcugcgccaccucaucagcgugaagcugggcaagauccccacgguggagaacuccaucuuccacauggccgccuggagcggguccgccugccacgacggcaaggaguggaccuacaucggcgucgacgggccggacaacgacgcccugcucaaggugaaguacggcgaggcguacaccgacaccuaccacagcuacgccaacaagauccugcggacgcaggaguccgccugcaacugcaucgggggcaacugcuaccugaugaucaccgacggcagcgccagcgggguguccgagugccgcuuccucaagauccgggagggccgcaucaucaaggagaucuuccccaccgggcgggucaagcacaccgaggagugcacgugcggcuucgccagcaacaagaccaucgagugcgcgugccgcgacaacuccuacaccgccaagcggcccuucgugaagcugaacguggagaccgacacggccgagauccgccugaugugcaccgacaccuaccucgacacgccccggccggacgacgggagcaucaccggccccugcgaguccaacggcgacaaggggagcggcgggaucaagggcggguucguccaccagcgcauggaguccaagaucggccggugguacagccgcaccauguccaagaccgagcggaugggcauggggcuguacgugaaguacgacggcgaccccugggccgacagcgacgcccuggcguucuccggggugauggucagcaugaaggagcccggcugguacuccuucggguucgagaucaaggacaagaagugcgacgugccgugcaucggcaucgagauggugcacgacggcgggaaggagaccuggcacagcgccgccacggccaucuacugccucaugggcuccgggcagcugcugugggacaccgucaccggcguggacauggcccucuga

SEQ ID NO: 93919 - RNA, 1401 nt, Artificial Sequence
  derived and/or modified CDS sequence (opt1) from neuraminidase__InfluenzaB__AGY46393
augcugcccagcaccauccagacccucacgcuguuccugaccuccggcggggugcuccugagccuguacgucuccgccagccucuccuaccugcuguacagcgacauccuccugaaguucccguccaccgagaucaccgcccccacgaugccccuggacugcgcgaacgccaccaacgugcaggccgugaaccgcagcgccaccaagggcgucacccuccugcugcccgagccggaguggacguacccccggcucuccugccccgggagcaccuuccagaaggcccugcugaucagcccccaccgcuucggcgagaucaaggggaacuccgcgccgcucaucauccgggagcccuucaucgccugcggccccaacgagugcaagcacuucgcccugacccacuacgccgcgcagcccggcggguacuacaacggcacccgcgaggaccggaacaagcugcgccaccucaucuccgugaagcuggggaagaucccgacgguggagaacagcaucuuccacauggccgccugguccggcagcgccugccacgacgggcgggaguggaccuacaucggcgucgacggccccgacuccaacgcccugcucaagaucaaguacggggaggcguacaccgacaccuaccacagcuacgccaagaacauccugcgcacgcaggaguccgccugcaacugcaucggcggggacugcuaccugaugaucaccgacggccccgccagcggcaucagcgagugccgguuccucaagauccgcgaggggcggaucaucaaggagaucuuccccaccggccgcgugaagcacaccgaggagugcacgugcggguucgccuccaacaagaccaucgagugcgcgugccgggacaacagcuacaccgccaagcgcccguucgugaagcugaacgucgagaccgacacggccgagauccggcugaugugcaccgagaccuaccucgacacgccccgccccaacgacggcuccaucaccgggcccugcgagagcaacggcgacaagggcuccgggggcaucaagggcggguucgugcaccagcggauggccagcaagaucgggcgcugguacucccggaccaugagcaagaccgagcgcaugggcaugggccuguacgugaaguacgacggggacccgugggccgacuccgacgcgcuggccuucagcggcgucaugguguccauggaggagcccgggugguacagcuucggcuucgagaucaaggacaagaagugcgacgugcccugcaucgggaucgagaugguccacgacggcggcaaggagaccuggcacuccgccgccacggccaucuacugccucauggggagcggccagcugcugugggacaccgugaccggggugaacauggcgcucuga

SEQ ID NO: 93920 - RNA, 1401 nt, Artificial Sequence
  derived and/or modified CDS sequence (opt1) from neuraminidase__InfluenzaB__AGY46397
augcugcccagcaccauccagacccucacgcuguuccugaccuccggcggggugcuccugagccuguacgucuccgccagccucuccuaccugcuguacagcgacauccuccugaaguucucccgcaccgagaucaccgccccgaucaugccccuggacugcgcgaacgccagcaacgugcaggccgugaaccgguccgccacgaagggcgucacccuccugcugcccgagcccgaguggaccuacccgcgccucagcugccccggguccaccuuccagaaggcccugcugaucagcccccaccgguucggcgagacgaaggggaacuccgcgccccucaucauccgcgagccguucaucgccugcggccccaacgagugcaagcacuucgcccugacccacuacgccgcgcagcccggcggguacuacaacggcacccgcggggaccggaacaagcugcggcaccucaucagcgugaagcugggcaagauccccaccguggagaacuccaucuuccacauggccgccuggagcggguccgccugccacgacggcaaggaguggacguacaucggcgucgacgggccggacaacaacgcccugcucaaggugaaguacggcgaggcguacaccgacaccuaccacagcuacgccaacaagauccugcgcacccaggaguccgccugcaacugcaucgggggcaacugcuaccugaugaucacggacggcagcgccagcgggguguccgagugccgguuccucaagauccgcgagggccggaucaucaaggagaucuuccccaccgggcgcgucaagcacaccgaggagugcacgugcggcuucgccagcaacaagaccaucgagugcgcgugccgggacaacuccuacaccgccaagcgccccuucgugaagcugaacguggagaccgacaccgccgagauccggcugaugugcacggacaccuaccucgacacgccccgcccgaacgacgggagcaucaccggccccugcgaguccgacggcgacaaggggagcggcgggaucaagggcggguucguccaccagcggauggaguccaagaucggccgcugguacagccggaccauguccaagaccgagcgcaugggcauggggcuguacgugaaguacgacggcgaccccugggccgacagcgacgcccuggcguucuccggggugauggucagcaugaaggagcccggcugguacuccuucggguucgagaucaaggacaagaagugcgacgugccgugcaucggcaucgagauggugcacgacggcgggaagaccaccuggcacagcgccgccacggccaucuacugccucaugggcuccgggcagcugcugugggacaccgucaccggcgugaacaugacccucuga

SEQ ID NO: 93921 - RNA, 1401 nt, Artificial Sequence
  derived and/or modified CDS sequence (opt1) from neuraminidase__InfluenzaB__AGY46399
augcugcccagcaccauccagacccucacgcuguuccugaccuccggcggggugcuccugagccuguacgucuccgccagccucuccuaccugcuguacagcgacauccuccugaaguucuccccgaccgagaucaucgcccccaccacgccccuggacugcgcgaacgccagcaacgugcaggccgugaaccgcuccgccaccaagggcgucacccuccugcugcccgagccggaguggaccuacccccggcucagcugccccggguccacguuccagaaggcccugcugaucagcccccaccgcuucggcgagaccaaggggaacuccgcgccgcucaucauccgggagcccuucaucgccugcggccccaaggagugcaagcacuucgcccugacccacuacgccgcgcagcccggcggguacuacaacggcacccgcgaggaccggaacaagcugcgccaccucaucagcgugaagcuggggaagaucccgacgguggagaacuccaucuuccacauggccgccuggagcggcuccgccugccacgacgggcgggaguggaccuacaucggcgucgacggccccgacagcaacgcccugcucaagaucaaguacggggaggcguacaccgacaccuaccacuccuacgccaagaacauccugcgcacgcaggagagcgccugcaacugcaucggcggggacugcuaccugaugaucaccgacggccccgccagcggcaucuccgagugccgguuccucaagauccgcgaggggcggaucaucaaggagaucuuccccaccggccgcgugaagcacaccgaggagugcacgugcggguucgccagcaacaagaccaucgagugcgcgugccgggacaacuccuacaccgccaagcgcccguucgugaagcugaacgucgagaccgacacggccgagauccggcugaugugcaccgagaccuaccucgacacgccccgccccaacgacggcagcaucaccgggcccugcgaguccaacggcgacaagggcagcgggggcaucaagggcggguucgugcaccagcggauggccuccaagaucgggcgcugguacagccggaccauguccaagaccaagcgcaugggcaugggccuguacgugaaguacgacggggacccgugggccgacagcgaggcgcuggcccucuccggcgucauggugagcauggaggagcccgggugguacuccuucggcuucgagaucaaggacaagaagugcgacgugcccugcaucgggaucgagaugguccacgacggcggcaaggagaccuggcacagcgccgccacggccaucuacugccugaugggguccggccagcugcucugggacaccgugaccgggguggacauggcgcuguga

SEQ ID NO: 93922 - RNA, 1401 nt, Artificial Sequence
  derived and/or modified CDS sequence (opt1) from neuraminidase__InfluenzaB__AGY46401
augcugcccagcaccauccagacccucacgcuguuccugaccuccggcggggugcuccugagccuguacgucuccgccagccucuccuaccugcuguacagcgacauccuccugaaguucuccccgaccgagaucaccgcccccacgaugccccuggacugcgcgaacgccagcaacgugcaggccgugaaccgcuccgccaccaagggcgucacccuccugcugcccgagccggaguggaccuacccccggcucagcugccccggguccacguuccagaaggcccugcugaucagcccccaccgcuucggcgagaccaaggggaacuccgcgccgcucaucauccgggagcccuucaucgccugcggccccaaggagugcaagcacuucgcccugacccacuacgccgcgcagcccggcggguacuacaacggcacccgcgaggaccggaacaagcugcgccaccucaucagcgugaagcuggggaagaucccgacgguggagaacuccaucuuccacauggccgccuggagcggcuccgccugccacgacgggcgggaguggaccuacaucggcgucgacggccccgacagcaacgcccugcucaagaucaaguacggggaggcguacaccgacaccuaccacuccuacgccaagaacauccugcgcacgcaggagagcgccugcaacugcaucggcggggacugcuaccugaugaucaccgacggccccgccagcggcaucuccgagugccgguuccucaagauccgcgaggggcggaucaucaaggagaucuuccccaccggccgcgugaagcacaccgaggagugcacgugcggguucgccagcaacaagaccaucgagugcgcgugccgggacaacuccuacaccgccaagcgcccguucgugaagcugaacgucgagaccgacacggccgagauccggcugaugugcaccgagaccuaccucgacacgccccgccccaacgacggcagcaucaccgggcccugcgaguccaacggcgacaagggcagcgggggcaucaagggcggguucgugcaccagcggauggccuccaagaucgggcgcugguacagccggaccauguccaagaccaagcgcaugggcaugggccuguacgugaaguacgacggggacccgugggccgacagcgacgcgcuggccuucuccggcgucauggugagcaugaaggagcccgggugguacuccuucggcuucgagaucaaggacaagaagugcgacgugcccugcaucgggaucgagaugguccacgacggcggcaaggagaccuggcacagcgccgccacggccaucuacugccucaugggguccggccagcugcugugggacaccgugaccgggguggacauggcgcucuga

SEQ ID NO: 93923 - RNA, 1401 nt, Artificial Sequence; identical to SEQ ID NO: 92640
  derived and/or modified CDS sequence (opt1) from neuraminidase__InfluenzaB__AGZ59825

SEQ ID NO: 93924 - RNA, 1401 nt, Artificial Sequence; identical to SEQ ID NO: 92706
  derived and/or modified CDS sequence (opt1) from neuraminidase__InfluenzaB__AGZ59836

SEQ ID NO: 93925 - RNA, 1401 nt, Artificial Sequence; identical to SEQ ID NO: 93395
  derived and/or modified CDS sequence (opt1) from neuraminidase__InfluenzaB__AGZ59847

SEQ ID NO: 93926 - RNA, 1401 nt, Artificial Sequence
  derived and/or modified CDS sequence (opt1) from neuraminidase__InfluenzaB__AGZ59858
augcugcccagcaccauccagacccucacgcuguuccugaccuccggcggggugcuccugagccuguacgucuccgccagccucuccuaccugcuguacagcgacauccuccugaaguucuccccgaccgagaucaccgcccccacgaugccccuggacugcgcgaacgccagcaacgugcacgccgugaaccgcuccgccaccaagggcgucacccuccugcugcccgagccggaguggaccuacccccggcucagcugccccggguccacguuccagaaggcccugcugaucagcccccaccgcuucggcgagaccaaggggaacuccgcgccgcucaucauccgggagcccuucaucgccugcggccccaacgagugcaagcacuucgcccugacccacuacgccgcgcagcccggcggguacuacaacggcaagcgcggggaccggaacaagcugcgccaccucaucagcgugaagcugggcaagaucccgaccguggagaacuccaucuuccacauggccgccuggagcggguccgccugccacgacggcaaggaguggacguacaucggcgucgacgggcccgacaacaacgcccugcucaagaucaaguacggcgaggcguacaccgacaccuaccacagcuacgccaacaacauccugcggacccaggaguccgccugcaacugcaucgggggcaacugcuaccugaugaucacggacggcagcgccagcgggguguccgagugccgcuuccucaagauccgggagggccgcaucaucaaggagaucuuccccaccgggcgggugaagcacaccgaggagugcacgugcggcuucgccagcaacaagaccaucgagugcgcgugccgcgacaacuccuacaccgccaagcggcccuucgucaagcugaacguggagaccgacaccgccgagauccgccugaugugcacggacaccuaccucgacaccccgcggcccgacgacgggagcaucaccggccccugcgaguccaacggcgacaaggggagcggcgggaucaagggcggguucgugcaccagcgcauggccuccaagaucggccggugguacagccgcacgauguccaagaccgagcggaugggcauggggcuguacgucaaguacgacggcgaccccugggccgacagcgacgcgcuggccuucuccggggugauggugagcaugaaggagccgggcugguacuccuucggguucgagaucaaggacaagaagugcgacguccccugcaucggcaucgagauggugcacgacggcgggaaggagaccuggcacagcgccgccaccgccaucuacugccucaugggcuccgggcagcugcugugggacacggugaccggcgucgacauggcgcucuga

SEQ ID NO: 93927 - RNA, 1401 nt, Artificial Sequence
  derived and/or modified CDS sequence (opt1) from neuraminidase__InfluenzaB__AGZ59869
augcugcccagcaccauccagacccucacgcuguuccugaccuccggcggggugcuccugagccuguacgucuccgccagccucuccuaccugcuguacagcgacauccuccugaaguucuccccgaccgagaucaccgcccccacgaugccccuggacugcgcgaacgccagcaacgugcaggccgugaaccgcuccgccaccaagggcgucacccuccugcugcccgagccggaguggaccuacccccggcucagcugccccggguccacguuccagaaggccgugcugaucagcccccaccgcuucggcgagaccaaggggaacuccgcgccgcugaucauccgggagcccuucaucgccugcggccccaacgagugcaagcacuucgcccucacccacuacgccgcgcagcccggcggguacuacaacggcacccgcggggaccggaacaagcugcgccaccugaucagcgugaagcucggcaagaucccgacggucgagaacuccaucuuccacauggccgccuggagcggguccgccugccacgacggcaaggaguggaccuacaucggcguggacgggcccgacaacaacgcccugcugaagaucaaguacggcgaggcguacaccgacaccuaccacagcuacgccaacaagauccuccggacgcaggaguccgccugcaacugcaucgggggcaacugcuaccugaugaucaccgacggcagcgccagcgggguguccgagugccgcuuccugaagauccgggagggccgcaucaucaaggagaucuuccccaccgggcgggucaagcacaccgaggagugcacgugcggcuucgccagcaacaagaccaucgagugcgcgugccgcgacaacuccuacaccgccaagcggcccuucgugaagcucaacguggagaccgacacggccgagauccgccugaugugcaccgacaccuaccuggacaccccgcggcccgacgacgggagcaucacgggccccugcgaguccaacggcgacaaggggagcggcgggaucaagggcggguucguccaccagcgcauggccuccaagaucggccggugguacagccgcaccauguccaagaccgagcggaugggcauggggcucuacgugaaguacgacggcgaccccugggccgacagcgacgcgcuggccuucuccggggugauggucagcaugaaggagccgggcugguacuccuucggguucgagaucaaggacaagaagugcgacgugcccugcaucggcaucgagauggugcacgacggcgggaaggagaccuggcacagcgccgccacggccaucuacugccugaugggcuccgggcagcuccugugggacaccgucaccggcguggacauggcgcuguga

SEQ ID NO: 93928 - RNA, 1401 nt, Artificial Sequence; identical to SEQ ID NO: 93424
  derived and/or modified CDS sequence (opt1) from neuraminidase__InfluenzaB__AGZ59880

SEQ ID NO: 93929 - RNA, 1401 nt, Artificial Sequence; identical to SEQ ID NO: 93868
  derived and/or modified CDS sequence (opt1) from neuraminidase__InfluenzaB__AGZ59891

SEQ ID NO: 93930 - RNA, 1401 nt, Artificial Sequence; identical to SEQ ID NO: 92985
  derived and/or modified CDS sequence (opt1) from neuraminidase__InfluenzaB__AGZ59902

SEQ ID NO: 93931 - RNA, 1401 nt, Artificial Sequence; identical to SEQ ID NO: 92985
  derived and/or modified CDS sequence (opt1) from neuraminidase__InfluenzaB__AGZ59913

SEQ ID NO: 93932 - RNA, 1401 nt, Artificial Sequence; identical to SEQ ID NO: 92985
  derived and/or modified CDS sequence (opt1) from neuraminidase__InfluenzaB__AGZ59924

SEQ ID NO: 93933 - RNA, 1401 nt, Artificial Sequence; identical to SEQ ID NO: 92985
  derived and/or modified CDS sequence (opt1) from neuraminidase__InfluenzaB__AGZ59935

SEQ ID NO: 93934 - RNA, 1401 nt, Artificial Sequence; identical to SEQ ID NO: 92985
  derived and/or modified CDS sequence (opt1) from neuraminidase__InfluenzaB__AGZ59946

SEQ ID NO: 93935 - RNA, 1401 nt, Artificial Sequence
  derived and/or modified CDS sequence (opt1) from neuraminidase__InfluenzaB__AGZ59957
augcugcccagcaccauccagacccucacgcuguuccugaccuccggcggggugcuccugagccuguacgucuccgccagccucuccuaccugcuguacagcgacauccuccugaaguucuccccgaccgagaucaccgcccccacgaugccccuggacugcgcgaacgccagcaacgugcaggccgugaaccgcuccgccaccaagggcgucacccuccugcugcccgagccggaguggaccuacccccggcucagcugccccggguccacguuccagaaggcccugcugaucagcccccaccgcuucggcgagaccaaggggaacuccgcgccgcucaucauccgggagcccuucaucgccugcggccccaacgagugcaagcacuucgcccugacccacuacgccgcgcagcccggcggguacuacaacggcacccgcggggaccggaacaagcugcgccaccucaucagcgugaagcugggcaagaucccgacgguggagaacuccaucuuccacauggccgccuggagcggguccgccugccacgacggcaaggaguggaccuacaucggcgucgacgggcccgacaacaacgcccugcucaaggugaaguacggcgaggcguacaccgacaccuaccacagcuacgccaacaagauccugcggacgcaggaguccgccugcaacugcaucgggggcaacugcuaccugaugaucaccgacggcagcgccagcgggguguccgagugccgcuuccucaagauccgggagggccgcaucaucaaggagaucuuccccaccgggcgggucaagcacaccgaggagugcacgugcggcuucgccagcaacaagaccaucgagugcgcgugccgcgacaacuccuacaccgccaagcggcccuucgugaagcugaacguggagaccgacacggccgagauccgccugaugugcaccgacaccuaccucgacaccccgcggcccaacgacgggagcaucacgggccccugcgaguccaacggcgacaaggggagcggcgggaucaagggcggguucguccaccagcgcauggaguccaagaucggccggugguacagccgcaccauguccaagaccgagcggaugggcauggggcuguacgugaaguacgacggcgaccccugggccgacagcgacgcccuggcguucuccggggugauggucagcaugaaggagccgggcugguacuccuucggguucgagaucaaggacaagaagugcgacgugcccugcaucggcaucgagauggugcacgacggcgggaagggcaccuggcacagcgccgccacggccaucuacugccucaugggguccggccagcugcugugggacaccgucaccggcguggacauggcccucuga

SEQ ID NO: 93936 - RNA, 1401 nt, Artificial Sequence; identical to SEQ ID NO: 92985
  derived and/or modified CDS sequence (opt1) from neuraminidase__InfluenzaB__AGZ59969

SEQ ID NO: 93937 - RNA, 1401 nt, Artificial Sequence; identical to SEQ ID NO: 92985
  derived and/or modified CDS sequence (opt1) from neuraminidase__InfluenzaB__AGZ59980

SEQ ID NO: 93938 - RNA, 1401 nt, Artificial Sequence; identical to SEQ ID NO: 92985
  derived and/or modified CDS sequence (opt1) from neuraminidase__InfluenzaB__AGZ59991

SEQ ID NO: 93939 - RNA, 1401 nt, Artificial Sequence; identical to SEQ ID NO: 92985
  derived and/or modified CDS sequence (opt1) from neuraminidase__InfluenzaB__AGZ60003

SEQ ID NO: 93940 - RNA, 1401 nt, Artificial Sequence
  derived and/or modified CDS sequence (opt1) from neuraminidase__InfluenzaB__AGZ60014
augcugcccagcaccauccagacccucacgcuguuccugaccuccggcggggugcuccugagccuguacgucuccgcccuccugagcuaccugcucuacuccgacauccugcugaaguucagcccgaccgagaucaccgcccccacgaugucccucgacugcgcgaacgccagcaacgugcaggccgugaaccgcuccgccaccaagggcgucaccuuccugcugcccgagcccgaguggaccuacccgcggcucagcugccccggguccacguuccagcgcgcccugcugaucagcccccaccgguucggcgaggcgaaggggaacuccgcgccccucaucauccgcgagccguucaucgccugcggccccaacgagugcaagcacuucgcccugacccacuacgccgcccagcccggcggguacuacaacggcacccgcggggaccggaacaagcugcggcaccucaucagcgugaagcugggcaagauccccaccguggagaacuccaucuuccacauggccgccuggagcggguccgccugccacgacggcaaggaguggacguacaucggcgucgacgggccggacaacgacgcgcugcucaaggugaaguacggcgaggccuacaccgacaccuaccacagcuacgccaacaagauccugcgcacccaggaguccgccugcaacugcaucgggggcaacugcuaccugaugaucacggacggcagcgccagcgggguguccgagugccgguuccucaagauccgcgagggccagaucaucaaggagaucuuccccaccgggcgggucaagcacaccgaggagugcacgugcggcuucgcgagcaacaagaccaucgagugcgccugccgcgacaacuccuacaccgccaagcggcccuucgugaagcugaacguggagaccgacaccgccgagauccgccugaugugcacggacaccuaccucgacacgccccggccggacgacgggagcaucaccggccccugcgaguccaacggcgacaaggggagcggcgggaucaagggcggguucguccaccagcgcauggaguccaagaucggccggugguacagccgcaccauguccaagaccgagcggaugggcauggggcuguacgugaaguacgacggcgaccccugggccgacagcgacgcgcuggccuucuccggggugauggucagcaugaaggagcccggcugguacuccuucggguucgagaucaaggacaagaagugcgacgugccgugcaucggcaucgagauggugcacgacggcgggaaggagaccuggcacagcgccgccaccgccaucuacugccucaugggcuccgggcagcugcugugggacacggucaccggcguggacauggcgcucuga

SEQ ID NO: 93941 - RNA, 1401 nt, Artificial Sequence; identical to SEQ ID NO: 92919
  derived and/or modified CDS sequence (opt1) from neuraminidase__InfluenzaB__AGZ60025

SEQ ID NO: 93942 - RNA, 1401 nt, Artificial Sequence
  derived and/or modified CDS sequence (opt1) from neuraminidase__InfluenzaB__AGZ60037
augcugcccagcaccauccagacccucacgcuguuccugaccuccggcggggugcuccugagccuguacgucuccgcccuccugagcuaccugcucuacuccgacauccugcugaaguucagcccgaccgagaucaccgcccccacgaugucccucgacugcgcgaacgccagcaacgugcaggccgugaaccgcuccgccaccaagggcgucaccuuccugcugcccgagcccgaguggaccuacccgcggcucagcugccccggguccacguuccagaaggcccugcugaucagcccccaccgcuucggcgagaccaaggggaacuccgcgccccucaucauccgggagccguucaucgccugcggccccaacgagugcaagcacuucgcccugacccacuacgccgcgcagcccggcggguacuacaacggcacccgcggggaccggaacaagcugcgccaccucaucagcgugaagcugggcaagauccccacgguggagaacuccaucuuccacauggccgccuggagcggguccgccugccacgacggcaaggaguggaccuacaucggcgucgacgggccggacaacgacgcccugcucaaggugaaguacggcgaggcguacaccgacaccuaccacagcuacgccaacaagauccugcggacgcaggaguccgccugcaacugcaucgggggcaacugcuaccugaugaucaccgacggcagcgccagcgggguguccgagugccgcuuccucaagauccgggagggccgcaucaucaaggagaucuuccccaccgggcgggucaagcacaccgaggagugcacgugcggcuucgccagcaacaagaccaucgagugcgcgugccgcgacaacuccuacaccgccaagcggcccuucgugaagcugaacguggagaccgacacggccgagauccgccugaugugcaccgacaccuaccucgacacgccccggccggacgacgggagcaucaccggccccugcgaguccaacggcgacaaggggagcggcgggaucaagggcggguucguccaccagcgcauggaguccaagaucggccggugguacagccgcaccauguccaagaccgagcggaugggcauggggcuguacgugaaguacgacggcgaccccugggccgagagcgacgcccuggcguucuccggggugauggucagcaugaaggagcccggcugguacuccuucggguucgagaucaaggacaagaagugcgacgugccgugcaucggcaucgagauggugcacgacggcgggaaggagaccuggcacagcgccgccacggccaucuacugccucaugggcuccgggcagcugcugugggacaccgucaccggcguggacaucgcccucuga

SEQ ID NO: 93943 - RNA, 1401 nt, Artificial Sequence; identical to SEQ ID NO: 93155
  derived and/or modified CDS sequence (opt1) from neuraminidase__InfluenzaB__AGZ60048

SEQ ID NO: 93944 - RNA, 1401 nt, Artificial Sequence; identical to SEQ ID NO: 93155
  derived and/or modified CDS sequence (opt1) from neuraminidase__InfluenzaB__AGZ60059

SEQ ID NO: 93945 - RNA, 1401 nt, Artificial Sequence
  derived and/or modified CDS sequence (opt1) from neuraminidase__InfluenzaB__AGZ60070
augcugcccagcaccauccagacccucacgcuguuccugaccuccggcggggugcuccugagccuguacgucuccgccagccucuccuaccugcuguacagcgacauccuccugaaguucuccaccaccgagaucacggccccgaccaugccccuggacugcgcgaacgccagcaacgugcaggccgugaaccacuccgccgccaagggcgucacccuccugcugcccgagcccgaguggaccuacccgcgccucagcugccccggguccacguuccagaaggcgcugcugaucagcccccaccgguucggcgagaccaaggggaacuccgcgccccucaucauccgcgagccguucaucgccugcggccccaaggagugcaagcacuucgcccugacccacuacgccgcccagcccggcggguacuacaacggcacccgggaggaccgcaacaagcugcggcaccucaucagcgugaagcuggggaagauccccacgguggagaacuccaucuuccacauggccgccuggagcggcuccgccugccacgacgggaaggaguggaccuacaucggcgucgacggcccggacagcaacgcgcugcucaagaucaaguacggggaggccuacaccgacaccuaccacuccuacgcccacaacauccugcgcacgcaggagagcgccugcaacugcaucggcgggaacugcuaccugaugaucaccgacggcagcgccuccggcaucagcgagugccgguuccucaagauccgcgaggggcggaucaucaaggagaucuuccccaccggccgcgugaagcacaccgaggagugcacgugcggguucgcgaacaacaagaccaucgagugcgccugccgggacaacuccuacaccgccaagcgccccuucgugaagcugaacgucgagaccgacacggccgagauccggcugaugugcaccgagaccuaccucgacacgccccgcccggacgacggcagcaucaccgggcccugcgaguccaacggcaacaagggcagcgggggcaucaagggcggguucgugcaccagcggauggccuccaagaucgggcgcugguacagccggaccauguccaagaccaagcgcaugggcaugggccuguacgugaaguacgacggggaccccuggaccgacagcgacgcgcuggucuucuccggcgugaugaucagcguggaggagcccgggugguacuccuucggcuucgagaucaaggacaagaagugcgacgucccgugcaucgggaucgagauggugcacgacggcggcaaggagacguggcacagcgccgccaccgccaucuacugccucaugggguccggccagcugcugugggacaccgugaccggggucaacaugacgcucuga

SEQ ID NO: 93946 - RNA, 1401 nt, Artificial Sequence; identical to SEQ ID NO: 92651
  derived and/or modified CDS sequence (opt1) from neuraminidase__InfluenzaB__AGZ60081

SEQ ID NO: 93947 - RNA, 1401 nt, Artificial Sequence; identical to SEQ ID NO: 93171
  derived and/or modified CDS sequence (opt1) from neuraminidase__InfluenzaB__AGZ60092

SEQ ID NO: 93948 - RNA, 1401 nt, Artificial Sequence; identical to SEQ ID NO: 93794
  derived and/or modified CDS sequence (opt1) from neuraminidase__InfluenzaB__AGZ60103

SEQ ID NO: 93949 - RNA, 1401 nt, Artificial Sequence; identical to SEQ ID NO: 92812
  derived and/or modified CDS sequence (opt1) from neuraminidase__InfluenzaB__AGZ60135

SEQ ID NO: 93950 - RNA, 1401 nt, Artificial Sequence; identical to SEQ ID NO: 92984
  derived and/or modified CDS sequence (opt1) from neuraminidase__InfluenzaB__AGZ60154

SEQ ID NO: 93951 - RNA, 1401 nt, Artificial Sequence
  derived and/or modified CDS sequence (opt1) from neuraminidase__InfluenzaB__AGZ60164
augcugcccagcaccacccagacgcucacccuguuccugaccuccggcggggugcuccugagccuguacgucuccgccagccucuccuaccugcuguacagcgacauccuccugaaguucucccagaccgagaucacggccccgaucaugccccuggacugcgcgaacgccagcaacgugcaggccgugaaccgcuccgccgccaagggcgucacccuccugcugcccgagcccgaguggaccuacccgcggcucagcugccccggguccaccuuccagaaggcgcugcugaucaacccccaccgcuucggcgagacgaaggggaacagcgcgccccucaucauccgggagccguucaucgccugcggccccaccgagugcaagcacuucgcccugacccacuacgccgcccagcccggcggguacuacaacggcacccgcgaggaccggaacaagcugcgccaccucaucuccgugaagcuggggaagauccccacgguggagaacagcaucuuccacauggccgccugguccggcagcgccugccacgacgggaaggaguggaccuacaucggcgucgacggcccggacuccaacgcgcugcucaagaucaaguacggggaggccuacaccgacaccuaccacagcuacgccaagaacauccugcggacgcaggaguccgccugcaacugcaucggcggggacugcuaccugaugaucaccgacggccccgccagcggcaucagcgagugccgcuuccucaagauccgggaggggcgcaucaucaaggagaucuuccccaccggccgggugaagcacaccgaggagugcacgugcggguucgcguccaacaagaccaucgagugcgccugccgcgacaacagcuacaccgccaagcggcccuucgugaagcugaacgucgagaccgacacggccgagauccgccugaugugcaccgagaccuaccucgacaccccgcggcccaacgacggcuccaucacggggcccugcgagagcgacggcgacaagggcuccgggggcaucaagggcggguucgugcaccagcgcauggccagcaagaucgggcggugguacucccgcaccaugagcaagaccaagcggaugggcaugggccuguacgugaaguacgacggggaccccuggaccgacuccgaggcgcuggcccucagcggcgucaugguguccauggaggagccggggugguacagcuucggcuucgagaucaaggacaagaagugcgacgugcccugcaucgggaucgagaugguccacgacggcggcaagacgaccuggcacuccgccgccaccgccaucuacugccugauggggagcggccagcugcucugggacaccgugacggggguggacauggcgcuguga

SEQ ID NO: 93952 - RNA, 1401 nt, Artificial Sequence; identical to SEQ ID NO: 93864
  derived and/or modified CDS sequence (opt1) from neuraminidase__InfluenzaB__AGZ60176

SEQ ID NO: 93953 - RNA, 1401 nt, Artificial Sequence; identical to SEQ ID NO: 92841
  derived and/or modified CDS sequence (opt1) from neuraminidase__InfluenzaB__AGZ60187

SEQ ID NO: 93954 - RNA, 1401 nt, Artificial Sequence; identical to SEQ ID NO: 92841
  derived and/or modified CDS sequence (opt1) from neuraminidase__InfluenzaB__AGZ60198

SEQ ID NO: 93955 - RNA, 1401 nt, Artificial Sequence; identical to SEQ ID NO: 92841
  derived and/or modified CDS sequence (opt1) from neuraminidase__InfluenzaB__AGZ60210

SEQ ID NO: 93956 - RNA, 1401 nt, Artificial Sequence
  derived and/or modified CDS sequence (opt1) from neuraminidase__InfluenzaB__AGZ60221
augcugcccaccaccauccagacgcucacccuguuccugaccagcggcggggugcuccugucccuguacgucagcgccucccucagcuaccugcuguacuccgacauccuccugaaguucagccgcaccgagaucacggccccgaucaugccccuggacugcgcgaacgccuccaacgugcaggccgugaaccggagcgccaccaagggcgucacccuccugcugcccgagcccgaguggaccuacccgcgccucuccugccccgggagcacguuccagaaggcccugcugaucagcccccaccgguucggcgagaccaaggggaacuccgcgccccucaucauccgcgagccguucaucgccugcggccccaaggagugcaagcacuucgcccugacccacuacgccgcgcagcccggcggguacuacaacggcacccgggaggaccgcaacaagcugcggcaccucaucuccgugaagcuggggaagauccccacgguggagaacagcaucuuccacauggccgccugguccggcagcgccugccacgacgggcgcgaguggaccuacaucggcgucgacggcccggacuccaacgcccugcucaagaucaaguacggggaggcguacaccgacaccuaccacagcuacgccaagaacauccugcggacgcaggaguccgccugcaacugcaucggcggggacugcuaccugaugaucaccgacggccccgccagcggcaucagcgagugccgcuuccucaagauccgggaggggcgcaucaucaaggagaucuuccccaccggccgggugaagcacaccgaggagugcacgugcggguucgccuccaacaagaccaucgagugcgcgugccgcgacaacagcuacaccgccaagcggcccuucgugaagcugaacgucgagaccgacacggccgagauccgccugaugugcaccgagaccuaccucgacaccccgcggcccaacgacggcuccaucacggggcccugcgagagcaacggcgacaagggcuccgggggcaucaagggcggguucgugcaccagcgcauggccagcaagaucgggcggugguacucccgcaccaugagcaagaccaagcggaugggcaugggccuguacgugaaguacgacggggaccccuggaccgacuccgaggcccuggcgcucagcggcgucaugguguccauggaggagccggggugguacagcuucggcuucgagaucaaggacaagaagugcgacgugcccugcaucgggaucgagaugguccacgacggcggcaagacgaccuggcacuccgccgccaccgccaucuacugccugauggggagcggccagcugcucugggacaccgugacgggggugaacaugacccuguga

SEQ ID NO: 93957 - RNA, 1401 nt, Artificial Sequence
  derived and/or modified CDS sequence (opt1) from neuraminidase__InfluenzaB__AGZ60272
augcugcccagcaccauccagacccucacgcuguuccugaccuccggcggggugcuccugagccuguacgucuccgccagccucuccuaccugcuguacagcgacauccuccugaaguucucccagaccgagaucaccgccccgaucaugccccuggacugcgcgaacgccagcaacgugcaggccgugaaccgcuccgccgccaagggcgucacgcuccugcugcccaagcccgaguggaccuacccgcggcucagcugccccggguccaccuuccagaaggcgcugcugaucagcccccaccgcuucggcgagaccaaggggaacuccgcgccccucaucauccgggagccguucaucgccugcggccccacggagugcaagcacuucgcccugacccacuacgccgcccagcccggcggguacuacaacggcacccgcgaggaccggaacaagcugcgccaccucaucagcgugaagcuggggaagauccccaccguggagaacuccaucuuccacauggccgccuggagcggcuccgccugccacgacgggaaggaguggacguacaucggcgucgacggcccggacagcaacgcgcugcucaagaucaaguacggggaggccuacaccgacaccuaccacuccuacgccaagaacauccugcggacccaggagagcgccugcaacugcaucggcggggacugcuaccugaugaucacggacggccccgccagcggcaucuccgagugccgcuuccucaagauccgggaggggcgcaucaucaaggagaucuuccccaccggccgggugaagcacaccgaggagugcacgugcggguucgcgagcaacaagaccaucgagugcgccugccgcgacaacuccuacaccgccaagcggcccuucgugaagcugaacgucgagaccgacaccgccgagauccgccugaugugcacggagaccuaccucgacaccccgcggcccaacgacggcagcaucaccgggcccugcgaguccgacggcgacaagggcagcgggggcaucaagggcggguucgugcaccagcgcauggccuccaagaucgggcggugguacagccgcacgauguccaagaccaagcggaugggcaugggccuguacgugaaguacgacggggaccccuggaccgacagcgaggcgcuggcccucuccggcgucauggugagcauggaggagccggggugguacuccuucggcuucgagaucaaggacaagaagugcgacgugcccugcaucgggaucgagaugguccacgacggcggcaagaccacguggcacagcgccgccaccgccaucuacugccugaugggguccggccagcugcucugggacaccgugaccgggguggacauggcgcuguga

SEQ ID NO: 93958 - RNA, 1398 nt, Artificial Sequence
  derived and/or modified CDS sequence (opt1) from neuraminidase__InfluenzaB__AHL91182
augcugcccagcaccauccagacccucacgcuguuccugaccuccggcggggugcuccugagccuguacgucuccgcccuccugagcuaccugcucuacuccgacauccugcugaaguucagcccgaagaucaucgcccccaccaugucccucgacugcgcgaacgccagcaacgugcaggccgugaaccacuccgccaccaaggagaugaaguuccugccgcccgagcccgaguggacguacccccgccugagcugccagggcuccaccuuccagaaggcccuccugaucagcccccaccgguucggggaggcgaagggcaacuccgcgccccugaucauccgcgagccguucaucgccugcgggcccaaggagugcaagcacuucgcccucacccacuacgccgcccagcccggcggcuacuacaacgggacccgggaggaccgcaacaagcugcggcaccugaucagcgucaaccucggcaagauccccacgguggagaacuccaucuuccacauggccgccuggagcggguccgccugccacgacggccgcgaguggaccuacaucgggguggacggcccggacagcaacgcgcugaucaagaucaaguacggcgaggccuacaccgacaccuaccacuccuacgccaacaacauccugcggacgcaggagagcgccugcaacugcaucgggggcgacugcuaccucaugaucaccgacgggagcgccuccggcaucagcaagugccgcuuccugaagauccgggagggccgcaucaucaaggagaucuuccccaccgggcgggucgagcacaccgaggagugcacgugcggcuucgcguccaacaagaccaucgagugcgccugccgcgacaacagcuacaccgccaagcggcccuucgugaagcugaacguggagaccgacacggccgagauccgccucaugugcaccgagaccuaccuggacacgccccggccggacgacggguccaucaccggccccugcgagagcaacggggacaagggccgcggcggggucaagggcggguucgugcaccagcggauggccuccaagaucggccgcugguacagccggaccauguccaagaccaagcgcauggggauggagcuguacgugaaguacgacggcgaccccuggaccgacagcgacgcgcucgcccccuccggcgucauggugagcauggaggagccggggugguacuccuucggcuucgagaucaaggacaagaagugcgacgugcccugcaucgggaucgagaugguccacgacggcgggaagcggacguggcacagcgccgccaccgccaucuacugccugaugggcuccggccagcugcucugggacaccgugaccgggguggacauggcgcuguga

SEQ ID NO: 93959 - RNA, 1398 nt, Artificial Sequence
  derived and/or modified CDS sequence (opt1) from neuraminidase__InfluenzaB__AHL91193
augcugcccagcaccauccagacccucacgcuguuccugaccuccggcggggugcuccugagccuguacgucuccgcccuccugagcuaccugcucuacuccgacauccugcugaaguucagcccgaagaucaucgcccccaccaugucccucgacugcgcgaacgccagcaacgugcaggccgugaaccacuccgccaccaaggagaugaaguuccugcccagcgagcccgaguggacguacccgcgccuguccugccagggcagcaccuuccagaaggcccuccugaucagcccccaccgguucggggaggcgaagggcaacuccgcgccccugaucauccgcgagcccuucaucgccugcgggccgaaggagugcaagcacuucgcccucacccacuacgccgcccagcccggcggcuacuacaacgggacccgggaggaccgcaacaagcugcggcaccugaucuccgucaaccucggcaagauccccacgguggagaacagcaucuuccacauggccgccugguccgggagcgccugccacgacggccgcgaguggaccuacaucgggguggacggccccgacuccaacgcgcugaucaagaucaaguacggcgaggccuacaccgacaccuaccacagcuacgccaacaacauccugcggacgcaggagagcgccugcaacugcaucgggggcgacugcuaccucaugaucaccgacggguccgccagcggcaucuccaagugccgcuuccugaagauccgggagggccgcaucaucaaggagaucuucccgaccgggcgggucgagcacaccgaggagugcacgugcggcuucgcgagcaacaagaccaucgagugcgccugccgcgacaacuccuacaccgccaagcggcccuucgugaagcugaacguggagaccgacacggccgagauccgccucaugugcaccgagaccuaccuggacacgccccggcccgacgacgggagcaucaccggcccgugcgaguccaacggggacaagggccgcggcggggucaagggcggguucgugcaccagcggauggccagcaagaucggccgcugguacucccggaccaugagcaagaccaagcgcauggggauggagcuguacgugaaguacgacggcgaccccuggaccgacuccgacgcgcucgcccccagcggcgucaugguguccauggaggagcccgggugguacagcuucggcuucgagaucaaggacaagaagugcgacgugccgugcaucgggaucgagaugguccacgacggcgggaagcggacguggcacuccgccgccaccgccaucuacugccugaugggcagcggccagcugcucugggacaccgugaccgggguggacauggcgcuguga

SEQ ID NO: 93960 - RNA, 1398 nt, Artificial Sequence
  derived and/or modified CDS sequence (opt1) from neuraminidase__InfluenzaB__AHL91204
augcugcccagcaccauccagacccucacgcuguuccugaccuccggcggggugcuccugagccuguacgucuccgcccuccugagcuaccugcucuacuccgacgugcugcugaaguucagcccgaagaucaucgcccccaccaugucccucgacugcgcgaacgccagcaacgugcaggccgucaaccacuccgccaccgaggagaugacguuccugcugcccgagcccgaguggaccuacccgcgccucagcugccagggcuccaccuuccagaaggcccugcugaucagcccccaccgguucggggaggcgaagggcaacuccgcgccccucaucauccgcgagcccuucaucgccugcgggccgaaggagugcaagcacuucgcccugacccacuacgccgcccagcccggcggcuacuacaacgggacgcgggaggaccgcaacaagcugcggcaccucaucagcgugaaccugggcaagauccccaccguggagaacuccaucuuccacauggccgccuggagcggguccgccugccacgacggccgcgaguggaccuacaucggggucgacggccccgacagcaacgcgcugaucaagaucaaguacggcgaggccuacaccgacacguaccacuccuacgccaacaacauccuccggacccaggagagcgccugcaacugcaucgggggcgacugcuaccugaugaucaccgacgggagcgccuccggcaucagcaagugccgcuuccugaagauccgggagggccgcaucaucaaggagaucuucccgaccgggcggguggagcacacggaggagugcacgugcggcuucgcguccaacaagaccaucgagugcgccugccgcgacaacaucuacaccgccaagcggcccuucgugaagcucaacgucgagaccgacaccgccgagauccgccugaugugcaccgagaccuaccuggacacgccccggcccgacgacgggagcaucaccggcccgugcgaguccaacggggacaagggccacggcgggaucaagggcggguucgugcaccagcgcauggccagcaagaucggccggugguacucccgcaccaugagcaagaccaagcggauggggauggagcucuacgugaaguacgacggcgaccccuggacggacuccgacgcgcuggcccccagcggcgucaugguguccauggaggagcccgggugguacagcuucggcuucgagaucaaggacaagaagugcgacgugccgugcaucgggaucgagaugguccacgacggcgggaagaagaccuggcacuccgccgccaccgccaucuacugccugaugggcagcggccagcuccugugggacaccgugacggggguggacauggcgcuguga

SEQ ID NO: 93961 - RNA, 1398 nt, Artificial Sequence
  derived and/or modified CDS sequence (opt1) from neuraminidase__InfluenzaB__AHL91215
augcugcccagcaccauccagacccucacgcuguuccugaccuccggcggggugcuccugagccuguacgucuccacccuccugagcuaccugcucuacuccgacauccugcugaaguucagcccgaagaucaucgcccccaccacgucccucgacugcgccaacgcgagcaacgugcaggccgugaaccacuccgccaccaaggagaugaaguuccugcccaccgagcccgaguggaccuacccgcgccugagcugccagggcuccacguuccagaaggcccuccugaucagcccccaccgguucggggaggccaagggcaacuccgcgccccugaucauccgcgagcccuucaucgccugcgggccgaaggagugcaagcacuucgcccucacccacuacgccgcgcagcccggcggcuacuacaacgggacccgggaggaccgcaacaagcugcggcaccugaucagcgucaaccucggcaagauccccaccguggagaacuccaucuuccacauggccgccuggagcggguccgccugccacgacggccgcgaguggacguacaucgggguggacggccccgacagcaacgcccugaucaagaucaaguacggcgaggcguacaccgacaccuaccacuccuacgccaacaacauccugcggacccaggagagcgccugcaacugcaucgggggcgacugcuaccucaugaucacggacgggagcgccuccggcaucagcaagugccgcuuccugaagauccgggagggccgcaucaucaaggagaucuucccgaccgggcgggucgagcacaccgaggagugcacgugcggcuucgccuccaacaagaccaucgagugcgcgugccgcgacaacagcuacaccgccaagcggcccuucgugaagcugaacguggagaccgacaccgccgagauccgccucaugugcacggagaccuaccuggacacgccccggcccgacgacggguccaucaccggcccgugcgagagcaacggggacaagggcuccggcggggucaagggcggguucgugcaccagcgcaugaccagcaagaucggccggugguacucccgcaccaugagcaagaccaagcggauggggauggagcuguacgugaaguacgacggcgaccccuggaccgacuccgacgcccucgcccccagcggcgucaugguguccauggaggagcccgggugguacagcuucggcuucgagaucaaggacaagaagugcgacgugccgugcaucgggaucgagaugguccacgacggcgggaagcgcacguggcacuccgcggccaccgccaucuacugccugaugggcagcggccagcugcucugggacaccgugaccgggguggacauggcccuguga

SEQ ID NO: 93962 - RNA, 1401 nt, Artificial Sequence; identical to SEQ ID NO: 92733
  derived and/or modified CDS sequence (opt1) from neuraminidase__InfluenzaB__AHL91226

SEQ ID NO: 93963 - RNA, 1401 nt, Artificial Sequence; identical to SEQ ID NO: 92734
  derived and/or modified CDS sequence (opt1) from neuraminidase__InfluenzaB__AHL91237

SEQ ID NO: 93964 - RNA, 1401 nt, Artificial Sequence; identical to SEQ ID NO: 92734
  derived and/or modified CDS sequence (opt1) from neuraminidase__InfluenzaB__AHL91248

SEQ ID NO: 93965 - RNA, 1401 nt, Artificial Sequence; identical to SEQ ID NO: 92733
  derived and/or modified CDS sequence (opt1) from neuraminidase__InfluenzaB__AHL91259

SEQ ID NO: 93966 - RNA, 1401 nt, Artificial Sequence; identical to SEQ ID NO: 92733
  derived and/or modified CDS sequence (opt1) from neuraminidase__InfluenzaB__AHL91270

SEQ ID NO: 93967 - RNA, 1398 nt, Artificial Sequence; identical to SEQ ID NO: 92705
  derived and/or modified CDS sequence (opt1) from neuraminidase__InfluenzaB__AHL91281

SEQ ID NO: 93968 - RNA, 1401 nt, Artificial Sequence
  derived and/or modified CDS sequence (opt1) from neuraminidase__InfluenzaB__AHL91303
augcugcccagcaccauccagacccucacgcuguuccugaccuccggcggggugcuccugagccuguacgucuccgccagccucuccuaccugcuguacagcgacauccuccugaaguucuccccgaccgagaucaccgcccccacgaugccccuggacugcgcgaacgccagcaacgugcaggccgugaaccgcuccgccaccaagggcgucacccuccugcugcccgagccggaguggaccuacccccggcucagcugccccggguccacguuccagaaggcccugcugaucagcccccaccgcuucggcgagaccaaggggaacuccgcgccgcucaucauccgggagcccuucaucgccugcggccccaaggagugcaagcacuucgcccugacccacuacgccgcgcagcccggcggguacuacaacggcacccgcgaggaccggaacaagcugcgccaccucaucagcgugaagcuggggaagaucccgacgguggagaacuccaucuuccacauggccgccuggagcggcuccgccugccacgacgggcgggaguggaccuacaucggcgucgacggccccgacagcaacgcccugcucaagaucaaguacggggaggcguacaccgacaccuaccacuccuacgccaacaacauccugcgcacgcaggagagcgccugcaacugcaucggcggggacugcuaccugaugaucaccgacggcagcgccuccggcaucaacgagugccgguuccucaagauccgcgaggggcggaucaucaaggagaucuuccccaccggccgcguggagcacaccgaggagugcacgugcggguucgccagcaacaagaccaucgagugcgcgugccgggacaacuccuacaccgccaagcgccccuucgugaagcugaacgucgagaccgacacggccgagauccggcugaugugcaccgagaccuaccucgacaccccgcgccccgacgacggcagcaucacggggcccugcgaguccaacggcgacaagggcagcgggggcaucaagggcggguucgugcaccagcggauggccuccaagaucgggcgcugguacagccggaccauguccaagacccgccggaugggcaugggccuguacgugaaguacgacggggaccccuggaccgacagcgacgcccuggcgcucuccggcgucauggugagcauggaggagccggggugguacuccuucggcuucgagaucaaggacaagaagugcgacgugcccugcaucgggaucgagaugguccacgacggcggcaagaagacguggcacagcgccgccaccgccaucuacugccugaugggguccggccagcugcucugggacaccgugaccgggguggacauggcccuguga

SEQ ID NO: 93969 - RNA, 1401 nt, Artificial Sequence; identical to SEQ ID NO: 92734
  derived and/or modified CDS sequence (opt1) from neuraminidase__InfluenzaB__AHL91314

SEQ ID NO: 93970 - RNA, 1401 nt, Artificial Sequence; identical to SEQ ID NO: 92734
  derived and/or modified CDS sequence (opt1) from neuraminidase__InfluenzaB__AHL91325

SEQ ID NO: 93971 - RNA, 1401 nt, Artificial Sequence
  derived and/or modified CDS sequence (opt1) from neuraminidase__InfluenzaB__AHL91347
augcugcccagcaccauccagacccucacgcuguuccugaccuccggcggggugcuccugagccuguacgucuccgccagccucuccuaccugcuguacagcgacgugcuccugaaguucuccccgaccgagaucaccgcccccacgaugccccuggacugcgcgaacgccagcaacgugcaggccgucaaccgcuccgccaccaagggcgugacccuccugcugcccgagccggaguggaccuacccccggcucagcugccccggguccacguuccagaaggcccugcugaucagcccccaccgcuucggcgagaccaaggggaacuccgcgccgcucaucauccgggagcccuucaucgccugcggccccaaggagugcaagcacuucgcccugacccacuacgccgcgcagcccggcggguacuacaacggcacccgcgaggaccggaacaagcugcgccaccucaucagcgugaagcuggggaagaucccgacggucgagaacuccaucuuccacauggccgccuggagcggcuccgccugccacgacgggcgggaguggaccuacaucggcguggacggccccgacagcaacgcccugcucaagaucaaguacggggaggcguacaccgacaccuaccacuccuacgccaacaacauccugcgcacgcaggagagcgccugcaacugcaucggcggggacugcuaccugaugaucaccgacggcagcgccuccggcaucagcgagugccgguuccucaagauccgcgaggggcggaucgugaaggagaucuuccccaccggccgcgucgagcacaccgaggagugcacgugcggguucgccuccaacaagaccaucgagugcgcgugccgggacaacagcuacaccgccaagcgccccuucgugaagcugaacguggagaccgacacggccgagauccggcugaugugcaccgagaccuaccucgacaccccgcgccccgaggacggcuccaucacggggcccugcgagagcaacggcgacaagggcuccgggggcaucaagggcggguucguccaccagcggauggccagcaagaucgggcgcugguacucccggaccaugagcaagaccaagcgcaugggcaugggccuguacgugaaguacgacggggaccccuggaccgacuccgacgcccuggcgcucagcggcgugauggucuccauggaggagccggggugguacagcuucggcuucgagaucaaggacaagaagugcgacgugcccugcaucgggaucgagauggugcacgacggcggcaaggagacguggcacuccgccgccaccgccaucuacugccugauggggagcggccagcugcucugggacaccgucaccgggguggacauggcccuguga

SEQ ID NO: 93972 - RNA, 1401 nt, Artificial Sequence; identical to SEQ ID NO: 93971
  derived and/or modified CDS sequence (opt1) from neuraminidase__InfluenzaB__AHL91358

SEQ ID NO: 93973 - RNA, 1401 nt, Artificial Sequence; identical to SEQ ID NO: 92709
  derived and/or modified CDS sequence (opt1) from neuraminidase__InfluenzaB__AHL91369

SEQ ID NO: 93974 - RNA, 1401 nt, Artificial Sequence; identical to SEQ ID NO: 92709
  derived and/or modified CDS sequence (opt1) from neuraminidase__InfluenzaB__AHL91380

SEQ ID NO: 93975 - RNA, 1401 nt, Artificial Sequence
  derived and/or modified CDS sequence (opt1) from neuraminidase__InfluenzaB__AHL91391
augcugcccagcaccauccagacccucacgcuguuccugaccuccggcggggugcuccugagccuguacgucuccgccagccucuccuaccugcuguacagcgacauccuccugaaguucuccccgaaggagaucaccgcccccaccaugccccugaacugcgcgaacgccagcaacgugcaggccgugaaccgcuccgccacgaagggcgucacccucccccugccggagcccgaguggaccuacccccggcugagcugccccggguccaccuuccagaaggcccuccugaucagcccgcaccgcuucggcgagacgaaggggaacuccgcgccccugaucauccgggagcccuucaucgccugcggccccaaggagugcaagcacuucgcccucacccacuacgccgcgcagccgggcggguacuacaacggcacccgcgaggaccggaacaagcugcgccaccugaucagcgugaagcucgggaagauccccaccguggagaacuccaucuuccacauggccgccuggagcggcuccgccugccacgacgggcgggaguggacguacaucggcgucgacggccccgacaacaacgcccugcugaagaucaaguacggggaggcguacaccgacaccuaccacagcuacgccaacaacauccuccgcacccaggaguccgccugcaacugcaucggcggggacugcuaccugaugaucacggacggcagcgccagcggcaucuccgagugccgguuccugaagauccgcgaggggcggaucaucaaggagaucuuccccaccggccgcguggagcacaccgaggagugcacgugcggguucgccagcaacaagaccaucgagugcgcgugccgggacaacuccuacaccgccaagcgcccguucgugaagcucaacgucgagaccgacaccgccgagauccggcugaugugcacggagaccuaccuggacacgccccgccccgacgacggcagcaucaccgggcccugcgaguccaacggcgacaagggcagcgggggcaucaagggcggguucgugcaccagcggauggccuccaagaucgggcgcugguacagccggaccauguccaagaccaagcgcaugggcaugggccucuacgugaaguacgacggggacccguggaucgacagcgacgcccugacccuguccggcgucauggugagcauggaggagcccgggugguacuccuucggcuucgagaucaaggacaagaagugcgacgugcccugcaucgggaucgagaugguccacgacggcggcaagaccacguggcacagcgcggccaccgccaucuacugccucaugggguccggccagcugcugugggacaccgugaccgggguggacauggcccucuga

SEQ ID NO: 93976 - RNA, 1401 nt, Artificial Sequence
  derived and/or modified CDS sequence (opt1) from neuraminidase__InfluenzaB__AHL91413
augcugcccagcaccauccagacccucacgcuguuccugaccuccggcggggugcuccugagccuguacgucuccgccagccucuccuaccugcuguacagcgacauccuccugaaguucaccccgaccgagaucacggcccccaccaugccccuggacugcgcgaacgccuccaacgugcaggccgugaaccucagcgccaccaagggcgucacccugcugcuccccgagccggaguggacguacccccgccuguccugccccgggagcaccuuccagaaggcccugcucaucagcccccaccgguucggcgagaccaaggggaacuccgcgccgcugaucauccgcgagcccuucaucgccugcggccccaaggagugcaagcacuucgcccugacccacuacgccgcgcagcccggcggguacuacaacggcacgcgggaggaccgcaacaagcuccggcaccugaucuccgugaagcuggggaagaucccgaccguggagaacagcaucuuccacauggccgccugguccggcagcgccugccacgacgggaaggaguggaccuacaucggcgucgacggccccgacuccaacgcccuccugaagaucaaguacggggaggcguacaccgacacguaccacagcuacgccaacaacauccugcgcacccaggaguccgccugcaacugcaucggcgggaacugcuaccucaugaucaccgacggcagcgccagcggcaucuccgagugccgguuccugaagauccgcgaggggcggaucaucaaggagaucuuccccaccggccgcgugaagcacacggaggagugcacgugcggguucgccagcaacaagaccaucgagugcgcgugccgggacaacuccuacaccgccaagcgccccuucgugaagcugaacgucgagaccgacaccgccgagauccggcucaugugcaccgagaccuaccuggacacgccgcgccccgacgacggcagcaucaccgggcccugcgaguccaacggcaacaagggcagcgggggcaucaagggcggguucgugcaccagcggauggccuccaagaucgggcgcugguacagccggaccauguccaagaccaagcgcaugggcaugggccuguacgugaaguacgacggggaccccuggacggacagcgacgcccucgcgcuguccggcgucauggugagcauggaggagccggggugguacuccuucggcuucgagaucaaggacaagaagugcgacgugcccugcaucgggaucgagaugguccacgacggcggcaaggagaccuggcacagcgccgccaccgccaucuacugccugaugggguccggccagcuccugugggacaccgugacggggguggacauggcccuguga

SEQ ID NO: 93977 - RNA, 1401 nt, Artificial Sequence
  derived and/or modified CDS sequence (opt1) from neuraminidase__InfluenzaB__AHL91446
augcugcccagcaccauccagacccucacgcuguuccugaccuccggcggggugcuccugagccuguacgucuccgccagccucuccuaccugcuguacagcgacauccuccugaaguucuccccgaccgagaucaccgcccccacgaugccccuggacugcgcgaacgccagcaacgugcaggccgugaaccgcuccgccaccaagggcaugacccuccugcugcccgagccggaguggaccuacccccggcucagcugccccggguccacguuccagaaggcccugcugaucagcccccaccgcuucggcgagaccaaggggaacuccgcgccgcucaucauccgggagcccuucaucgccugcggccccaaggagugcaagcacuucgcccugacccacuacgccgcgcagcccggcggguacuacaacggcacccgcgaggaccggaacaagcugcgccaccucaucagcgucaagcuggggaagaucccgacgguggagaacuccaucuuccacauggccgccuggagcggcuccgccugccacgacgggaaggaguggaccuacaucggcguggacggccccgacagcaacgcccugcucaagaucaaguacggggaggcguacaccgacaccuaccacuccuacgccaacaacauccugcggacgcaggagagcgccugcaacugcaucggcgggaacugcuaccugaugaucaccgacggcagcgccuccggcaucagcgagugccgcuuccucaagauccgggaggggcgcaucaucaaggagaucuuccccaccggccgggucgagcacaccgaggagugcacgugcggguucgccuccaacaagaccaucgagugcgcgugccgcgacaacagcuacaccgccaagcggcccuucgugaagcugaacguggagaccgacacggccgagauccgccugaugugcaccgagaccuaccucgacaccccgcggcccgacgacggcuccaucacggggcccugcgagagcaacggcggcaagggguccggcgggaucaagggcggguucguccaccagcgcauggagagcaagaucggccggugguacucccgcaccaugagcaagaccaagcggaugggcauggggcuguacgugaaguacgacggcgaccccuggaccgacuccgacgcccuggcccucagcggggugauggucuccauggaggagccgggcugguacagcuucggguucgagaucaaggacaaggagugcgacgugcccugcaucggcaucgagauggugcacgacggcgggaaggagacguggcacuccgcggccaccgccaucuacugccugaugggcagcgggcagcugcucugggacaccgucaccggcgugaacauggcccuguga

SEQ ID NO: 93978 - RNA, 1401 nt, Artificial Sequence
  derived and/or modified CDS sequence (opt1) from neuraminidase__InfluenzaB__AHL91457
augcugcccagcaccauccagacccucacgcuguuccugaccuccggcggggugcuccugagccuguacgucuccgccagccucuccuaccugcuguacagcgacauccuccugaaguucuccccgaccgagaucaccgcccccaucaugccccuggacugcgcgaacgccagcaacgugcaggccgugaaccgcuccgccacgaagggcgucacccuccugcugcccgagccggaguggaccuacccccggcucagcugccccggguccaccuuccagaaggcccugcugaucagcccccaccgcuucggcgagacgaaggggaacuccgcgccgcucaucauccgggagcccuucaucgccugcggccccaaggagugcaagcacuucgcccugacccacuacgccgcgcagcccggcggguacuacaacggcacccgcggggaccggaacaagcugcgccaccucaucagcgugaagcugggcaagaucccgaccguggagaacuccaucuuccacauggccgccuggagcggguccgccugccacgacggcaaggaguggacguacaucggcgucgacgggcccgacaacaacgcccugcucaagaucaaguacggcgaggcguacaccgacaccuaccacagcuacgccaacaacacccugcggacgcaggaguccgccugcaacugcaucgggggcaacugcuaccugaugaucaccgacggcagcgccagcgggaucuccgagugccgcuuccucaagauccgggagggccgcaucaucaaggagaucuuccccaccgggcgggugaagcacaccgaggagugcacgugcggcuucgccagcaacaagaccaucgagugcgcgugccgcgacaacuccuacaccgccaagcggcccuucgugaagcugaacgucgagaccgacacggccgagauccgccugaugugcaccgagaccuaccucgacaccccgcggcccgacgacgggagcaucacgggccccugcgaguccaacggcaacaaggggagcggcgggaucaagggcggguucgugcaccagcgcauggccuccaagaucggccggugguacagccgcaccauguccaagaccaagcggaugggcauggggcuguacgugaaguacgacggcgaccccuggaccgacagcgacgcccuggcgcucuccggggucauggugagcauggaggagccgggcugguacuccuucggguucgagaucaaggacaagaagugcgacgugcccugcaucggcaucgagaugguccacgacggcgggaaggagacguggcacagcgccgccaccgccaucuacugccugaugggcuccgggcagcugcucugggacaccgugaccggcguggacauggcccuguga

SEQ ID NO: 93979 - RNA, 1401 nt, Artificial Sequence
  derived and/or modified CDS sequence (opt1) from neuraminidase__InfluenzaB__AHL91468
augcugcccagcaccauccagacccucacgcuguuccugaccuccggcggggugcuccugagccuguacgucuccgccagccucuccuaccugcuguacagcgacauccuccugaaguucuccccgaccgagaucaccgcccccacgaugccccuggacugcgcgaacgccagcaacgugcaggccgugaaccgcuccgccaccaagggcgucacccuccugcugcccgagccggaguggaccuacccccggcucagcugccccggguccacguuccagaaggcccugcugaucagcccccaccgcuucggcgagaccaaggggaacuccgcgccgcucaucauccgggagcccuucaucgccugcggccccaaggagugcaagcacuucgcccugacccacuacgccgcgcagcccggcggguacuacaacggcacccgcgaggaccggaacaagcugcgccaccucaucagcgugaagcuggggaagaucccgacgguggagaacuccaucuuccacauggccgccuggagcggcuccgccugccacgacgggaaggaguggaccuacaucggcgucgacggccccgacagcaacgcccugcucaagaucaaguacggggaggcguacaccgacaccuaccacuccuacgccaacaacauccugcggacgcaggagagcgccugcaacugcaucggcgggaacugcuaccugaugaucaccgacggcagcgccuccggcaucagcgagugccgcuuccucaagauccgggaggggcgcaucaucaaggagaucuuccccaccggccgggugaagcacaccgaggagugcacgugcggguucgccuccaacaagaccaucgagugcgcgugccgcgacaacagcuacaccgccaagcggcccuucgugaagcugaacgucgagaccgacacggccgagauccgccugaugugcaccgagaccuaccucgacaccccgcggcccgacgacggcuccaucacggggcccugcgagagcaacggcgacaagggcuccgggggcaucaagggcggguucgugcaccagcgcauggccagcaagaucgggcggugguacucccgcaccaugagcaagaccaagcggaugggcaugggccuguacgugaaguacgacggggaccccuggaccgacuccgacgcccuggcgcucagcggcgucaugguguccgugggggagccgggcugguacagcuucggguucgagaucaaggacaagaagugcgacguccccugcaucggcaucgagauggugcacgacggcgggaaggagacguggcacuccgccgccaccgccaucuacugccugaugggcagcgggcagcugcucugggacaccgugaccggcgucgacauggcccuguga

SEQ ID NO: 93980 - RNA, 1401 nt, Artificial Sequence
  derived and/or modified CDS sequence (opt1) from neuraminidase__InfluenzaB__AHL91479
augcugcccagcaccauccagacccucacgcuguuccugaccuccggcggggugcuccugagccuguacgucuccgccagccucuccuaccugcuguacagcgacauccuccugaaguucuccccgaccgagaucaccgcccccacgaugcccagcgacugcgcgaacgccuccaacgugcaggccgugaaccgcagcgccaccaagggcgucacccugcuccugcccgagccggaguggaccuacccccggcuguccugccccgggagcacguuccagaaggcccuccugaucagcccccaccgcuucggcgagaccaaggggaacuccgcgccgcugaucauccgggagcccuucaucgccugcggccccaaggagugcaagcacuucgcccucacccacuacgccgcgcagcccggcggguacuacaacggcacccgcggggaccggaacaagcugcgccaccugaucuccgugaagcucggcaagaucccgacgguggagaacagcaucuuccacauggccgccugguccgggagcgccugccacgacggcaaggaguggaccuacaucggcgucgacgggcccgacuccaacgcccugcugaagaucaaguacggcgaggcguacaccgacaccuaccacagcuacgccaacaacauccuccggacgcaggagagcgccugcaacugcaucgggggcaacugcuaccugaugaucaccgacggcuccgccagcgggaucuccgagugccgcuuccugaagauccgggagggccgcaucaucaaggagaucuuccccaccgggcgggugaagcacaccgaggagugcacgugcggcuucgccagcaacaagaccaucgagugcgcgugccgcgacaacuccuacaccgccaagcggcccuucgugaagcucaacgucgagaccgacacggccgagauccgccugaugugcaccgagaccuaccuggacaccccgcggcccgacgacgggagcaucacgggccccugcgaguccaacggcgacaaggggagcggcgggaucaagggcggguucgugcaccagcgcauggccuccaagaucggccggugguacagccgcaccauguccaagaccaagcggaugggcauggggcucuacgugaaguacgacggcgaccccuggaccgacagcgacgcccuggcgcuguccggggucauggugagcauggaggagccgggcugguacuccuucggguucgagaucaaggacaagaagugcgacgugcccugcaucggcaucgagaugguccacgacggcgggaaggagacguggcacagcgccgccaccgccaucuacugccucaugggcuccgggcagcugcugugggacaccgugaccggcguggacauggcccucuga

SEQ ID NO: 93981 - RNA, 1401 nt, Artificial Sequence
  derived and/or modified CDS sequence (opt1) from neuraminidase__InfluenzaB__AHL91501
augcugcccagcaccauccagacccucacgcuguuccugaccuccggcggggugcuccugagccuguacgucuccgccagccucuccuaccugcuguacagcgacauccuccugaaguucuccccgaccgagaucaccgcccccacgaugccccuggacugcgcgaacgccagcaacgugcaggccgugaaccgcuccgccaccaagggcaugacccuccugcugcccgagccggaguggaccuacccccggcucagcugccccggguccacguuccagaaggcccugcugaucagcccccaccgcuucggcgagaccaaggggaacuccgcgccgcucaucauccgggagcccuucaucgccugcggccccaaggagugcaagcacuucgcccugacccacuacgccgcgcagcccggcggguacuacaacggcacccgcgaggaccggaacaagcugcgccaccucaucagcgucaagcuggggaagaucccgacgguggagaacuccaucuuccacauggccgccuggagcggcuccgccugccacgacgggaaggaguggaccuacaucggcguggacggccccgacagcaacgcccugcucaagaucaaguacggggaggcguacaccgacaccuaccacuccuacgccaacaacauccugcggacgcaggagagcgccugcaacugcaucggcgggaacugcuaccugaugaucaccgacggcagcgccuccggcaucagcgagugccgcuuccucaagauccgggaggggcgcaucaucaaggagaucuuccccaccggccgggucgagcacaccgaggagugcacgugcggguucgccuccaacaagaccaucgagugcgcgugccgcgacaacagcuacaccgccaagcggcccuucgugaagcugaacguggagaccgacacggccgagauccgccugaugugcaccgagaccuaccucgacaccccgcggcccgacgacggcuccaucacggggcccugcgagagcaacggcggcaagggguccggcgggaucaagggcggguucguccaccagcgcauggagagcaagaucggccggugguacucccgcaccaugagcaagaccaagcggaugggcauggggcuguacgugaaguacgacggcgaccccuggaccgacuccgacgcccuggcccucagcggggugauggucuccauggaggagccgggcugguacagcuucggguucgagaucaaggacaagaagugcgacgugcccugcaucggcaucgagauggugcacgacggcgggaaggagacguggcacuccgcggccaccgccaucuacugccugaugggcagcgggcagcugcucugggacaccgucaccggcgugaacauggcccuguga

SEQ ID NO: 93982 - RNA, 1401 nt, Artificial Sequence
  derived and/or modified CDS sequence (opt1) from neuraminidase__InfluenzaB__AHL91512
augcugcccagcaccauccagacccucacgcuguuccugaccuccggcggggugcuccugagccuguacgucuccgccagccucuccuaccugcuguacagcgacauccuccugaaguucuccccgaccgagaucaccgcccccacgaugccccuggacugcgcgaacgccagcaacgugcaggccgugaaccgcuccgccaccaagggcgucacccuccugcugcccgagccggaguggaccuacccccggcucagcugccccggguccaucuuccagaaggcccugcugaucagcccccaccgcuucggcgagacgaaggggaacuccgcgccgcucaucauccgggagcccuucaucgccugcggccccaaggagugcaagcacuucgcccugacccacuacgccgcgcagcccggcggguacuacaacggcacccgcggggaccggaacaagcugcgccaccucaucagcgugaagcugggcaagaucccgaccguggagaacuccaucuuccacauggccgccuggagcggguccgccugccacgacggcaaggaguggacguacaucggcgucgacgggcccgacagcaacgcccugcucaagaucaaguacggcgaggcguacaccgacaccuaccacuccuacgccaacaacauccugcggacccaggagagcgccugcaacugcaucgggggcaacugcuaccugaugaucacggacggcagcgccuccgggaucagcgagugccgcuuccucaagauccgggagggccgcaucaucaaggagaucuuccccaccgggcgggugaagcacaccgaggagugcacgugcggcuucgccuccaacaagaccaucgagugcgcgugccgcgacaacagcuacaccgccaagcggcccuucgugaagcugaacgucgagaccgacaccgccgagauccgccugaugugcacggagaccuaccucgacaccccgcggcccgacgacggguccaucaccggccccugcgagagcaacggcgacaagggguccggcgggaucaagggcggguucgugcaccagcgcauggccagcaagaucggccggugguacucccgcacgaugagcaagaccaagcggaugggcauggggcuguacgugaaguacgacggcgaccccuggaccgacuccgacgcccuggcgcucagcggggucaugguguccauggaggagccgggcugguacagcuucggguucgagaucaaggacaagaagugcgacgugcccugcaucggcaucgagaugguccacgacggcgggaaggagaccuggcacuccgccgccacggccaucuacugccugaugggcagcgggcagcugcucugggacaccgugaccggcguggacauggcccuguga

SEQ ID NO: 93983 - RNA, 1401 nt, Artificial Sequence
  derived and/or modified CDS sequence (opt1) from neuraminidase__InfluenzaB__AHL91523
augcugcccagcaccauccagacccucacgcuguuccugaccuccggcggggugcuccugagccuguacgucuccgccagccucuccuaccugcuguacagcgacauccuccugaaguucuccccgaccgagaucaccgcccccacgaugccccuggacugcgcgaacgccagcaacgugcaggccgugaaccgcuccgccaccaagggcgucacccuccugcugcccgagccggaguggaccuacccccggcucagcugccccggguccacguuccagaaggcccugcugaucagcccccaccgcuucggcgagaccaaggggaacuccgcgccgcucaucauccgggagcccuucaucgccugcggccccaaggagugcaagcacuucgcccugacccacuacgccgcgcagcccggcggguacuacaacggcacccgcggggaccggaacaagcugcgccaccucaucagcgugaagcugggcaagaucccgacgguggagaacuccaucuuccacauggccgccuggagcggguccgccugccacgacggcaaggaguggaccuacaucggcgucgacgggcccgacaacaacgcccugcucaagaucaaguacggcgaggcguacaccgacaccuaccacagcuacgccaacaacauccugcggacgcaggaguccgccugcaacugcaucgggggcaacugcuaccugaugaucaccgacggcagcgccagcgggaucuccgagugccgcuuccucaagauccgggagggccgcaucaucaaggagaucuuccccaccgggcgggugaagcacaccgaggagugcacgugcggcuucgccagcaacaagaccaucgagugcgcgugccgcgacaacuccuacaccgccaagcggcccuucgugaagcugaacgucgagaccgacacggccgagauccgccugaugugcaccgagaccuaccucgacaccccgcggcccgacgacgggagcaucacgggccccugcgaguccaacggcgacaaggggagcggcgggaucaagggcggguucgugcaccagcgcauggccuccaagaucggccggugguacagccgcaccauguccaagaccaagcggaugggcauggggcuguacgugaaguacgacggcgaccccuggaccgacagcgacgcccuggcgcucuccggggucauggugagcauggaggagccgggcugguacuccuucggguucgagaucaaggacaagaagugcgacgugcccugcaucggcaucgagaugguccacgacggcgggaaggagacguggcacagcgccgccaccgccaucuacugccugaugggcuccgggcagcugcucugggacaccgugaccggcguggacauggcccuguga

SEQ ID NO: 93984 - RNA, 1401 nt, Artificial Sequence; identical to SEQ ID NO: 93981
  derived and/or modified CDS sequence (opt1) from neuraminidase__InfluenzaB__AHL91534

SEQ ID NO: 93985 - RNA, 1401 nt, Artificial Sequence
  derived and/or modified CDS sequence (opt1) from neuraminidase__InfluenzaB__AHL91545
augcugcccagcaccauccagacccucacgcuguuccugaccuccggcggggugcuccugagccuguacgucuccgccagccucuccuaccugcuguacagcgacauccuccugaaguucuccccgaccgagaucaccgcccccacgaugccccuggacugcgcgaacgccagcaacgugcaggccgugaaccgcuccgccaccaagggcgucacccuccugcugcccgagccggaguggaccuacccccggcucagcugccccggguccacguuccagaaggcccugcugaucagcccccaccgcuucggcgagaccaaggggaacuccgcgccgcucaucauccgggagcccuucaucgccugcggccccaaggagugcaagcacuucgcccugacccacuacgccgcgcagcccggcggguacuacaacggcacccgcggggaccggaacaagcugcgccaccucaucagcgugaagcugggcaagaucccgacgguggagaacuccaucuuccacauggccgccuggagcggguccgccugccacgacggcaaggaguggaccuacaucggcgucgacgggcccgacagcaacgcccugcucaagaucaaguacggcgaggcguacaccgacaccuaccacuccuacgccaacaacauccugcggacgcaggagagcgccugcaacugcaucgggggcaacugcuaccugaugaucaccgacggcagcgccuccgggaucagcgagugccgcuuccucaagauccgggagggccgcaucaucaaggagaucuuccccaccgggcgggugaagcacaccgaggagugcacgugcggcuucgccuccaacaagaccaucgagugcgcgugccgcgacaacagcuacaccgccaagcggcccuucgugaagcugaacgucgagaccgacacggccgagauccgccugaugugcaccgagaccuaccucgacaccccgcggcccgacgacggguccaucacgggccccugcgagagcaacggcgacaagggguccggcgggaucaagggcggguucgugcaccagcgcaugaccagcaagaucggccggugguacucccgcaccaugagcaagaccaagcggaugggcauggggcuguacgugaaguacgacggcgaccccuggacggacuccgacgcccuggcccucagcggggucaugguguccauggaggagccgggcugguacagcuucggguucgagaucaaggacaagaagugcgacgugcccugcaucggcaucgagaugguccacgacggcgggaagggcaccuggcacuccgcggccaccgccaucuacugccugauggggagcggccagcugcucugggacaccgugacgggcguggacauggcccuguga

SEQ ID NO: 93986 - RNA, 1401 nt, Artificial Sequence; identical to SEQ ID NO: 93981
  derived and/or modified CDS sequence (opt1) from neuraminidase__InfluenzaB__AHL91556

SEQ ID NO: 93987 - RNA, 1401 nt, Artificial Sequence; identical to SEQ ID NO: 93981
  derived and/or modified CDS sequence (opt1) from neuraminidase__InfluenzaB__AHL91578

SEQ ID NO: 93988 - RNA, 1401 nt, Artificial Sequence; identical to SEQ ID NO: 92909
  derived and/or modified CDS sequence (opt1) from neuraminidase__InfluenzaB__AHL91589

SEQ ID NO: 93989 - RNA, 1401 nt, Artificial Sequence
  derived and/or modified CDS sequence (opt1) from neuraminidase__InfluenzaB__AHL91600
augcugcccagcaccauccagacccucacgcuguuccugaccaccggcggggugcuccugucccuguacgucagcgccucccucagcuaccugcuguacuccgacauccuccugaaguucagcccgaccgagaucacggcccccaccaugccccuggacugcgcgaacgccuccaacgugcaggccgugaaccgcagcgccaccaagggcgucaccuuccuccugcccgagccggaguggacguacccccggcuguccugccccgggagcaccuuccagaaggcccuccugaucagcccccaccgcuucggcgagaccaaggggaacuccgcgccgcugaucauccgggagcccuucaucgccugcggccccaaggagugcaagcacuucgcccucacccacuacgccgcgcagcccggcggguacuacaacggcacgcgcggggaccggaacaagcugcgccaccugaucuccgugaagcucggcaagaucccgaccguggagaacagcaucuuccacauggccgccugguccgggagcgccugccacgacggcaaggaguggaccuacaucggcgucgacgggcccgacuccaacgcccugcugaagaucaaguacggcgaggcguacaccgacacguaccacagcuacgccaacaacauccuccggacccaggaguccgccugcaacugcaucgggggcaacugcuaccugaugaucaccgacggcagcgccagcgggaucuccgagugccgcuuccugaagauccgggagggccgcaucaucaaggagaucuuccccaccgggcgggugaagcacacggaggagugcacgugcggcuucgccagcaacaagaccaucgagugcgcgugccgcgacaacuccuacaccgccaagcggcccuucgugaagcucaacgucgagaccgacaccgccgagauccgccugaugugcaccgagaccuaccuggacacgccgcggcccgacgacgggagcaucaccggccccugcgaguccaacggcgacaaggggagcggcgggaucaagggcggguucgugcaccagcgcauggccuccaagaucggccggugguacagccgcaccauguccaagaccaagcggaugggcauggggcucuacgugaaguacgacggcgaccccuggacggacagcgacgcccuggcgcuguccggggucauggugagcauggaggagccgggcugguacuccuucggguucgagaucaaggacaagaagugcgacgugcccugcaucggcaucgagaugguccacgacggcgggaaggagaccuggcacagcgccgccaccgccaucuacugccucaugggcuccgggcagcugcugugggacaccgugacgggcguggacauggcccucuga

SEQ ID NO: 93990 - RNA, 1401 nt, Artificial Sequence; identical to SEQ ID NO: 93989
  derived and/or modified CDS sequence (opt1) from neuraminidase__InfluenzaB__AHL91611

SEQ ID NO: 93991 - RNA, 1401 nt, Artificial Sequence; identical to SEQ ID NO: 93981
  derived and/or modified CDS sequence (opt1) from neuraminidase__InfluenzaB__AHL91622

SEQ ID NO: 93992 - RNA, 1401 nt, Artificial Sequence; identical to SEQ ID NO: 93982
  derived and/or modified CDS sequence (opt1) from neuraminidase__InfluenzaB__AHL91633

SEQ ID NO: 93993 - RNA, 1401 nt, Artificial Sequence; identical to SEQ ID NO: 93982
  derived and/or modified CDS sequence (opt1) from neuraminidase__InfluenzaB__AHL91644

SEQ ID NO: 93994 - RNA, 1401 nt, Artificial Sequence
  derived and/or modified CDS sequence (opt1) from neuraminidase__InfluenzaB__AHL91655
augcugcccagcaccauccagacccucacgcuguuccugaccuccggcggggugcuccugagccuguacgucuccgccagccucuccuaccugcuguacagcgacauccuccugaaguucuccccgaccgagaucaccgcccccacgaugccccuggacugcgcgaacgccagcaacgugcaggccgugaaccgcuccgccaccaaggaggucacccuccugcugcccgagccggaguggaccuacccccggcucagcugccccggcuccacguuccagaaggcccugcugaucagcccccaccgcuucggggagaccaagggcaacuccgcgccgcucaucauccgggagcccuucaucgccugcgggcccaaggagugcaagcacuucgcccugacccacuacgccgcgcagcccggcggcuacuacaacgggacccgcggcgaccggaacaagcugcgccaccucaucagcgugaagcuggggaagaucccgacgguggagaacuccaucuuccacauggccgccuggagcggcuccgccugccacgacgggaaggaguggaccuacaucggcgucgacggccccgacagcaacgcccugcucaagaucaaguacggggaggcguacaccgacaccuaccacuccuacgccaacaacauccugcggacgcaggagagcgccugcaacugcaucggcgggaacugcuaccugaugaucaccgacggcagcgccuccggcaucagcgagugccgcuuccucaagauccgggaggggcgcaucaucaaggagaucuuccccaccggccgggugaagcacaccgaggagugcacgugcggguucgccuccaacaagaccaucgagugcgcgugccgcgacaacagcuacaccgccaagcggcccuucgugaagcugaacgucgagaccgacacggccgagauccgccugaugugcaccgagaccuaccucgacaccccgcggcccgacgacggcuccaucacggggcccugcgagagcaacggcgacaagggcuccgggggcaucaagggcggguucgugcaccagcgcauggccagcaagaucgggcggugguacucccgcaccaugagcaagaccaagcggaugggcaugggccuguacgugaaguacgacggggaccccuggaccgacuccgacgcccuggcgcucagcggcgucaugguguccauggaggagccggggugguacagcuucggcuucgagaucaaggacaagaagugcgacgugcccugcaucgggaucgagaugguccacgacggcggcaaggagacguggcacuccgccgccaccgccaucuacugccugauggggagcggccagcugcucugggacaccgugaccgggguggacauggcccuguga

SEQ ID NO: 93995 - RNA, 1401 nt, Artificial Sequence; identical to SEQ ID NO: 93981
  derived and/or modified CDS sequence (opt1) from neuraminidase__InfluenzaB__AHL91666

SEQ ID NO: 93996 - RNA, 1401 nt, Artificial Sequence; identical to SEQ ID NO: 93982
  derived and/or modified CDS sequence (opt1) from neuraminidase__InfluenzaB__AHL91677

SEQ ID NO: 93997 - RNA, 1401 nt, Artificial Sequence; identical to SEQ ID NO: 93983
  derived and/or modified CDS sequence (opt1) from neuraminidase__InfluenzaB__AHL91688

SEQ ID NO: 93998 - RNA, 1401 nt, Artificial Sequence; identical to SEQ ID NO: 92711
  derived and/or modified CDS sequence (opt1) from neuraminidase__InfluenzaB__AHL91699

SEQ ID NO: 93999 - RNA, 1401 nt, Artificial Sequence
  derived and/or modified CDS sequence (opt1) from neuraminidase__InfluenzaB__AHL91710
augcugcccagcaccauccagacccucacgcuguuccugaccuccggcggggugcuccugagccuguacgucuccgccagccucuccuaccugcuguacagcgacauccuccugaaguucuccccgaccgagaucaccgcccccacgaugccccuggacugcgcgaacgccagcaacgugcaggccgugaaccacuccgccaccaagggcgucacccuccugcugcccgagccggaguggaccuacccccgccucagcugccccggguccacguuccagaaggcccugcugaucagcccccaccgguucggcgagaccaaggggaacuccgcgccgcucaucauccgcgagcccuucaucgccugcggccccaaggagugcaagcacuucgcccugacccacuacgccgcgcagcccggcggguacuacaacggcacccgcggggaccggaacaagcugcggcaccucaucagcgugaagcugggcaagaucccgacgguggagaacuccaucuuccacauggccgccuggagcggguccgccugccacgacggcaaggaguggaccuacaucggcgucgacgggcccgacagcaacgcccugcucaagaucaaguacggcgaggcguacaccgacaccuaccacuccuacgccaacaacauccugcgcacgcaggagagcgccugcaacugcaucgggggcaacugcuaccugaugaucaccgacggcagcgccuccgggaucagcgagugccgguuccucaagauccgcgagggccggaucaucaaggagaucuuccccaccgggcgcgugaagcacaccgaggagugcacgugcggcuucgccuccaacaagaccaucgagugcgcgugccgggacaacagcuacaccgccaagcgccccuucgugaagcugaacgucgagaccgacacggccgagauccggcugaugugcaccgagaccuaccucgacaccccgcgccccgacgacggguccaucacgggccccugcgagagcaacggcgacaagggguccggcgggaucaagggcggguucgugcaccagcggauggccagcaagaucggccgcugguacucccggaccaugagcaagaccaagcgcaugggcauggggcuguacgugaaguacgacggcgaccccuggaccgacuccgacgcccuggcgcucagcggggucaugguguccauggaggagccgggcugguacagcuucggguucgagaucaaggacaagaagugcgacgugcccugcaucggcaucgagaugguccacgacggcgggaaggagacguggcacuccgccgccaccgccaucuacugccugaugggcagcgggcagcugcucugggacaccgugaccggcguggacauggcccuguga

SEQ ID NO: 94000 - RNA, 1401 nt, Artificial Sequence; identical to SEQ ID NO: 92638
  derived and/or modified CDS sequence (opt1) from neuraminidase__InfluenzaB__AHL91721

SEQ ID NO: 94001 - RNA, 1401 nt, Artificial Sequence; identical to SEQ ID NO: 92706
  derived and/or modified CDS sequence (opt1) from neuraminidase__InfluenzaB__AHL91732

SEQ ID NO: 94002 - RNA, 1401 nt, Artificial Sequence; identical to SEQ ID NO: 92638
  derived and/or modified CDS sequence (opt1) from neuraminidase__InfluenzaB__AHL91743

SEQ ID NO: 94003 - RNA, 1401 nt, Artificial Sequence
  derived and/or modified CDS sequence (opt1) from neuraminidase__InfluenzaB__AHL91754
augcugcccagcaccauccagacccucacgcugcugcucaccuccggcggggugcugcugagccucuacgucuccgccagccuguccuaccugcucuacagcgacauccugcugaaguucuccccgaccgagaucaccgcccccacgaugccccucgacugcgcgaacgccagcaacgugcaggccgugaaccgcuccgccaccaagggcgucacccugcugcuccccgagccggaguggaccuacccccggcugagcugccccggguccacguuccagaaggcccugcucaucagcccccaccgcuucggcgagaccaaggggaacuccgcgccgcugaucauccgggagcccuucaucgccugcggccccaaggagugcaagcacuucgcccugacccacuacgccgcgcagcccggcggguacuacaacggcacccgcggggaccggaacaagcuccgccaccugaucagcgugaagcugggcaagaucccgacgguggagaacuccaucuuccacauggccgccuggagcggguccgccugccacgacggcaaggaguggaccuacaucggcgucgacgggcccgacagcaacgcccuccugaagaucaaguacggcgaggcguacaccgacaccuaccacuccuacgccaacaacauccugcggacgcaggagagcgccugcaacugcaucgggggcaacugcuaccucaugaucaccgacggcagcgccuccgggaucagcgagugccgcuuccugaagauccgggagggccgcaucaucaaggagaucuuccccaccgggcgggugaagcacaccgaggagugcacgugcggcuucgccuccaacaagaccaucgagugcgcgugccgcgacaacagcuacaccgccaagcggcccuucgugaagcugaacgucgagaccgacacggccgagauccgccucaugugcaccgagaccuaccuggacaccccgcggcccgacgacggguccaucacgggccccugcgagagcaacggcgacaagggguccggcgggaucaagggcggguucgugcaccagcgcauggccagcaagaucggccggugguacucccgcaccaugagcaagaccaagcggaugggcauggggcuguacgugaaguacgacggcgaccccuggaccgacuccgacgcccucgcgcugagcggggucaugguguccauggaggagccgggcugguacagcuucggguucgagaucaaggacaagaagugcgacgugcccugcaucggcaucgagaugguccacgacggcgggaaggagacguggcacuccgccgccaccgccaucuacugccugaugggcagcgggcagcuccugugggacaccgugaccggcguggacauggcccuguga

SEQ ID NO: 94004 - RNA, 1401 nt, Artificial Sequence; identical to SEQ ID NO: 92638
  derived and/or modified CDS sequence (opt1) from neuraminidase__InfluenzaB__AHL91765

SEQ ID NO: 94005 - RNA, 1401 nt, Artificial Sequence
  derived and/or modified CDS sequence (opt1) from neuraminidase__InfluenzaB__AHL91776
augcugcccagcaccauccagacccucacgcuguuccugaccuccggcggggugcuccugagccuguacgucuccgccagccucuccuaccugcuguacagcgacauccuccugaaguucuccccgaccgagaucaccgcccccacgaugccccuggacugcgcgaacgccagcaacgugcaggccgugaaccgcuccgccaccaagggcgucacccuccugcugcccgagccggaguggaccuacccccggcucagcugccccggguccacguuccagaaggcccugcugaucagcccccaccgcuucggcgagaccaaggggaacuccgcgccgcucaucauccgggagcccuucaucgccugcggccccaaggagugcaagcacuucgcccugacccacuacgccgcgcagcccggcggguacuacaacggcacccgcggggaccggaacaagcugcgccaccucaucagcgugaagcugggcaagaucccgacgguggagaccuccaucuuccacauggccgccuggagcggguccgccugccacgacggcaaggaguggaccuacaucggcgucgacgggcccgacaacaacgcccugcucaagaucaaguacggcgaggcguacaccgacacguaccacagcuacgccaacaacauccugcggacccaggaguccgccugcaacugcaucgggggcaacugcuaccugaugaucaccgacggcagcgccagcgggguguccgagugccgcuuccucaagauccgggagggccgcaucaucaaggagaucuuccccaccgggcgggugaagcacacggaggagugcacgugcggcuucgccagcaacaagaccaucgagugcgcgugccgcgacaacuccuacaccgccaagcggcccuucgucaagcugaacguggagaccgacaccgccgagauccgccugaugugcaccgagaccuaccucgacacgccgcggcccgacgacgggagcaucaccggccccugcgaguccaacggcgacaaggggagcggcgggaucaagggcggguucgugcaccagcgcauggccuccaagaucggccggugguacagccgcaccauguccaagaccgagcggaugggcauggggcuguacgucaaguacgacggcgaccccugggccgacagcgacgcgcuggcccucuccggggugauggugagcauggaggagccgggcugguacuccuucggguucgagaucaaggacaagaagugcgacguccccugcaucggcaucgagauggugcacgacggcgggaaggagacguggcacagcgccgccaccgccaucuacugccugaugggcuccgggcagcugcucugggacaccgugaccggcgucgacauggcgcuguga

SEQ ID NO: 94006 - RNA, 1401 nt, Artificial Sequence; identical to SEQ ID NO: 94005
  derived and/or modified CDS sequence (opt1) from neuraminidase__InfluenzaB__AHL91787

SEQ ID NO: 94007 - RNA, 1401 nt, Artificial Sequence; identical to SEQ ID NO: 94005
  derived and/or modified CDS sequence (opt1) from neuraminidase__InfluenzaB__AHL91798

SEQ ID NO: 94008 - RNA, 1401 nt, Artificial Sequence; identical to SEQ ID NO: 92642
  derived and/or modified CDS sequence (opt1) from neuraminidase__InfluenzaB__AHL91809

SEQ ID NO: 94009 - RNA, 1401 nt, Artificial Sequence
  derived and/or modified CDS sequence (opt1) from neuraminidase__InfluenzaB__AHL91820
augcugcccagcaccauccagacccucacgcuguuccugaccuccggcggggugcuccugagccuguacgucuccgccagccucuccuaccugcuguacagcgacauccuccugaaguucuccccgaccgagaucaccgcccccacgaugccccuggacugcgcgaacgccagcaacgugcaggccgugaaccgcuccgccaccaagggcgucacccuccugcugcccgagccggaguggaccuacccccggcucagcugccccggguccacguuccagaaggcccugcugaucagcccccaccgcuucggcgagaccaaggggaacuccgcgccgcucaucauccgggagcccuucaucgccugcggccccaacgagugcaagcacuucgcccugacccacuacgccgcgcagcccggcggguacuacaacggcacccgcggggaccggaacaagcugcgccaccucaucagcgugaagcugggcaagaucccgacgguggagaacuccaucuuccacauggccgccuggagcggguccgccugccacgacggcaaggaguggaccuacaucggcgucgacgggcccgacaacaacgcccugcucaagaucaaguacggcgaggcguacaccgacaccuaccacagcuacgccaacaacauccugcggacgcaggaguccgccugcaacugcaucgggggcaacugcuaccugauggugaccgacggcagcgccagcgggguguccgagugccgcuuccucaagauccgggagggccgcaucaucaaggagaucuuccccaccgggcgggucaagcacaccgaggagugcacgugcggcuucgccagcaacaagaccaucgagugcgcgugccgcgacaacuccuacaccgccaagcggcccuucgugaagcugaacguggagaccgacacggccgagauccgccugaugugcaccgagaccuaccucgacaccccgcggcccgacgacgggagcaucacgggccccugcgaguccaacggcgacaaggggagcggcgggaucaagggcggguucguccaccagcgcauggccuccaagaucggccggugguacagccgcaccauguccaagaccgagcggaugggcauggggcuguacgugaaguacgacggcgaccccugggccgacagcgacgcgcuggcccucuccggggugauggucagcauggaggagccgggcugguacuccuucggguucgagaucaaggacaagaagugcgacgugcccugcaucggcaucgagauggugcacgacggcgggaaggagaccuggcacagcgccgccacggccaucuacugccugaugggcuccgggcagcugcucugggacaccgucaccggcguggacauggcgcuguga

SEQ ID NO: 94010 - RNA, 1401 nt, Artificial Sequence
  derived and/or modified CDS sequence (opt1) from neuraminidase__InfluenzaB__AHL91831
augcugcccagcaccauccagacccucacgcuguuccugaccuccggcggggugcuccugagccuguacgucuccgccagccucuccuaccugcuguacagcgacauccuccugaaguucuccccgaccgagaucaccgcccccacgaugccccuggacugcgcgaacgccagcaacgugcaggccgugaaccgcuccgccaccaagggcgucacccuccugcugcccgagccggaguggaccuacccccggcucagcugccccggguccacguuccagaaggcccugcugaucagcccccaccgcuucggcgagaccaaggggaacuccgcgccgcucaucauccgggagcccuucaucgccugcggccccaacgagugcaagcacuucgcccugacccacuacgccgcgcagcccggcggguacuacaacggcacccgcggggaccggaacaagcugcgccaccucaucagcgugaagcugggcaagaucccgacgguggagaacuccaucuuccacauggccgccuggagcggguccgccugccacgacggcaaggaguggaccuacaucggcgucgacgggcccgacaacaacgcccugcucaagaucaaguacggcgaggcguacaccgacaccuaccacagcuacgccaacaacauccugcggacgcaggaguccgccugcaacugcaucgggggcaacugcuaccugaugaucaccgacggcagcgccagcgggguguccgagugccgcuuccucaagauccgggagggccgcaucaucaaggagaucuuccccaccgggcgggugaagcacaccgaggagugcacgugcggcuucgccagcaacaagaccaucgagugcgcgugccgcgacaacuccuacaccgccaagcggcccuucgucaagcugaacguggagaccgacacggccgagauccgccugaugugcaccgagaccuaccucgacaccccgcggcccgacgacgggagcaucacgggccccugcgaguccaacggcgacaaggggagcggcgggaucaagggcggguucgugcaccagcgcaugaccuccaagaucggccggugguacagccgcaccauguccaagaccgagcggaugggcauggggcuguacgucaaguacgacggcgaccccugggccgacagcgacgcccuggcgcucuccggggugauggugagcauggaggagccgggcugguacuccuucggguucgagaucaaggacaagaagugcgacguccccugcaucggcaucgagauggugcacgacggcgggaaggagacguggcacagcgccgccaccgccaucuacugccugaugggcuccgggcagcugcucugggacaccgugaccggcgucgacauggcccuguga

SEQ ID NO: 94011 - RNA, 1401 nt, Artificial Sequence; identical to SEQ ID NO: 93155
  derived and/or modified CDS sequence (opt1) from neuraminidase__InfluenzaB__AHL91842

SEQ ID NO: 94012 - RNA, 1401 nt, Artificial Sequence
  derived and/or modified CDS sequence (opt1) from neuraminidase__InfluenzaB__AHL91853
augcugcccagcaccauccagacccucacgcuguuccugaccuccggcggggugcuccugagccuguacgucuccgccagccucuccuaccugcuguacagcgacauccuccugaaguucuccaccaccgagaucacggccccgaccaugcccagcgacugcgcgaacgccuccaacgugcaggccgugaaccgcagcgccaccaagggcgucacccugcuccugcccgagcccgaguggacguacccgcggcuguccugccccgggagcaccuuccagaaggcccuccugaucagcccccaccgcuucggcgagaccaaggggaacuccgcgccccugaucauccgggagccguucaucgccugcggccccaaggagugcaagcacuucgcccucacccacuacgccgcgcagcccggcggguacuacaacggcacgcgcgaggaccggaacaagcugcgccaccugaucuccgugaagcucgggaagauccccaccguggagaacagcaucuuccacauggccgccugguccggcagcgccugccacgacgggaaggaguggaccuacaucggcgucgacggcccggacuccaacgcccugcugaagaucaaguacggggaggcguacaccgacacguaccacagcuacgccaacaacauccuccggacccaggagagcgccugcaacugcaucggcgggaacugcuaccugaugaucaccgacggcuccgccagcggcaucuccgagugccgcuuccugaagauccgggaggggcgcaucaucaaggagaucuuccccaccggccgggugaagcacacggaggagugcacgugcggguucgccagcaacaagaccaucgagugcgcgugccgcgacaacuccuacaccgccaagcggcccuucgugaagcucaacgucgagaccgacaccgccgagauccgccugaugugcaccgagaccuaccuggacacgccccggccggacgacggcagcaucaccgggcccugcgaguccaacggcaacaagggcagcgggggcaucaagggcggguucgugcaccagcgcauggccuccaagaucgggcggugguacagccgcaccauguccaagaccaagcggaugggcaugggccucuacgugaaguacgacggggaccccuggacggacagcgacgcccuggcgcuguccggcgucauggugagcauggaggagcccgggugguacuccuucggcuucgagaucaaggacaagaagugcgacgugccgugcaucgggaucgagaugguccacgacggcggcaaggagaccuggcacagcgccgccaccgccaucuacugccucaugggguccggccagcugcugugggacaccgugacggggguggacauggcccucuga

SEQ ID NO: 94013 - RNA, 1401 nt, Artificial Sequence; identical to SEQ ID NO: 93153
  derived and/or modified CDS sequence (opt1) from neuraminidase__InfluenzaB__AHL91864

SEQ ID NO: 94014 - RNA, 1401 nt, Artificial Sequence; identical to SEQ ID NO: 93153
  derived and/or modified CDS sequence (opt1) from neuraminidase__InfluenzaB__AHL91875

SEQ ID NO: 94015 - RNA, 1401 nt, Artificial Sequence; identical to SEQ ID NO: 92910
  derived and/or modified CDS sequence (opt1) from neuraminidase__InfluenzaB__AHL91886

SEQ ID NO: 94016 - RNA, 1401 nt, Artificial Sequence; identical to SEQ ID NO: 92651
  derived and/or modified CDS sequence (opt1) from neuraminidase__InfluenzaB__AHL91897

SEQ ID NO: 94017 - RNA, 1401 nt, Artificial Sequence; identical to SEQ ID NO: 92651
  derived and/or modified CDS sequence (opt1) from neuraminidase__InfluenzaB__AHL91908

SEQ ID NO: 94018 - RNA, 1401 nt, Artificial Sequence
  derived and/or modified CDS sequence (opt1) from neuraminidase__InfluenzaB__AHL91919
augcugcccagcaccauccagacccucacgcuguuccugaccuccggcggggugcuccugagccuguacgucuccgccagccucuccuaccugcuguacagcgacauccuccugaaguucucccagaccgagaucaccgccccgaucaugccccuggacugcgcgaacgccagcaacgugcaggccgugaaccgcuccgccacgaagggcgucacgccccuccugcccgagccggaguggaccuacccccggcugagcugccccggguccaccuuccagaaggcccuccugaucagcccccaccgcuucggcgagaccaaggggaacuccgcgccgcugaucauccgggagcccuucaucgccugcggccccaaggagugcaagcacuucgcccucacccacuacgccgcgcagcccggcggguacuacaacggcacccgcgaggaccggaacaagcugcgccaccugaucagcgugaagcucgggaagaucccgaccguggagaacuccaucuuccacauggccgccuggagcggcuccgccugccacgacgggcgggaguggacguacaucggcgucgacggccccgacagcaacgcccugcugaagaucaaguacggggaggcguacaccgacaccuaccacuccuacgccaagaacauccuccgcacccaggagagcgccugcaacugcaucggcggggacugcuaccugaugaucacggacggccccgccagcggcaucuccgagugccgguuccugaagauccgcgaggggcggaucaucaaggagaucuuccccaccggccgcgugaagcacaccgaggagugcacgugcggguucgccagcaacaagaccaucgagugcgcgugccgggacaacuccuacaccgccaagcgcccguucgugaagcucaacgucgagaccgacaccgccgagauccggcugaugugcacggagaccuaccuggacacgccccgccccaacgacggcagcaucaccgggcccugcgaguccaacggcgacaagggcagcgggggcaucaagggcggguucgugcaccagcggauggccuccaagaucgggcgcugguacagccggaccauguccaagaccaagcgcaugggcaugggccucuacgugaaguacgacggggacccguggaccgacagcgaggcccuggcgcuguccggcgucauggugagcauggaggagcccgggugguacuccuucggcuucgagaucaaggacaagaagugcgacgugcccugcaucgggaucgagaugguccacgacggcggcaagaccacguggcacagcgccgccaccgccaucuacugccucaugggguccggccagcugcugugggacaccgugaccgggguggacauggcccucuga

SEQ ID NO: 94019 - RNA, 1401 nt, Artificial Sequence; identical to SEQ ID NO: 93713
  derived and/or modified CDS sequence (opt1) from neuraminidase__InfluenzaB__AHL91930

SEQ ID NO: 94020 - RNA, 1401 nt, Artificial Sequence; identical to SEQ ID NO: 92651
  derived and/or modified CDS sequence (opt1) from neuraminidase__InfluenzaB__AHL91941

SEQ ID NO: 94021 - RNA, 1401 nt, Artificial Sequence; identical to SEQ ID NO: 92651
  derived and/or modified CDS sequence (opt1) from neuraminidase__InfluenzaB__AHL91952

SEQ ID NO: 94022 - RNA, 1401 nt, Artificial Sequence; identical to SEQ ID NO: 92694
  derived and/or modified CDS sequence (opt1) from neuraminidase__InfluenzaB__AHL91963

SEQ ID NO: 94023 - RNA, 1401 nt, Artificial Sequence
  derived and/or modified CDS sequence (opt1) from neuraminidase__InfluenzaB__AHL91974
augcugcccagcaccauccagacccucacgcuguuccugaccuccggcggggugcuccugagccuguacgucuccgccagccucuccuaccugcuguacagcgacauccuccugaaguucuccccgaccgagaucaccacgcccaccaugccccuggacugcgccaacgcgagcaacgugcaggccgugaaccgcuccgccaccaagggcgucacccuccugcugcccgagccggaguggacguacccccggcucagcugccccggguccaccuuccagaaggcccugcugaucagcccccaccgcuucggcgagaccaaggggaacuccgccccgcucaucauccgggagcccuucaucgcgugcggccccaacgagugcaagcacuucgcccugacccacuacgccgcccagcccggcggguacuacaacggcacgcgcggggaccggaacaagcugcgccaccucaucagcgugaagcugggcaagaucccgaccguggagaacuccaucuuccacauggcggccuggagcggguccgccugccacgacggcaaggaguggaccuacaucggcgucgacgggcccgacaacaacgcccugcucaagaucaaguacggcgaggccuacaccgacacguaccacagcuacgcgaacaacauccugcggacccaggaguccgccugcaacugcaucgggggcaacugcuaccugaugaucaccgacggcagcgccagcgggguguccgagugccgcuuccucaagauccgggagggccgcaucaucaaggagaucuuccccaccgggcgggugaagcacacggaggagugcacgugcggcuucgccagcaacaagaccaucgagugcgccugccgcgacaacuccuacaccgcgaagcggcccuucgucaagcugaacguggagaccgacaccgccgagauccgccugaugugcaccgacaccuaccucgacacgccgcggcccgacgacgggagcaucaccggccccugcgaguccaacggcgacaaggggagcggcgggaucaagggcggguucgugcaccagcgcauggccuccaagaucggccggugguacagccgcaccauguccaagaccgagcggaugggcauggggcuguacgucaaguacgacggcgaccccugggccgacagcgacgcccuggcguucuccggggugauggugagcaugaaggagccgggcugguacuccuucggguucgagaucaaggacaagaagugcgacguccccugcaucggcaucgagauggugcacgacggcgggaaggagacguggcacagcgccgccaccgccaucuacugccucaugggcuccgggcagcugcugugggacaccgugaccggcgucgacauggcccucuga

SEQ ID NO: 94024 - RNA, 1401 nt, Artificial Sequence; identical to SEQ ID NO: 92694
  derived and/or modified CDS sequence (opt1) from neuraminidase__InfluenzaB__AHL91985

SEQ ID NO: 94025 - RNA, 1401 nt, Artificial Sequence; identical to SEQ ID NO: 92651
  derived and/or modified CDS sequence (opt1) from neuraminidase__InfluenzaB__AHL91995

SEQ ID NO: 94026 - RNA, 1401 nt, Artificial Sequence
  derived and/or modified CDS sequence (opt1) from neuraminidase__InfluenzaB__AHL92006
augcugcccagcaccauccagacccucacgcuguuccugaccuccggcggggugcuccugagccuguacgucuccgccagccucuccuaccugcuguacagcgacauccuccugaaguucuccccgaccgagaucaccgcccccacgaugccccuggacugcgcgaacgccagcaacgugcaggccgugaaccgcuccgccaccaagggcgucacccuccugcugcccgagccggaguggaccuacccccggcucagcugccccggguccacguuccagaaggcccugcugaucagcccccaccgcuucggcgagaccaaggggaacuccgcgccgcucaucauccgggagcccuucaucgccugcggccccaacgagugcaagcacuucgcccugacccacuacgccgcgcagcccggcggguacuacaacggcacccgcggggaccggaacaagcugcgccaccucaucagcgugaagcugggcaagaucccgacgguggagaacuccaucuuccacauggccgccuggagcggguccgccugccacgacggcaaggaguggaccuacaucggcgucgacgggcccgacaacaacgcccugcucaagaucaaguacggcgaggcguacaccgacaccuaccacagcuacgccaacaagauccugcggacgcaggaguccgccugcaacugcaucgggggcaacugcuaccugaugaucaccgacggcagcgccagcgggguguccgagugccgcuuccucaagauccgggagggccgcaucaucaaggagaucuuccccaccgggcgggugaagcacaccgaggagugcacgugcggcuucgccagcaacaagaccaucgagugcgcgugccgcgacaacuccuacaccgccaagcggcccuucgucaagcugaacguggagaccgacacggccgagauccgccugaugugcaccgacaccuaccucgacaccccgcggcccgacgacgggagcaucacgggccccugcgaguccaacggcgacaaggggagcggcgggaucaagggcggguucgugcaccagcgcauggccuccaagaucggccggugguacagccgcaccauguccaagaccgagcggaugggcauggggcuguacgucaaguacgacggcgaccccugggccgacagcgacgcgcuggccuucuccggggugauggugagcaugaaggagccgggcugguacuccuucggguucgagaucaaggacaagaagugcgacguccccugcaucggcguggagauggugcacgacggcgggaaggagaccuggcacagcgccgccacggccaucuacugccucaugggcuccgggcagcugcugugggacaccgucaccggcguggacauggcgcucuga

SEQ ID NO: 94027 - RNA, 1401 nt, Artificial Sequence; identical to SEQ ID NO: 92659
  derived and/or modified CDS sequence (opt1) from neuraminidase__InfluenzaB__AHL92017

SEQ ID NO: 94028 - RNA, 1401 nt, Artificial Sequence; identical to SEQ ID NO: 92659
  derived and/or modified CDS sequence (opt1) from neuraminidase__InfluenzaB__AHL92028

SEQ ID NO: 94029 - RNA, 1401 nt, Artificial Sequence
  derived and/or modified CDS sequence (opt1) from neuraminidase__InfluenzaB__AHL92039
augcugcccagcaccauccagacccucacgcuguuccugaccuccggcggggugcuccugagccuguacgucuccgccagccucuccuaccugcuguacagcgacauccuccugaaguucuccccgaccgagaucaccgcccccacgaugccccuggacugcgcgaacgccagcaacgugcacgccgugaaccgcuccgccaccaagggcgucacccuccugcugcccgagccggaguggaucuacccccggcucagcugccccggguccaccuuccagaaggcccugcugaucagcccccaccgcuucggcgagacgaaggggaacuccgcgccgcucaucauccgggagcccuucaucgccugcggccccaacgagugcaagcacuucgcccugacccacuacgccgcgcagcccggcggguacuacaacggcacccgcggggaccggaacaagcugcgccaccucaucagcgugaagcugggcaagaucccgaccguggagaacuccaucuuccacauggccgccuggagcggguccgccugccacgacggcaaggaguggacguacaucggcgucgacgggcccgacaacaacgcccugcucaagaucaaguacggcgaggcguacaccgacaccuaccacagcuacgccaacaacauccugcggacccaggaguccgccugcaacugcaucgggggcaacugcuaccugaugaucacggacggcagcgccagcgggguguccgagugccgcuuccucaagauccgggagggccgcaucaucaaggagaucuuccccaccgggcgggugaagcacaccgaggagugcacgugcggcuucgccagcaacaagaccaucgagugcgcgugccgcgacaacuccuacaccgccaagcggcccuucgucaagcugaacguggagaccgacaccgccgagauccgccugaugugcacggacaccuaccucgacaccccgcggcccgacgacgggagcaucaccggccccugcgaguccaacggcgacaaggggagcggcgggaucaagggcggguucgugcaccagcgcauggccuccaagaucggccggugguacagccgcacgauguccaagaccgagcggaugggcauggggcuguacgucaaguacaacggcgaccccugggccgacagcgacgcgcuggccuucuccggggugauggugagcaugaaggagccgggcugguacuccuucggguucgagaucaaggacaagaagugcgacguccccugcaucggcaucgagauggugcacgacggcgggaaggagaccuggcacagcgccgccaccgccaucuacugccucaugggcuccgggcagcugcugugggacacggugaccggcgucgacauggcgcucuga

SEQ ID NO: 94030 - RNA, 1401 nt, Artificial Sequence; identical to SEQ ID NO: 92659
  derived and/or modified CDS sequence (opt1) from neuraminidase__InfluenzaB__AHL92050

SEQ ID NO: 94031 - RNA, 1401 nt, Artificial Sequence
  derived and/or modified CDS sequence (opt1) from neuraminidase__InfluenzaB__AHL92061
augcugcccagcaccacccagacgcucacccuguuccugaccuccggcggggugcuccugagccuguacgucuccgccagccucuccuaccugcuguacagcgacauccuccugaaguucuccccgaccgagaucacggcccccaccaugccccuggacugcgcgaacgccagcaacgugcaggccgugaaccgcuccgccaccaagggcgucacccuccugcugcccgagccggaguggacguacccccggcucagcugccccggguccaccuuccagaaggcccugcugaucagcccccaccgcuucggcgagaccaaggggaacuccgcgccgcucaucauccgggagcccuucaucgccugcggccccaacgagugcaagcacuucgcccugacccacuacgccgcgcagcccggcggguacuacaacggcacgcgcggggaccggaacaagcugcgccaccucaucagcgugaagcugggcaagaucccgaccguggagaacuccaucuuccacauggccgccuggagcggguccgccugccacgacggcaaggaguggaccuacaucggcgucgacgggcccgacaacaacgcccugcucaagaucaaguacggcgaggcguacaccgacacguaccacagcuacgccaacaagauccugcggacccaggaguccgccugcaacugcaucgggggcaacugcuaccugaugaucaccgacggcagcgccagcgggguguccgagugccgcuuccucaagauccgggagggccgcaucaucaaggagaucuuccccaccgggcgggugaagcacacggaggagugcacgugcggcuucgccagcaacaagaccaucgagugcgcgugccgcgacaacuccuacaccgccaagcggcccuucgucaagcugaacguggagaccgacaccgccgagauccgccugaugugcaccgacaccuaccucgacacgccgcggcccgacgacgggagcaucaccggccccugcgaguccaacggcgacaaggggagcggcgggaucaagggcggguucgugcaccagcgcauggccuccaagaucggccggugguacagccgcaccauguccaagaccgagcggaugggcauggggcuguacgucaaguacgacggcgaccccugggccgacagcgacgcgcuggccuucuccggggugauggugagcaugaaggagccgggcugguacuccuucggguucgagaucaaggacaagaagugcgacguccccugcaucggcaucgagauggugcacgacggcgggaaggagacguggcacagcgccgccaccgccaucuacugccucaugggcuccgggcagcugcugugggacaccgugaccggcgucgacauggcgcucuga

SEQ ID NO: 94032 - RNA, 1401 nt, Artificial Sequence
  derived and/or modified CDS sequence (opt1) from neuraminidase__InfluenzaB__AHL92072
augcugcccagcaccauccagacccucacgcuguuccugaccuccggcggggugcuccugagccuguacgucuccgccagccucuccuaccugcuguacagcgacauccuccugaaguucuccccgaccgagaucaccgcccccacgaugccccuggacugcgcgaacgccagcaacgugcaggccgugaaccacuccgccaccaagggcgucacccuccugcugcccgagccggaguggaccuacccccgccucagcugccccggguccacguuccagaaggcccugcugaucagcccccaccgguucggcgagaccaaggggaacuccgcgccgcucaucauccgcgagcccuucaucgccugcggccccaacgagugcaagcacuucgcccugacccacuacgccgcgcagcccggcggguacuacaacggcacccgcggggaccggaacaagcugcggcaccucaucagcgugaagcugggcaagaucccgacgguggagaacuccaucuuccacauggccgccuggagcggguccgccugccacgacggcaaggaguggaccuacaucggcgucgacgggcccgacaacaacgcccugcucaagaucaaguacggcgaggcguacaccgacaccuaccacagcuacgccaacaagauccugcgcacgcaggaguccgccugcaacugcaucgggggcaacugcuaccugaugaucaccgacggcagcgccagcgggguguccgagugccgguuccucaagauccgcgagggccggaucaucaaggagaucuuccccaccgggcgcgugaagcacaccgaggagugcacgugcggcuucgccagcaacaagaccaucgagugcgcgugccgggacaacuccuacaccgccaagcgccccuucgucaagcugaacguggagaccgacacggccgagauccggcugaugugcaccgacaccuaccucgacaccccgcgccccgacgacgggagcaucacgggccccugcgaguccaacggcgacaaggggagcggcgggaucaagggcggguucgugcaccagcggauggccuccaagaucggccgcugguacagccggaccauguccaagaccgagcgcaugggcauggggcuguacgucaaguacgacggcgaccccugggccgacagcgacgcgcuggccuucuccggggugauggugagcaugaaggagccgggcugguacuccuucggguucgagaucaaggacaagaagugcgacguccccugcaucggcaucgagauggugcacgacggcgggaaggagaccuggcacagcgccgccacggccaucuacugccucaugggcuccgggcagcugcugugggacaccgugaccggcgucgacauggcgcucuga

SEQ ID NO: 94033 - RNA, 1401 nt, Artificial Sequence; identical to SEQ ID NO: 94032
  derived and/or modified CDS sequence (opt1) from neuraminidase__InfluenzaB__AHL92083

SEQ ID NO: 94034 - RNA, 1401 nt, Artificial Sequence; identical to SEQ ID NO: 94032
  derived and/or modified CDS sequence (opt1) from neuraminidase__InfluenzaB__AHL92094

SEQ ID NO: 94035 - RNA, 1401 nt, Artificial Sequence
  derived and/or modified CDS sequence (opt1) from neuraminidase__InfluenzaB__AHL92105
augcugcccagcaccauccagacccucacgcuguuccugaccuccggcggggugcuccugagccuguacgucuccgccagccucuccuaccugcuguacagcgacauccuccugaaguucuccccgaccgagaucaccgcccccacgaugccccuggacugcgcgaacgccagcaacgugcacgccgugaaccgcuccgccaccaagggcgucacccuccugcugcccgagccggaguggaccuacccccggcucagcugccccggguccacguuccagaaggcccugcugaucagcccccaccgcuucggcgagaccaaggggaacuccgcgccgcucaucauccgggagcccuucaucgccugcggccccaacgagugcaagcacuucgcccugacccacuacgccgcgcagcccggcggguacuacaacggcacccgcggggaccggaacaagcugcgccaccucaucagcgugaagcugggcaagaucccgacgguggagaacuccaucuuccacauggccgccuggagcggguccgccugccacgacggcaaggaguggaccuacaucggcgucgacgggcccgacaacaacgcccugcucaagaucaaguacggcgaggcguacaccgacaccuaccacagcuacgccaacaacauccugcggacgcaggaguccgccugcaacugcaucgggggcaacugcuaccugaugaucaccgacggcagcgccagcgggguguccgagugccgcuuccucaagauccgggagggccgcaucaucaaggagaucuuccccaccgggcgggugaagcacaccgaggagugcacgugcggcuucgccagcaacaagaccaucgagugcgcgugccgcgacaacuccuacaccgccaagcggcccuucgucaagcugaacguggagaccgacacggccgagauccgccugaugugcaccgacaccuaccucgacaccccgcggcccgacgacgggagcaucacgggccccugcgaguccaacggcgacaagggcggcgggggcaucaagggcggguucgugcaccagcgcauggccagcaagaucgggcggugguacucccgcaccaugagcaagaccgagcggauggggaugggccuguacgucaaguacgacggggaccccugggccgacuccgacgcgcuggccuucagcggcgugauggugucccucaaggagccggggugguacagcuucggcuucgagaucaaggacaagaagugcgacguccccugcaucggcaucgagauggugcacgacgggggcaaggagaccuggcacuccgccgccacggccaucuacugccugauggggagcggccagcugcucugggacaccgugaccggcgucgacauggcgcuguga

SEQ ID NO: 94036 - RNA, 1401 nt, Artificial Sequence; identical to SEQ ID NO: 92812
  derived and/or modified CDS sequence (opt1) from neuraminidase__InfluenzaB__AHL92116

SEQ ID NO: 94037 - RNA, 1401 nt, Artificial Sequence; identical to SEQ ID NO: 94032
  derived and/or modified CDS sequence (opt1) from neuraminidase__InfluenzaB__AHL92127

SEQ ID NO: 94038 - RNA, 1401 nt, Artificial Sequence; identical to SEQ ID NO: 94032
  derived and/or modified CDS sequence (opt1) from neuraminidase__InfluenzaB__AHL92138

SEQ ID NO: 94039 - RNA, 1401 nt, Artificial Sequence; identical to SEQ ID NO: 94032
  derived and/or modified CDS sequence (opt1) from neuraminidase__InfluenzaB__AHL92149

SEQ ID NO: 94040 - RNA, 1401 nt, Artificial Sequence
  derived and/or modified CDS sequence (opt1) from neuraminidase__InfluenzaB__AHL92171
augcugcccagcaccauccagacccucacgcuguuccugaccuccggcggggugcuccugagccuguacgucuccgccagccucuccuaccugcuguacagcgacauccuccugaaguucuccccgaccgagaucaccgcccccacgaugccccuggacugcgcgaacgccagcaacgugcaggccgugaaccacuccgccaccaagggcgucacccuccugcugcccgagccggaguggaccuacccccgccucagcugccccggguccacguuccagaaggcccugcuggugagcccccaccgguucggcgagaccaaggggaacuccgcgccgcucaucauccgcgagcccuucaucgccugcggccccaacgagugcaagcacuucgcccugacccacuacgccgcgcagcccggcggguacuacaacggcacccgcggggaccggaacaagcugcggcaccucaucagcgugaagcugggcaagaucccgacggucgagaacuccaucuuccacauggccgccuggagcggguccgccugccacgacggcaaggaguggaccuacaucggcguggacgggcccgacaacaacgcccugcucaagaucaaguacggcgaggcguacaccgacaccuaccacagcuacgccaacaagauccugcgcacgcaggaguccgccugcaacugcaucgggggcaacugcuaccugaugaucaccgacggcagcgccagcgggguguccgagugccgguuccucaagauccgcgagggccggaucaucaaggagaucuuccccaccgggcgcgucaagcacaccgaggagugcacgugcggcuucgccagcaacaagaccaucgagugcgcgugccgggacaacuccuacaccgccaagcgccccuucgugaagcugaacguggagaccgacacggccgagauccggcugaugugcaccgacaccuaccucgacaccccgcgccccgacgacgggagcaucacgggccccugcgaguccaacggcgacaaggggagcggcgggaucaagggcggguucguccaccagcggauggccuccaagaucggccgcugguacagccggaccauguccaagaccgagcgcaugggcauggggcuguacgugaaguacgacggcgaccccugggccgacagcgacgcgcuggccuucuccggggugauggucagcaugaaggagccgggcugguacuccuucggguucgagaucaaggacaagaagugcgacgugcccugcaucggcaucgagauggugcacgacggcgggaaggagaccuggcacagcgccgccacggccaucuacugccucaugggcuccgggcagcugcugugggacaccgucaccggcguggacauggcgcucuga

SEQ ID NO: 94041 - RNA, 1401 nt, Artificial Sequence
  derived and/or modified CDS sequence (opt1) from neuraminidase__InfluenzaB__AHL92182
augcugcccagcaccauccagacccucacgcuguuccugaccuccggcggggugcuccugagccuguacgucuccgccagccucuccuaccugcuguacagcgacauccuccugaaguucuccccgaccgagaucaccgcccccacgaugccccuggacugcgcgaacgccagcaacgugcacgccgugaaccgcuccgccaccaagggcgucacccuccugcugcccgagccggagugggccuacccccggcucagcugccccggguccaccuuccagaaggcgcugcugaucagcccccaccgcuucggcgagacgaaggggaacuccgccccgcucaucauccgggagcccuucaucgccugcggccccaacgagugcaagcacuucgcccugacccacuacgcggcccagcccggcggguacuacagcggcacccgcggggaccggaacaagcugcgccaccucaucuccgugaagcugggcaagaucccgaccguggagaacagcaucuuccacauggccgccugguccgggagcgccugccacgacggcaaggaguggacguacaucggcgucgacgggcccgacaacaacgcgcugcucaagaucaaguacggcgaggccuacaccgacaccuaccacuccuacgccaacaacauccugcggacccaggagagcgccugcaacugcaucgggggcaacugcuaccugaugaucacggacggcagcgccuccggggugagcgagugccgcuuccucaagauccgggagggccgcaucaucaaggagaucuuccccaccgggcgggugaagcacaccgaggagugcacgugcggcuucgcguccaacaagaccaucgagugcgccugccgcgacaacagcuacaccgccaagcggcccuucgucaagcugaacguggagaccgacaccgccgagauccgccugaugugcacggacaccuaccucgacaccccgcggcccgacgacggguccaucaccggccccugcgagagcaacggcgacaagggguccggcgggaucaagggcggguucgugcaccagcgcauggccagcaagaucggccggugguacucccgcacgaugagcaagaccgagcggaugggcauggggcuguacgucaaguacgacggcgaccccugggcggacuccgacgcccuggccuucagcggggugaugguguccaugaaggagccgggcugguacagcuucggguucgagaucaaggacaagaagugcgacguccccugcaucggcaucgagauggugcacgacggcgggaaggagaccuggcacuccgccgccaccgcgaucuacugccucaugggcagcgggcagcugcugugggacacggugaccggcgucgacauggcccucuga

SEQ ID NO: 94042 - RNA, 1401 nt, Artificial Sequence; identical to SEQ ID NO: 94041
  derived and/or modified CDS sequence (opt1) from neuraminidase__InfluenzaB__AHL92193

SEQ ID NO: 94043 - RNA, 1401 nt, Artificial Sequence; identical to SEQ ID NO: 92812
  derived and/or modified CDS sequence (opt1) from neuraminidase__InfluenzaB__AHL92204

SEQ ID NO: 94044 - RNA, 1401 nt, Artificial Sequence
  derived and/or modified CDS sequence (opt1) from neuraminidase__InfluenzaB__AHL92215
augcugcccagcaccauccagacccucacgcuguuccugaccuccggcggggugcuccugagccuguacgucuccgccagccucuccuaccugcuguacagcgacauccuccugaaguucuccccgaccgagaucaccgcccccacgaugccccuggacugcgcgaacgccagcaacgugcaggccgugaaccacuccgccaccaagggcgucacccuccugcugcccgagccggaguggaccuacccccgccucagcugccccggguccacguuccagaaggcccugcugaucagcccccaccgguucggcgagaccaaggggaacuccgcgccgcucaucauccgcgagcccuucaucgccugcggccccaacgagugcaagcacuucgcccugacccacuacgccgcgcagcccggcggguacuacaacggcacccgcggggaccggaacaagcugcggcaccucaucagcgugaagcugggcaagaucccgacgguggagaacuccaucuuccacauggccgccuggagcggguccgccugccacgacggcaaggaguggaccuacaucggcgucgacgggcccgacaacaacgcccugcucaagaucaaguacggcgaggcguacaccgacaccuaccacagcuacgccaacaagauccugcgcacgcaggaguccgccugcaacugcaucgggggcaacugcuaccugaugaucaccgacggcagcgccagcgggguguccgagugccgguuccucaagauccgcgagggccggaucaucaaggagaucuuccccaaggggcgcgugaagcacaccgaggagugcacgugcggcuucgccagcaacaagaccaucgagugcgcgugccgggacaacuccuacaccgccaagcgccccuucgucaagcugaacguggagaccgacaccgccgagauccggcugaugugcacggacaccuaccucgacaccccgcgccccgacgacgggagcaucaccggccccugcgaguccaacggcgacaaggggagcggcgggaucaagggcggguucgugcaccagcggauggccuccaagaucggccgcugguacagccggacgauguccaagaccgagcgcaugggcauggggcuguacgucaaguacgacggcgaccccugggccgacagcgacgcgcuggccuucuccggggugauggugagcaugaaggagccgggcugguacuccuucggguucgagaucaaggacaagaagugcgacguccccugcaucggcaucgagauggugcacgacggcgggaaggagaccuggcacagcgccgccaccgccaucuacugccucaugggcuccgggcagcugcugugggacacggugaccggcgucgacauggcgcucuga

SEQ ID NO: 94045 - RNA, 1401 nt, Artificial Sequence; identical to SEQ ID NO: 94032
  derived and/or modified CDS sequence (opt1) from neuraminidase__InfluenzaB__AHL92226

SEQ ID NO: 94046 - RNA, 1401 nt, Artificial Sequence; identical to SEQ ID NO: 92812
  derived and/or modified CDS sequence (opt1) from neuraminidase__InfluenzaB__AHL92237

SEQ ID NO: 94047 - RNA, 1401 nt, Artificial Sequence; identical to SEQ ID NO: 94032
  derived and/or modified CDS sequence (opt1) from neuraminidase__InfluenzaB__AHL92248

SEQ ID NO: 94048 - RNA, 1401 nt, Artificial Sequence
  derived and/or modified CDS sequence (opt1) from neuraminidase__InfluenzaB__AHL92259
augcugcccagcaccauccagacccucacgcuguuccugaccuccggcggggugcuccugagccuguacgucuccgccagccucuccuaccugcuguacagcgacauccuccugaaguucuccccgaccgagaucaccgccagcacgaugccccuggacugcgcgaacgccuccaacgugcaggccgugaaccgcagcgccaccaagggcgucacccuccugcugcccgagcccgaguggaccuacccgcggcucuccugccccgggagcacguuccagaaggcccugcugaucagcccccaccgcuucggcgagaccaaggggaacuccgcgccccucaucauccgggagccguucaucgccugcggccccaacgagugcaagcacuucgcccugacccacuacgccgcgcagcccggcggguacuacaacggcacccgcggggaccggaacaagcugcgccaccucaucuccgugaagcugggcaagauccccacgguggagaacagcaucuuccacauggccgccugguccgggagcgccugccacgacggcaaggaguggaccuacaucggcgucgacgggccggacaacgacgcccugcucaagaucaaguacggcgaggcguacaccgacaccuaccacuccuacgccaacaagauccugcggacgcaggagagcgccugcaacugcaucgggggcaacugcuaccugaugaucaccgacggcagcgccuccggggugagcgagugccgcuuccucaagauccgggagggccgcaucaucaaggagaucuuccccaccgggcgggugaagcacaccgaggagugcacgugcggcuucgccuccaacaagaccaucgagugcgcgugccgcgacaacagcuacaccgccaagcggcccuucgucaagcugaacguggagaccgacacggccgagauccgccugaugugcaccgacaccuaccucgacacgccccggccggacgacggguccaucaccggccccugcgagagcaacggcgacaagggguccggcgggaucaagggcggguucgugcaccagcgcaugaccagcaagaucggccggugguacucccgcaccaugagcaagaccgagcggaugggcauggggcuguacgucaaguacgacggcgaccccugggccgacuccgacgcccuggcguucagcggggugaugguguccaugaaggagcccggcugguacagcuucggguucgagaucaaggacaagaagugcgacgucccgugcaucggcaucgagauggugcacgacggcgggaaggagacguggcacuccgccgccaccgccaucuacugccucaugggcagcgggcagcugcugugggacaccgugaccggcgucgacauggcccucuga

SEQ ID NO: 94049 - RNA, 1401 nt, Artificial Sequence; identical to SEQ ID NO: 94032
  derived and/or modified CDS sequence (opt1) from neuraminidase__InfluenzaB__AHL92270

SEQ ID NO: 94050 - RNA, 1401 nt, Artificial Sequence
  derived and/or modified CDS sequence (opt1) from neuraminidase__InfluenzaB__AHL92281
augcugcccagcaccauccagacccucacgcuguuccugaccuccggcggggugcuccugagccuguacgucuccgccagccucuccuaccugcuguacagcgacauccuccugaaguucuccccgaccgagaucaccgcccccacgaugccccuggacugcgcgaacgccagcaacgugcaggccgccaaccacuccgccaccaagggcgugacccuccugcugcccgagccggaguggaccuacccccgccucagcugccccggguccacguuccagaaggcgcugcugaucagcccccaccgguucggcgagaccaaggggaacuccgccccgcucaucauccgcgagcccuucaucgccugcggccccaacgagugcaagcacuucgcccugacccacuacgcggcccagcccggcggguacuacaacggcacccgcggggaccggaacaagcugcggcaccucaucagcgucaagcugggcaagaucccgacgguggagaacuccaucuuccacauggccgccuggagcggguccgccugccacgacggcaaggaguggaccuacaucggcguggacgggcccgacaacaacgcgcugcucaagaucaaguacggcgaggccuacaccgacaccuaccacagcuacgccaacaagauccugcgcacgcaggaguccgccugcaacugcaucgggggcaacugcuaccugaugaucaccgacggcagcgccagcggggucuccgagugccgguuccucaagauccgcgagggccggaucaucaaggagaucuuccccaccgggcgcgugaagcacaccgaggagugcacgugcggcuucgcgagcaacaagaccaucgagugcgccugccgggacaacuccuacaccgccaagcgccccuucgugaagcugaacgucgagaccgacacggccgagauccggcugaugugcaccgacaccuaccucgacaccccgcgccccgacgacgggagcaucacgggccccugcgaguccaacggcgacaaggggagcggcgggaucaagggcggguucgugcaccagcggauggccuccaagaucggccgcugguacagccggaccauguccaagaccgagcgcaugggcauggggcuguacgugaaguacgacggcgaccccugggcggacagcgacgcccuggccuucuccggggucauggugagcaugaaggagccgggcugguacuccuucggguucgagaucaaggacaagaagugcgacgugcccugcaucggcaucgagaugguccacgacggcgggaaggagaccuggcacagcgccgccacggcgaucuacugccucaugggcuccgggcagcugcugugggacaccgugaccggcguggacauggcccucuga

SEQ ID NO: 94051 - RNA, 1401 nt, Artificial Sequence
  derived and/or modified CDS sequence (opt1) from neuraminidase__InfluenzaB__AHL92303
augcugcccagcaccauccagacccucacgcuguuccugaccuccggcggggugcuccugagccuguacgucuccgccagccucuccuaccugcuguacagcgacauccuccugaaguucuccccgaccgagaucaccgcccccacgaugccccuggacugcgcgaacgccagcaacgugcacgccgugaaccgcuccgccaccaagggcgucaccuuccuccugcccgagccggaguggaccuacccccggcugagcugccccggguccacguuccagaaggcccuccugaucagcccccaccgcuucggcgagaccaaggggaacuccgcgccgcugaucauccgggagcccuucaucgccugcggccccaacgagugcaagcacuucgcccucacccacuacgccgcgcagcccggcggguacuacaacggcacccgcggggaccggaacaagcugcgccaccugaucagcgugaagcucggcaagaucccgacgguggagaacuccaucuuccacauggccgccuggagcggguccgccugccacgacggcaaggaguggaccuacaucggcgucgacgggcccgacaacaacgcccugcugaagaucaaguacggcgaggcguacaccgacaccuaccacagcuacgccaacaacauccuccggacgcaggaguccgccugcaacugcaucgggggcaacugcuaccugaugaucaccgacggcagcgccagcgggguguccgagugccgcuuccugaagauccgggagggccgcaucaucaaggagaucuuccccaccgggcgggugaagcacaccgaggagugcacgugcggcuucgccagcaacaagaccaucgagugcgcgugccgcgacaacuccuacaccgccaagcggcccuucgucaagcucaacguggagaccgacacggccgagauccgccugaugugcaccgacaccuaccuggacaccccgcggcccgacgacgggagcaucacgggccccugcgaguccaacggcaacaaggggagcggcgggaucaagggcggguucgugcaccagcgcauggccuccaagaucggccggugguacagccgcaccauguccaagaccgagcggaugggcauggggcucuacgucaaguacgacggcgaccccugggccgacagcgacgcgcuggccuucuccggggugauggugagcaugaaggagccgggcugguacuccuucggguucgagaucaaggacaagaagugcgacguccccugcaucggcaucgagauggugcacgacggcgggaaggagaccuggcacagcgccgccacggccaucuacugccugaugggcuccgggcagcuccugugggacaccgugaccggcgucgacauggcgcuguga

SEQ ID NO: 94052 - RNA, 1401 nt, Artificial Sequence
  derived and/or modified CDS sequence (opt1) from neuraminidase__InfluenzaB__AHL92314
augcugcccagcaccauccagacccucacgcuguuccugaccuccggcggggugcuccugagccuguacgucuccgccagccucuccuaccugcuguacagcgacauccuccugaaguucucccagaccaagaucaccgccccgaucaugccccuggacugcgcgaacgccagcaacgugcaggccgugaaccgcuccgccgccaagggcgucacgcuccugcugcccgagcccgaguggaccuacccgcggcucagcugccccggguccaccuuccagaaggcgcugcugaucagcccccaccgcuucggcgagaccaaggggaacuccgcgccccucaucauccgggagccguucaucgccugcggccccacggagugcaagcacuucgcccugacccacuacgccgcccagcccggcggguacuacaacggcacccgcgaggaccggaacaagcugcgccaccucaucagcgugaagcuggggaagauccccaccguggagaacuccaucuuccacauggccgccuggagcggcuccgccugccacgacgggaaggaguggacguacgucggcguggacggcccggacagcaacgcgcugcucaagaucaaguacggggaggccuacaccgacaccuaccacuccuacgccaagaacauccugcggacccaggagagcgccugcaacugcaucggcggggacugcuaccugaugaucacggacggccccgccagcggcaucuccgagugccgcuuccucaagauccgggaggggcgcaucaucaaggagaucuuccccaccggccgggugaagcacaccgaggagugcacgugcggguucgcgagcaacaagaccaucgagugcgccugccgcgacaacuccuacaccgccaagcggcccuucgucaagcugaacguggagaccgacaccgccgagauccgccugaugugcacggagaccuaccucgacaccccgcggcccaacgacggcagcaucaccgggcccugcgaguccgacggcgacaagggcagcgggggcaucaagggcggguucgugcaccagcgcauggccuccaagaucgggcggugguacagccgcacgauguccaagaccaagcggaugggcaugggccuguacgucaaguacgacggggaccccuggaccgacagcgaggcgcuggcccucuccggcgugauggugagcauggacgagccggggugguacuccuucggcuucgagaucaaggacaagaagugcgacguccccugcaucgggaucgagauggugcacgacggcggcaagaccacguggcacagcgccgccaccgccaucuacugccugaugggguccggccagcugcucugggacaccgugaccggggucgacauggcgcuguga

SEQ ID NO: 94053 - RNA, 1401 nt, Artificial Sequence
  derived and/or modified CDS sequence (opt1) from neuraminidase__InfluenzaB__AHL92325
augcugcccagcaccauccagacccucacgcuguuccugaccuccggcggggugcuccugagccuguacgucuccgccagccucuccuaccugcuguacagcgacauccuccugaaguucucccagaccgagaucaccgccccgaucaugccccuggacugcgcgaacgccagcaacgugcaggccgugaaccgcuccgccgccaagggcgucacgcuccugcugcccgagcccgaguggaccuacccgcggcucagcugccccggguccaccuuccagaaggcgcugcugaucagcccccaccgcuucggcgagaccaaggggaacuccgcgccccucaucauccgggagccguucaucgccugcggccccacggagugcaagcacuucgcccugacccacuacgccgcccagcccggcggguacuacaacggcacccgcgaggaccggaacaagcugcgccaccucaucagcgugaagcuggggaagauccccaccguggagaacuccaucuuccacauggccgccuggagcggcuccgccugccacgacgggaaggaguggacguacaucggcgucgacggcccggacagcaacgcgcugcucaagaucaaguacggggaggccuacaccgacaccuaccacuccuacgccaagaacauccugcggacccaggagagcgccugcaacugcaucggcggggacugcuaccugaugaucacggacggccccgccagcggcaucuccgagugccgcuuccucaagauccgggaggggcgcaucaucaaggagaucuuccccaccggccgggugaagcacaccgaggagugcacgugcggguucgcgagcaacaagaccaucgagugcgccugccgcgacaacuccuacaccgccaagcggcccuucgugaagcugaacgucgagaccgacaccgccgagauccgccugaugugcacggagaccuaccucgacaccccgcggcccaacgacggcagcaucaccgggcccugcgaguccgacggcgacaagggcagcgggggcaucaagggcggguucgugcaccagcgcauggccuccaagaucgggcggugguacagccgcacgauguccaagaccaagcggaugggcaugggccuguacgugaaguacgacggggaccccuggaccgacagcgaggcgcuggcccucuccggcgucauggugagcaugggggagccgggcugguacuccuucggguucgagaucaaggacaagaagugcgacgugcccugcaucggcaucgagaugguccacgacggcgggaagaccacguggcacagcgccgccaccgccaucuacugccugaugggcuccgggcagcugcucugggacaccgugaccggcguggacauggcgcuguga

SEQ ID NO: 94054 - RNA, 1401 nt, Artificial Sequence; identical to SEQ ID NO: 92812
  derived and/or modified CDS sequence (opt1) from neuraminidase__InfluenzaB__AHL92336

SEQ ID NO: 94055 - RNA, 1401 nt, Artificial Sequence
  derived and/or modified CDS sequence (opt1) from neuraminidase__InfluenzaB__AHL92358
augcugcccagcaccauccagacccucacgcuguuccugaccuccggcggggugcuccugagccuguacgucuccgccagccucuccuaccugcuguacagcgacauccuccugaaguucucccagaccgagaucaccgccccgaucaugccccuggacugcgcgaacgccagcaacgugcaggccgugaaccgcuccgccgccaagggcgucacgcuccugcugcccgagcccgaguggaccuacccgcggcucagcugccccggguccaccuuccagaaggcgcugcugaucagcccccaccgcuucggcgagaccaaggggaacuccgcgccccucaucauccgggagccguucaucgccugcggccccaaggagugcaagcacuucgcccugacgcacuacgccgcccagcccggcggguacuacaacggcacccgcgaggaccggaacaagcugcgccaccucaucagcgugaagcuggggaagauccccaccguggagaacuccaucuuccacauggccgccuggagcggcuccgccugccacgacgggaaggaguggaccuacgucggcguggacggcccggacagcaacgcgcugcucaagaucaaguacggggaggccuacacggacaccuaccacuccuacgccaagaacauccugcggacccaggagagcgccugcaacugcaucggcggggacugcuaccugaugaucaccgacggccccgccagcggcaucuccgagugccgcuuccucaagauccgggaggggcgcaucaucaaggagaucuuccccacgggccgggugaagcacaccgaggagugcacgugcggguucgcgagcaacaagaccaucgagugcgccugccgcgacaacuccuacaccgccaagcggcccuucgucaagcugaacguggagaccgacaccgccgagauccgccugaugugcaccgagacguaccucgacaccccgcggcccaacgacggcagcaucaccgggcccugcgaguccgacggcgacaagggcagcgggggcaucaagggcggguucgugcaccagcgcauggccuccaagaucgggcggugguacagccgcaccauguccaagacgaagcggaugggcaugggccuguacgucaaguacgacggggaccccuggaccgacagcgaggcgcuggcccucuccggcgugauggugagcauggaggagccggggugguacuccuucggcuucgagaucaaggacaagaagugcgacguccccugcaucgggaucgagauggugcacgacggcggcaagaccaccuggcacagcgccgccacggccaucuacugccugaugggguccggccagcugcucugggacaccgugaccggggucgacauggcgcuguga

SEQ ID NO: 94056 - RNA, 1401 nt, Artificial Sequence; identical to SEQ ID NO: 94055
  derived and/or modified CDS sequence (opt1) from neuraminidase__InfluenzaB__AHL92369

SEQ ID NO: 94057 - RNA, 1401 nt, Artificial Sequence
  derived and/or modified CDS sequence (opt1) from neuraminidase__InfluenzaB__AHL92380
augcugcccagcaccauccagacccucacgcuguuccugaccuccggcggggugcuccugagccuguacgucuccgccagccucuccuaccugcuguacagcgacauccuccugaaguucucccgcaccgagaucaccgccccgaucaugccccuggacugcgcgaacgccagcaacgugcaggccgugaaccgguccgccacgaagggcgucaagcuccugcugcccgagcccgaguggaccuacccgcgccucagcugccccggguccaccuuccagaaggcccugcugaucagcccccaccgguucggcgagaccaaggggaacuccgcgccccucaucauccgcgagccguucaucgccugcggccccaaggagugcaagcacuucgcccugacgcacuacgccgcgcagcccggcggguacuacaacggcacccgggaggaccgcaacaagcugcggcaccucaucagcgugaagcuggggaagauccccaccguggagaacuccaucuuccacauggccgccuggagcggcuccgccugccacgacgggcgcgaguggaccuacaucggcgucgacggcccggacagcaacgcccugcucaagaucaaguacggggaggcguacacggacaccuaccacuccuacgccaagaacauccugcggacccaggagagcgccugcaacugcaucggcggggacugcuaccugaugaucaccgacggccccgccagcggcaucuccgagugccgcuuccucaagauccgggaggggcgcaucaucaaggagaucuuccccacgggccgggugaagcacaccgaggagugcacgugcggguucgccagcaacaagaccaucgagugcgcgugccgcgacaacuccuacaccgccaagcggcccuucgugaagcugaacgucgagaccgacaccgccgagauccgccugaugugcaccgagacguaccucgacaccccgcggcccaacgacggcagcaucaccgggcccugcgaguccaacggcgacaagggcagcgggggcaucaagggcggguucgugcaccagcgcauggccuccaagaucgggcggugguacagccgcaccauguccaagacgaagcggaugggcaugggccuguacgugaaguacgacggggaccccuggaccgacagcgaggcccuggcgcucuccggcgucauggugagcauggaggagccggggugguacuccuucggcuucgagaucaaggacaagaagugcgacgugcccugcaucgggaucgagaugguccacgacggcggcaagaccaccuggcacagcgccgccacggccaucuacugccugaugggguccggccagcugcucugggacaccgugaccggggugaacaugacccuguga

SEQ ID NO: 94058 - RNA, 1401 nt, Artificial Sequence
  derived and/or modified CDS sequence (opt1) from neuraminidase__InfluenzaB__AHL92391
augcugcccagcaccauccagacccucacgcuguuccugaccuccggcggggugcuccugagccuguacgucuccgccagccucuccuaccugcuguacagcgacauccuccugaaguucucccgcaccgagaucaccgccccgaucaugccccuggacugcgcgaacgccagcaacgugcaggccgugaaccgguccgccacgaagggcgucacccuccugcugcccgagcccgaguggaccuacccgcgccucagcugccccggguccaccuuccagaaggcccugcugaucagcccccaccgguucggcgagacgaaggggaacuccgcgccccucaucauccgcgagccguucaucgccugcggccccaaggagugcaagcacuucgcccugacccacuacgccgcgcagcccggcggguacuacaacggcacccgggaggaccgcagcaagcugcggcaccucaucuccgugaagcuggggaagauccccaccguggagaacagcaucuuccacauggccgccugguccggcagcgccugccacgacgggcgcgaguggacguacaucggcgucgacggcccggacuccaacgcccugcucaagaucaaguacggggaggcguacaccgacaccuaccacagcuacgccaagaacauccugcggacccaggagagcgccugcaacugcaucggcggggacugcuaccugaugaucacggacggccccgccuccggcaucagcgagugccgcuuccucaagauccgggaggggcgcaucaucaaggagaucuuccccaccggccgggugaagcacaccgaggagugcacgugcggguucgccuccaacaagaccaucgagugcgcgugccgcgacaacagcuacaccgccaagcggcccuucgugaagcugaacgucgagaccgacaccgccgagauccgccugaugugcacggagaccuaccucgacaccccgcggcccaacgacggcuccaucaccgggcccugcgagagcaacggcgacaagggcuccgggggcaucaagggcggguucgugcaccagcgcauggccagcaagaucgggcggugguacucccgcacgaugagcaagaccaagcggaugggcaugggccuguacgugaaguacgacggggaccccuggaccgacuccgaggcccuggcgcucagcggcgucaugguguccauggaggagccggggugguacagcuucggcuucgagaucaaggacaagaagugcgacgugcccugcaucgggaucgagaugguccacgacggcggcaagaccacguggcacuccgccgccaccgccaucuacugccugauggggagcggccagcugcucugggacaccgugaccggggugaacaugacgcuguga

SEQ ID NO: 94059 - RNA, 1401 nt, Artificial Sequence; identical to SEQ ID NO: 92841
  derived and/or modified CDS sequence (opt1) from neuraminidase__InfluenzaB__AHL92402

SEQ ID NO: 94060 - RNA, 1401 nt, Artificial Sequence; identical to SEQ ID NO: 92841
  derived and/or modified CDS sequence (opt1) from neuraminidase__InfluenzaB__AHL92413

SEQ ID NO: 94061 - RNA, 1401 nt, Artificial Sequence; identical to SEQ ID NO: 92841
  derived and/or modified CDS sequence (opt1) from neuraminidase__InfluenzaB__AHL92424

SEQ ID NO: 94062 - RNA, 1401 nt, Artificial Sequence
  derived and/or modified CDS sequence (opt1) from neuraminidase__InfluenzaB__AHL92435
augcugcccagcaccauccagacccucacgcuguuccugaccuccggcggggugcuccugagccuguacgucuccgccagccucuccuaccugcuguacagcgacauccuccugaaguucucccagaccgagaucaccgccccgaucaugccccuggacugcgcgaacgccagcaacgugcaggccgugaaccgcuccgccgccaagggcgucacgcuccugcugcccgagcccgaguggaccuacccgcggcucagcugccccggguccaccuuccagaaggcgcugcugaucagcccccaccgcuucggcgagaccaaggggaacuccgcgccccucaucauccgggagccguucaucgccugcggccccacggagugcaagcacuucgcccugacccacuacgccgcccagcccggcggguacuacaacggcacccgcgaggaccggaacaagcugcgccaccucaucagcgugaagcuggggaagauccccaccguggagaacuccaucuuccacauggccgccuggagcggcuccgccugccacgacgggaaggaguggacguacaucggcgucgacggcccggacagcaacgcgcugcucaagaucaaguacggggaggccuacaccgacaccuaccacuccuacgccaagaacauccugcggacccaggagagcgccugcaacugcaucggcggggacugcuaccugaugaucacggacggccccgccagcggcaucuccgagugccgcuuccucaagauccgggaggggcgcaucaucaaggagaucuuccccaccggccgggugaagcacaccgaggagugcacgugcggguucgcgagcaacaagaccaucgagugcgccugccgcgacaacuccuacaccgccaagcggcccuucgugaagcugaacgucgagaccgacaccgccgagauccgccugaugugcacggagaccuaccucgacaccccgcggcccaacgacggcagcaucaccgggcccugcgaguccgacggcgacaagggcagcgggggcaucaagggcggguucgugcaccagcgcauggccuccaagaucgggcggugguacagccgcacgauguccaagaccaagcggaugggcaugggccuguacgugaaguacgacggggaccccuggaccgacagcgaggcgcuggcccucuccggcgucaugaucagcauggaggagccggggugguacuccuucggcuucgagaucaaggacaagaagugcgacgugcccugcaucgggaucgagauggugcacgacggcggcaagaccacguggcacagcgccgccaccgccaucuacugccugaugggguccggccagcugcucugggacaccgucaccgggguggacauggcgcuguga

SEQ ID NO: 94063 - RNA, 1401 nt, Artificial Sequence; identical to SEQ ID NO: 92841
  derived and/or modified CDS sequence (opt1) from neuraminidase__InfluenzaB__AHL92446

SEQ ID NO: 94064 - RNA, 1401 nt, Artificial Sequence; identical to SEQ ID NO: 92841
  derived and/or modified CDS sequence (opt1) from neuraminidase__InfluenzaB__AHL92457

SEQ ID NO: 94065 - RNA, 1401 nt, Artificial Sequence; identical to SEQ ID NO: 92841
  derived and/or modified CDS sequence (opt1) from neuraminidase__InfluenzaB__AHL92468

SEQ ID NO: 94066 - RNA, 1401 nt, Artificial Sequence; identical to SEQ ID NO: 92841
  derived and/or modified CDS sequence (opt1) from neuraminidase__InfluenzaB__AHL92479

SEQ ID NO: 94067 - RNA, 1401 nt, Artificial Sequence; identical to SEQ ID NO: 92812
  derived and/or modified CDS sequence (opt1) from neuraminidase__InfluenzaB__AHL92490

SEQ ID NO: 94068 - RNA, 1401 nt, Artificial Sequence; identical to SEQ ID NO: 92841
  derived and/or modified CDS sequence (opt1) from neuraminidase__InfluenzaB__AHL92501

SEQ ID NO: 94069 - RNA, 1401 nt, Artificial Sequence
  derived and/or modified CDS sequence (opt1) from neuraminidase__InfluenzaB__AHL92512
augcugcccagcaccauccagacccucacgcuguuccugaccuccggcggggugcuccugagccuguacgucuccgccagccucuccuaccugcuguacagcgacauccuccugaaguucucccgcaccgagaucaccgccccgaucaugccccuggacugcgcgaacgccagcaacgugcaggccgugaaccgguccgccacgaagggcgucacccuccugcugcccgagcccgaguggaccuacccgcgccucagcugccccggguccaccuuccagaaggcccugcugaucagcccccaccgguucggcgagacgaaggggaacuccgcgccccucaucauccgcgagccguucaucgccugcggccccaaggagugcaagcacuucgcccugacccacuacgccgcgcagcccggcggguacuacaacggcacccgggaggaccgcaacaagcugcggcaccucaucagcgugaagcuggggaagauccccaccguggagaacuccaucuuccacauggucgccuggagcggcuccgccugccacgacgggcgcgaguggacguacaucggcguggacggcccggacagcaacgcccugcucaagaucaaguacggggaggccuacaccgacaccuaccacuccuacgcgaagaacauccugcggacccaggagagcgccugcaacugcaucggcggggacugcuaccugaugaucacggacggccccgccagcggcaucuccgagugccgcuuccucaagauccgggaggggcgcaucaucaaggagaucuuccccaccggccgggugaagcacaccgaggagugcacgugcggguucgccagcaacaagaccaucgagugcgccugccgcgacaacuccuacaccgcgaagcggcccuucgucaagcugaacguggagaccgacaccgccgagauccgccugaugugcacggagaccuaccucgacaccccgcggcccaacgacggcagcaucaccgggcccugcgaguccaacggcgacaagggcagcgggggcaucaagggcggguucgugcaccagcgcauggccuccaagaucgggcggugguacagccgcacgauguccaagaccaagcggaugggcaugggccuguacgucaaguacgacggggaccccuggaccgacagcgaggcccuggcccucuccggcgugauggugagcauggaggagccggggugguacuccuucggcuucgagaucaaggacaagaagugcgacguccccugcaucgggaucgagauggugcacgacggcggcaagaccacguggcacagcgcggccaccgccaucuacugccugaugggguccggccagcugcucugggacaccgugaccggggucaacaugacgcuguga

SEQ ID NO: 94070 - RNA, 1401 nt, Artificial Sequence; identical to SEQ ID NO: 92841
  derived and/or modified CDS sequence (opt1) from neuraminidase__InfluenzaB__AHL92523

SEQ ID NO: 94071 - RNA, 1401 nt, Artificial Sequence; identical to SEQ ID NO: 92841
  derived and/or modified CDS sequence (opt1) from neuraminidase__InfluenzaB__AHL92534

SEQ ID NO: 94072 - RNA, 1401 nt, Artificial Sequence; identical to SEQ ID NO: 92812
  derived and/or modified CDS sequence (opt1) from neuraminidase__InfluenzaB__AHL92545

SEQ ID NO: 94073 - RNA, 1401 nt, Artificial Sequence; identical to SEQ ID NO: 92841
  derived and/or modified CDS sequence (opt1) from neuraminidase__InfluenzaB__AHL92556

SEQ ID NO: 94074 - RNA, 1401 nt, Artificial Sequence; identical to SEQ ID NO: 92841
  derived and/or modified CDS sequence (opt1) from neuraminidase__InfluenzaB__AHL92567

SEQ ID NO: 94075 - RNA, 1401 nt, Artificial Sequence; identical to SEQ ID NO: 92841
  derived and/or modified CDS sequence (opt1) from neuraminidase__InfluenzaB__AHL92578

SEQ ID NO: 94076 - RNA, 1401 nt, Artificial Sequence; identical to SEQ ID NO: 92812
  derived and/or modified CDS sequence (opt1) from neuraminidase__InfluenzaB__AHL92589

SEQ ID NO: 94077 - RNA, 1401 nt, Artificial Sequence; identical to SEQ ID NO: 92841
  derived and/or modified CDS sequence (opt1) from neuraminidase__InfluenzaB__AHL92600

SEQ ID NO: 94078 - RNA, 1401 nt, Artificial Sequence; identical to SEQ ID NO: 93868
  derived and/or modified CDS sequence (opt1) from neuraminidase__InfluenzaB__AHL92611

SEQ ID NO: 94079 - RNA, 1401 nt, Artificial Sequence
  derived and/or modified CDS sequence (opt1) from neuraminidase__InfluenzaB__AHL92622
augcugcccagcaccauccagacccucacgcuguuccugaccuccggcggggugcuccugagccuguacgucuccgccagccucuccuaccugcuguacagcgacauccuccugaaguucucccgcaccgagaucaccgccccgaucaugccccuggacugcgcgaacgccagcaacgugcaggccgugaaccgguccgccacgaagggcgucaccuuccuccugcccgagcccgaguggaccuacccgcgccugagcugccccggguccaccuuccagaaggcccuccugaucagcccccaccgguucggcgagacgaaggggaacuccgcgccccugaucauccgcgagccguucaucgccugcggccccaaggagugcaagcacuucgcccucacccacuacgccgcgcagcccggcggguacuacaacggcacccgggaggaccgcaacaagcugcggcaccugaucagcgugaagcucgggaagauccccaccguggagaacuccaucuuccacauggccgccuggagcggcuccgccugccacgacgggcgcgaguggacguacaucggcgucgacggcccggacagcaacgcccugcugaagaucaaguacggggaggcguacaccgacaccuaccacuccuacgccaagaacauccuccggacccaggagagcgccugcaacugcaucggcggggacugcuaccugaugaucacggacggccccgccagcggcaucuccgagugccgcuuccugaagauccgggaggggcgcaucaucaaggagaucuuccccaccggccgggugaagcacaccgaggagugcacgugcggguucgccagcaacaagaccaucgagugcgcgugccgcgacaacuccuacaccgccaagcggcccuucgugaagcucaacgucgagaccgacaccgccgagauccgccugaugugcacggagaccuaccuggacaccccgcggcccaacgacggcagcaucaccgggcccugcgaguccaacggcgacaagggcagcgggggcaucaagggcggguucgugcaccagcgcauggccuccaagaucgggcggugguacagccgcacgauguccaagaccaagcggaugggcaugggccucuacgugaaguacgacggggaccccuggaccgacagcgaggcccuggcgcuguccggcgucauggugagcauggaggagccggggugguacuccuucggcuucgagaucaaggacaagaagugcgacgugcccugcaucgggaucgagaugguccacgacggcggcaagaccacguggcacagcgccgccaccgccaucuacugccucaugggguccggccagcugcugugggacaccgugaccggggugaacaugacgcucuga

SEQ ID NO: 94080 - RNA, 1401 nt, Artificial Sequence
  derived and/or modified CDS sequence (opt1) from neuraminidase__InfluenzaB__AHL92633
augcugcccagcaccauccagacccucacgcuguuccugaccuccggcggggugcuccugagccuguacgucuccgccagccucuccuaccugcuguacagcgacauccuccugaaguucucccgcaccgagaucaccgccccgaucaugccccuggacugcgcgaacgccagcaacgugcaggccgugaaccgguccgccacgaagggcgucaccuuccuccugcccgagcccgaguggaccuacccgcgccugagcugccccggguccaccuuccagaaggcccuccugaucagcccccaccgguucggcgagacgaaggggaacuccgcgccccugaucauccgcgagccguucaucgccugcggccccaaggagugcaagcacuucgcccucacccacuacgccgcgcagcccggcggguacuacaacggcacccgggaggaccgcaacaagcugcggcaccugaucagcgugaagcucgggaagauccccaucguggagaacuccaucuuccacauggccgccuggagcggcuccgccugccacgacgggcgcgaguggaccuacaucggcgucgacggcccggacagcaacgcccugcugaagaucaaguacggggaggcguacacggacaccuaccacuccuacgccaagaacauccuccggacccaggagagcgccugcaacugcaucggcggggacugcuaccugaugaucaccgacggccccgccagcggcaucuccgagugccgcuuccugaagauccgggaggggcgcaucaucaaggagaucuuccccacgggccgggugaagcacaccgaggagugcacgugcggguucgccagcaacaagaccaucgagugcgcgugccgcgacaacuccuacaccgccaagcggcccuucgugaagcucaacgucgagaccgacaccgccgagauccgccugaugugcaccgagacguaccuggacaccccgcggcccaacgacggcagcaucaccgggcccugcgaguccaacggcgacaagggcagcgggggcaucaagggcggguucgugcaccagcgcauggccuccaagaucgggcggugguacagccgcaccauguccaagacgaagcggaugggcaugggccucuacgugaaguacgacggggaccccuggaccgacagcgaggcccuggcgcuguccggcgucauggugagcauggaggagccggggugguacuccuucggcuucgagaucaaggacaagaagugcgacgugcccugcaucgggaucgagaugguccacgacggcggcaagaccaccuggcacagcgccgccacggccaucuacugccucaugggguccggccagcugcugugggacaccgugaccggggugaacaugacccucuga

SEQ ID NO: 94081 - RNA, 1401 nt, Artificial Sequence; identical to SEQ ID NO: 92812
  derived and/or modified CDS sequence (opt1) from neuraminidase__InfluenzaB__AHL92644

SEQ ID NO: 94082 - RNA, 1401 nt, Artificial Sequence; identical to SEQ ID NO: 92812
  derived and/or modified CDS sequence (opt1) from neuraminidase__InfluenzaB__AHL92655

SEQ ID NO: 94083 - RNA, 1401 nt, Artificial Sequence; identical to SEQ ID NO: 92841
  derived and/or modified CDS sequence (opt1) from neuraminidase__InfluenzaB__AHL92666

SEQ ID NO: 94084 - RNA, 1401 nt, Artificial Sequence; identical to SEQ ID NO: 92841
  derived and/or modified CDS sequence (opt1) from neuraminidase__InfluenzaB__AHL92677

SEQ ID NO: 94085 - RNA, 1401 nt, Artificial Sequence; identical to SEQ ID NO: 92812
  derived and/or modified CDS sequence (opt1) from neuraminidase__InfluenzaB__AHL92688

SEQ ID NO: 94086 - RNA, 1401 nt, Artificial Sequence; identical to SEQ ID NO: 92841
  derived and/or modified CDS sequence (opt1) from neuraminidase__InfluenzaB__AHL92699

SEQ ID NO: 94087 - RNA, 1401 nt, Artificial Sequence; identical to SEQ ID NO: 92841
  derived and/or modified CDS sequence (opt1) from neuraminidase__InfluenzaB__AHL92710

SEQ ID NO: 94088 - RNA, 1401 nt, Artificial Sequence; identical to SEQ ID NO: 92841
  derived and/or modified CDS sequence (opt1) from neuraminidase__InfluenzaB__AHL92721

SEQ ID NO: 94089 - RNA, 1401 nt, Artificial Sequence; identical to SEQ ID NO: 92841
  derived and/or modified CDS sequence (opt1) from neuraminidase__InfluenzaB__AHL92732

SEQ ID NO: 94090 - RNA, 1401 nt, Artificial Sequence; identical to SEQ ID NO: 92841
  derived and/or modified CDS sequence (opt1) from neuraminidase__InfluenzaB__AHL92743

SEQ ID NO: 94091 - RNA, 1401 nt, Artificial Sequence; identical to SEQ ID NO: 92841
  derived and/or modified CDS sequence (opt1) from neuraminidase__InfluenzaB__AHL92754

SEQ ID NO: 94092 - RNA, 1401 nt, Artificial Sequence; identical to SEQ ID NO: 92841
  derived and/or modified CDS sequence (opt1) from neuraminidase__InfluenzaB__AHL92765

SEQ ID NO: 94093 - RNA, 1401 nt, Artificial Sequence; identical to SEQ ID NO: 92841
  derived and/or modified CDS sequence (opt1) from neuraminidase__InfluenzaB__AHL92776

SEQ ID NO: 94094 - RNA, 1401 nt, Artificial Sequence; identical to SEQ ID NO: 92841
  derived and/or modified CDS sequence (opt1) from neuraminidase__InfluenzaB__AHL92787

SEQ ID NO: 94095 - RNA, 1401 nt, Artificial Sequence; identical to SEQ ID NO: 92841
  derived and/or modified CDS sequence (opt1) from neuraminidase__InfluenzaB__AHL92798

SEQ ID NO: 94096 - RNA, 1401 nt, Artificial Sequence
  derived and/or modified CDS sequence (opt1) from neuraminidase__InfluenzaB__AHL92809
augcugcccagcaccauccagacccucacgcuguuccugaccuccggcggggugcuccugagccuguacgucuccgccagccucuccuaccugcuguacagcgacauccuccugaaguucucccgcaccgagaucaccgccccgaucaugccccuggacugcgcgaacgccagcaacgugcaggccgugaaccgguccgccaucaagggcgucacgcuccugcugcccgagcccgaguggaccuacccgcgccucagcugccccggguccaccuuccagaaggcccugcugaucagcccccaccgguucggcgagaccaaggggaacuccgcgccccucaucauccgcgagccguucaucgccugcggccccaaggagugcaagcacuucgcccugacgcacuacgccgcgcagcccggcggguacuacaacggcacccgggaggaccgcaacaagcugcggcaccucaucagcgugaagcuggggaagauccccaccguggagaacuccaucuuccacauggccgccuggagcggcuccgccugccacgacgggcgcgaguggaccuacaucggcgucgacggcccggacagcaacgcccugcucaagaucaaguacggggaggcguacacggacaccuaccacuccuacgccaagaacauccugcggacccaggagagcgccugcaacugcaucggcggggacugcuaccugaugaucaccgacggccccgccagcggcaucuccgagugccgcuuccucaagauccgggaggggcgcaucaucaaggagaucuuccccacgggccgggugaagcacaccgaggagugcacgugcggguucgccagcaacaagaccaucgagugcgcgugccgcgacaacuccuacaccgccaagcggcccuucgugaagcugaacgucgagaccgacaccgccgagauccgccugaugugcaccgagacguaccucgacaccccgcggcccaacgacggcagcaucaccgggcccugcgaguccaacggcgacaagggcagcgggggcaucaagggcggguucgugcaccagcgcauggccuccaagaucgggcggugguacagccgcaccauguccaagacgaagcggaugggcaugggccuguacgugaaguacgacggggaccccuggaccgacagcgaggcccuggcgcucuccggcgucauggugagcauggaggagccggggugguacuccuucggcuucgagaucaaggacaagaagugcgacgugcccugcaucgggaucgagaugguccacgacggcggcaagaccaccuggcacagcgccgccacggccaucuacugccugaugggguccggccagcugcucugggacaccgugaccggggugaacaugacccuguga

SEQ ID NO: 94097 - RNA, 1401 nt, Artificial Sequence
  derived and/or modified CDS sequence (opt1) from neuraminidase__InfluenzaB__AHL92820
augcugcccagcaccauccagacccucacgcuguuccugaccuccggcggggugcuccugagccuguacgucuccgccagccucuccuaccugcuguacagcgacauccuccugaaguucucccgcaccgagaucaccgccccgaucaugccccuggacugcgcgaacgccagcaacgugcaggccgugaaccgguccgccacgaagggcgucacccuccugcugcccgagcccgaguggaccuacccgcgccucagcugccccggguccaccuuccagaaggcccugcugaucagcccccaccgguucggcgagacgaaggggaacuccgcgccccucaucauccgcgagccguucaucgccugcggccccaaggagugcaagcacuucgcccugacccacuacgccgcgcagcccggcggguacuacaacggcacccgggaggaccgcaacaagcugcggcaccucaucagcgugaagcuggggaagauccccaccguggagaacuccaucuuccacauggccgccuggagcggcuccgccugccacgacgggcgcgaguggacguacaucggcgucgacggcccggacagcaacgcccugcucaagaucaaguacggggaggcguacaccgacaccuaccacuccuacgccaagaacauccugcggacccaggagagcgccugcaacugcaucggcggggacugcuaccugaugaucacggacggccccgccagcggcaucuccgagugccgcuuccucaagauccgggaggggcgcaucaucaaggagaucuuccccaccggccgggugaagcacaccgaggagugcacgugcggguucgccagcaacaagaccaucgagugcgcgugccgcgacaacuccuacaccgccaagcggcccuucgugaagcugaacgucgagaccgacaccgccgagauccgccugaugugcacggagaccuaccucgacaccccgcggcccaacgacggcagcaucaccgggcccugcgaguccaacggcgacaagggcagcgggggcaucaagggcggguucgugcaccagcgcauggccuccaagaucgggcggugguacagccgcacgauguccaagaccaagcggaugggcaugggccuguacgugaaguacgacggggaccccuggaccgacagcgaggcccuggcgcucuccggcgucauggugagcauggaggagccggggugguacuccuucggcuucgagaucaaggacaagaagugcgacgugcccugcaucgggaucgagaugguccacgacggcggcaagaagaccuggcacagcgccgccacggccaucuacugccugaugggguccggccagcugcucugggacaccgugaccggggugaacaugacccuguga

SEQ ID NO: 94098 - RNA, 1401 nt, Artificial Sequence
  derived and/or modified CDS sequence (opt1) from neuraminidase__InfluenzaB__AHL92842
augcugcccagcaccauccagacccucacgcuguuccugaccuccggcggggugcuccugagccuguacgucuccgccagccucuccuaccugcuguacagcgacauccuccugaaguucucccgcaccgagaucaccgccccgaucaugccccuggacugcgcgaacgccagcaacgugcaggccgugaaccgguccacgaccaagggcgucacccuccugcugcccgagcccgaguggaccuacccgcgccucagcugccccggguccacguuccagaaggcccugcugaucagcccccaccgguucggcgagaccaaggggaacuccgcgccccucaucauccgcgagccguucaucgccugcggccccaaggagugcaagcacuucgcccugacccacuacgccgcccagcccggcggguacuacaacggcacccgggaggaccgcaacaagcugcggcaccucaucagcgugaagcuggggaagauccccacgguggagaacuccaucuuccacauggcggccuggagcggcuccgccugccacgacgggcgcgaguggaccuacaucggcgucgacggcccggacagcaacgcccugcucaagaucaaguacggggaggccuacaccgacaccuaccacuccuacgcgaagaacauccugcggacgcaggagagcgccugcaacugcaucggcggggacugcuaccugaugaucaccgacggccccgccagcggcaucuccgagugccgcuuccucaagauccgggaggggcgcaucaucaaggagaucuuccccaccggccgggugaagcacaccgaggagugcacgugcggguucgccagcaacaagaccaucgagugcgccugccgcgacaacuccuacaccgcgaagcggcccuucgugaagcugaacgucgagaccgacacggccgagauccgccugaugugcaccgagaccuaccucgacaccccgcggcccaacgacggcagcaucacggggcccugcgaguccaacggcgacaagggcagcgggggcaucaagggcggguucgugcaccagcgcauggccuccaagaucgggcggugguacagccgcaccauguccaagaccaagcggaugggcaugggccuguacgugaaguacgacggggaccccuggaccgacagcgaggcccuggcccucuccggcgucauggugagcauggaggagccggggugguacuccuucggcuucgagaucaaggacaagaagugcgacgugcccugcaucgggaucgagaugguccacgacggcggcaagacgaccuggcacagcgcggccaccgccaucuacugccugaugggguccggccagcugcucugggacaccgugacgggggugaacaugacccuguga

SEQ ID NO: 94099 - RNA, 1401 nt, Artificial Sequence; identical to SEQ ID NO: 92841
  derived and/or modified CDS sequence (opt1) from neuraminidase__InfluenzaB__AHL92853

SEQ ID NO: 94100 - RNA, 1401 nt, Artificial Sequence; identical to SEQ ID NO: 92841
  derived and/or modified CDS sequence (opt1) from neuraminidase__InfluenzaB__AHL92864

SEQ ID NO: 94101 - RNA, 1401 nt, Artificial Sequence; identical to SEQ ID NO: 92694
  derived and/or modified CDS sequence (opt1) from neuraminidase__InfluenzaB__AHL92875

SEQ ID NO: 94102 - RNA, 1401 nt, Artificial Sequence; identical to SEQ ID NO: 92651
  derived and/or modified CDS sequence (opt1) from neuraminidase__InfluenzaB__AHL92886

SEQ ID NO: 94103 - RNA, 1401 nt, Artificial Sequence
  derived and/or modified CDS sequence (opt1) from neuraminidase__InfluenzaB__AHL92897
augcugcccagcaccauccagacccucacgcuguuccugaccuccggcggggugcuccugagccuguacgucuccgccagccucuccuaccugcuguacagcgacauccuccugaaguucuccccgaccgagaucaccgcccccacgaucccccuggacugcgcgaacgccagcaacgugcaggccgugaaccgcuccgccaccaagggcgucacccuccugcugcccgagccggaguggaccuacccccggcucagcugccccggguccacguuccagaaggcccugcugaucagcccccaccgcuucggcgagaccaaggggaacuccgcgccgcucaucauccgggagcccuucaucgccugcggccccaacgagugcaagcacuucgcccugacccacuacgccgcgcagcccggcggguacuacaacggcacccgcggggaccggaacaagcugcgccaccucaucagcgugaagcugggcaagaucccgacgguggagaacuccaucuuccacauggccgccuggagcggguccgccugccacgacggcaaggaguggaccuacaucggcgucgacgggcccgacaacaacgcccugcucaagaucaaguacggcgaggcguacaccgacaccuaccacagcuacgccaacaacauccugcggacgcaggaguccgccugcaacugcaucgggggcaacugcuaccugaugaucaccgacggcagcgccagcgggguguccgagugccgcuuccucaagauccgggagggccgcaucaucaaggagaucuuccccaccgggcgggugaagcacaccgaggagugcacgugcggcuucgccagcaacaagaccaucgagugcgcgugccgcgacaacuccuacaccgccaagcggcccuucgucaagcugaacguggagaccgacacggccgagauccgccugaugugcaccgacaccuaccucgacaccccgcggcccgacgacgggagcaucacgggccccugcgaguccaacggcgacaaggggagcggcgggaucaagggcggguucgugcaccagcgcauggccuccaagaucggccggugguacagccgcaccauguccaagaccgagcggaugggcauggggcuguacgucaaguacgacggcgaccccugggccgacagcgacgcgcuggccuucuccggggugauggugagcaugaaggagccgggcugguacuccuucggguucgagaucaaggacaagaagugcgacguccccugcaucggcaucgagauggugcacgacggcgggaaggagaccuggcacagcgccgccacggccaucuacugccucaugggcuccgggcagcugcugugggacaccgugaccggcgucgacauggcgcucuga

SEQ ID NO: 94104 - RNA, 1401 nt, Artificial Sequence
  derived and/or modified CDS sequence (opt1) from neuraminidase__InfluenzaB__AHL92908
augcugcccagcaccauccagacccucacgcuguuccugacccucggcggggugcugcugucccucuacgucagcgccucccugagcuaccugcucuacuccgacauccugcugaaguucagccagaccgagaucaccgccccgaucaugccccucgacugcgcgaacgccuccaacgugcaggccgugaaccgcagcgccacgaagggcgucacccugcugcuccccgagcccgaguggaccuacccgcggcuguccugccccgggagcaccuuccagaaggcccugcucaucagcccccaccgcuucggcgagacgaaggggaacuccgcgccccugaucauccgggagccguucaucgccugcggccccaaggagugcaagcacuucgcccugacccacuacgccgcgcagcccggcggguacuacaacggcacccgcgaggaccggaacaagcuccgccaccugaucuccgugaagcuggggaagauccccaccguggagaacagcaucuuccacauggccgccugguccggcagcgccugccacgacgggaaggaguggacguacaucggcgucgacggcccggacuccaacgcccuccugaagaucaaguacggggaggcguacaccgacaccuaccacagcuacgccaagaacauccugcggacccaggaguccgccugcaacugcaucggcggggacugcuaccucaugaucacggacggccccgccagcggcaucagcgagugccgcuuccugaagauccgggaggggcgcaucaucaaggagaucuuccccaccggccgggugaagcacaccgaggagugcacgugcggguucgccuccaacaagaccaucgagugcgcgugccgcgacaacagcuacaccgccaagcggcccuucgugaagcugaacgucgagaccgacaccgccgagauccgccucaugugcacggagaccuaccuggacaccccgcggcccaacgacggcuccaucaccgggcccugcgagagcaacggcgacaagggcuccgggggcaucaagggcggguucgugcaccagcgcauggccagcaagaucgggcggugguacucccgcacgaugagcaagaccaagcggaugggcaugggccuguacgugaaguacgacggggaccccuggaccgacuccgaggcccucgcgcugagcggcgucaugguguccauggaggagccggggugguacagcuucggcuucgagaucaaggacaagaagugcgacgugcccugcaucgggaucgagaugguccacgacggcggcaagaccacguggcacuccgccgccaccgccguguacugccugauggggagcggccagcuccugugggacaccaucaccgggguggacauggcccuguga

SEQ ID NO: 94105 - RNA, 1401 nt, Artificial Sequence
  derived and/or modified CDS sequence (opt1) from neuraminidase__InfluenzaB__AHL92919
augcugcccagcaccauccagacccucacgcuguuccugaccuccggcggggugcuccugagccuguacgucuccgccagccucuccuaccugcuguacagcgacauccuccugaaguucuccccgaccgagaucaccgcccccacgaugccccuggacugcgcgaacgccagcaacgugcaggccgugaaccgcuccgccaccaagggcgucacccuccugcugcccgagccggaguggaccuacccccggcucagcugccccggguccacguuccagaaggcccugcugaucagcccccaccgcuucggcgagaccaaggggaacuccgcgccgcucaucauccgggagcccuucaucgccugcggccccaacgagugcaagcacuucgcccugacccacuacgccgcgcagcccggcggguacuacaacggcacccgcggggaccggaacaagcugcgccaccucaucagcgugaagcugggcaagaucccgacgguggagaacuccaucuuccacauggccgccuggagcggguccgccugccacgacggcaaggaguggaccuacaucggcaucgacgggcccgacaacaacgcccugcucaagaucaaguacggcgaggcguacaccgacaccuaccacagcuacgccaacaacauccugcggacgcaggaguccgccugcaacugcaucgggggcaacugcuaccugaugaucaccgacggcagcgccagcggggucuccgagugccgcuuccucaagauccgggagggccgcaucaucaaggagaucuuccccaccgggcgggugaagcacaccgaggagugcacgugcggcuucgccagcaacaagaccaucgagugcgcgugccgcgacaacuccuacaccgccaagcggcccuucgugaagcugaacgucgagaccgacacggccgagauccgccugaugugcaccgacaccuaccucgacaccccgcggcccgacgacgggagcaucacgggccccugcgaguccaacggcgacaaggggagcggcgggaucaagggcggguucgugcaccagcgcauggccuccaagaucggccggugguacagccgcaccauguccaagaccgagcggaugggcauggggcuguacgugaaguacgacggcgaccccugggccgacagcgacgcgcuggccuucuccggggucauggugagcaugaaggagccgggcugguacuccuucggguucgagaucaaggacaagaagugcgacgugcccugcaucggcaucgagaugguccacgacggcgggaaggagaccuggcacagcgccgccacggccaucuacugccucaugggcuccgggcagcugcugugggacaccgugaccggcguggacauggcgcucuga

SEQ ID NO: 94106 - RNA, 1401 nt, Artificial Sequence
  derived and/or modified CDS sequence (opt1) from neuraminidase__InfluenzaB__AHL92930
augcugcccagcaccauccagacccucacgcuguuccugaccuccggcggggugcuccugagccuguacgucuccgccagccucuccuaccugcuguacagcgacauccuccugaaguucuccccgaccgagaucaccgcccccacgaugccccuggacugcgcgaacgccagcaacgugcaggccgugaaccgcuccgccaccaagggcgucacccuccugcugcccgagccggaguggaccuacccccggcucagcugccccggguccacguuccagaaggcccugcugaucagcccccaccgcuucggcgagaccaaggggaacuccgcgccgcucaucauccgggagcccuucaucgccugcggccccaacgagugcaagcacuucgcccugacccacuacgccgcgcagcccggcggguacuacaacggcacccgcggggaccggaacaagcugcgccaccucaucagcgugaagcugggcaagaucccgacgguggagaacuccaucuuccacauggccgccuggagcggguccgccugccacgacggcaaggaguggaccuacaucggcgucgacgggcccgacaacgacgcccugcucaagaucaaguacggcgaggcguacaccgacaccuaccacagcuacgccaacaacauccugcggacgcaggaguccgccugcaacugcaucgggggcaacugcuaccugaugaucaccgacggcagcgccagcgggguguccgagugccgcuuccucaagauccgggagggccgcaucaucaaggagaucuuccccaccgggcgggugaagcacaccgaggagugcacgugcggcuucgccagcaacaagaccaucgagugcgcgugccgcgacaacuccuacaccgccaagcggcccuucgucaagcuggacguggagaccgacacggccgagauccgccugaugugcaccgacaccuaccucgacaccccgcggcccgacgacgggagcaucacgggccccugcgaguccaacggcgacaaggggagcggcgggaucaagggcggguucgugcaccagcgcauggccuccaagaucggccggugguacagccgcaccauguccaagaccgagcggaugggcauggggcuguacgucaaguacgacggcgaccccugggccgacagcgacgcgcuggccuucuccggggugauggugagcaugaaggagccgggcugguacuccuucggguucgagaucaaggacaagaagugcgacguccccugcaucggcaucgagauggugcacgacggcgggaaggagaccuggcacagcgccgccacggccaucuacugccucaugggcuccgggcagcugcugugggacaccgugaccggcgucgacauggcgcucuga

SEQ ID NO: 94107 - RNA, 1401 nt, Artificial Sequence; identical to SEQ ID NO: 92651
  derived and/or modified CDS sequence (opt1) from neuraminidase__InfluenzaB__AHL92941

SEQ ID NO: 94108 - RNA, 1401 nt, Artificial Sequence; identical to SEQ ID NO: 92659
  derived and/or modified CDS sequence (opt1) from neuraminidase__InfluenzaB__AHL92952

SEQ ID NO: 94109 - RNA, 1401 nt, Artificial Sequence; identical to SEQ ID NO: 92659
  derived and/or modified CDS sequence (opt1) from neuraminidase__InfluenzaB__AHL92963

SEQ ID NO: 94110 - RNA, 1401 nt, Artificial Sequence
  derived and/or modified CDS sequence (opt1) from neuraminidase__InfluenzaB__AHL92974
augcugcccagcaccauccagacccucacgcuguuccugaccuccggcggggugcuccugagccuguacgucuccgccagccucuccuaccugcuguacagcgacauccuccugaaguucuccccgaccgagaucaccgcccccacgaugccccuggacugcgcgaacgccagcaacgugcacgccgugaaccgcuccgccaccaagggcgucacccuccugcugcccgagccggaguggaccuacccccggcucagcugccccggguccacguuccagaaggcccugcugaucagcccccaccgcuucggcgagaccaaggggaacuccgcgccgcucaucauccgggagcccuucaucgccugcggccccaacgagugcaagcacuucgcccugacccacuacgccgcgcagcccggcggguacuacaacggcacccgcggggaccggaacaagcugcgccaccucaucagcgugaagcugggcaagaucccgacgguggagaacuccaucuuccacauggccgccuggagcggguccgccugccacgacggcaaggaguggaccuacaucggcgucgacgggcccgacaacaacgcccugcucaagaucaaguacggcgaggcguacaccgacaccuaccacagcuacgccaacaacauccugcggacgcaggaguccgccugcaacugcaucgggggcaacugcuaccugaugaucaccgacggcagcgccagcgggguguccgagugccgcuuccucaagauccgggagggccgcaucaucaaggagaucuuccccaccgggcgggugaagcacaccgaggagugcacgugcggcuucgccagcaacaagaccaucgagugcgcgugccgcgacaacuccuacaccgccaagcggcccuucgucaagcugaacguggagaccgacacggccgagauccgccugaugugcaccgacaccuaccucgacaccccgcggcccgacgacgggagcaucacgggccccugcgaguccaacggcgacaaggggagcggcgggaucaagggcggguucgugcaccagcgcauggccuccaagaucggccggugguacagccgcaccauguccaagaccgagcggaugggcauggggcuguacgucaaguacaacggcgaccccugggccgacagcgacgcgcuggccuucuccggggugauggugagcaugaaggagccgggcugguacuccuucggguucgagaucaaggacaagaagugcgacguccccugcaucggcaucgagauggugcacgacggcgggaaggagaccuggcacagcgccgccacggccaucuacugccucaugggcuccgggcagcugcugugggacaccgugaccggcgucgacauggcgcucuga

SEQ ID NO: 94111 - RNA, 1401 nt, Artificial Sequence; identical to SEQ ID NO: 92659
  derived and/or modified CDS sequence (opt1) from neuraminidase__InfluenzaB__AHL92985

SEQ ID NO: 94112 - RNA, 1401 nt, Artificial Sequence; identical to SEQ ID NO: 92659
  derived and/or modified CDS sequence (opt1) from neuraminidase__InfluenzaB__AHL92996

SEQ ID NO: 94113 - RNA, 1401 nt, Artificial Sequence; identical to SEQ ID NO: 94032
  derived and/or modified CDS sequence (opt1) from neuraminidase__InfluenzaB__AHL93008

SEQ ID NO: 94114 - RNA, 1401 nt, Artificial Sequence; identical to SEQ ID NO: 94041
  derived and/or modified CDS sequence (opt1) from neuraminidase__InfluenzaB__AHL93019

SEQ ID NO: 94115 - RNA, 1401 nt, Artificial Sequence; identical to SEQ ID NO: 94041
  derived and/or modified CDS sequence (opt1) from neuraminidase__InfluenzaB__AHL93030

SEQ ID NO: 94116 - RNA, 1401 nt, Artificial Sequence; identical to SEQ ID NO: 94055
  derived and/or modified CDS sequence (opt1) from neuraminidase__InfluenzaB__AHL93041

SEQ ID NO: 94117 - RNA, 1401 nt, Artificial Sequence; identical to SEQ ID NO: 94055
  derived and/or modified CDS sequence (opt1) from neuraminidase__InfluenzaB__AHL93052

SEQ ID NO: 94118 - RNA, 1401 nt, Artificial Sequence; identical to SEQ ID NO: 92841
  derived and/or modified CDS sequence (opt1) from neuraminidase__InfluenzaB__AHL93063

SEQ ID NO: 94119 - RNA, 1401 nt, Artificial Sequence; identical to SEQ ID NO: 92841
  derived and/or modified CDS sequence (opt1) from neuraminidase__InfluenzaB__AHL93074

SEQ ID NO: 94120 - RNA, 1401 nt, Artificial Sequence; identical to SEQ ID NO: 92841
  derived and/or modified CDS sequence (opt1) from neuraminidase__InfluenzaB__AHL93085

SEQ ID NO: 94121 - RNA, 1401 nt, Artificial Sequence; identical to SEQ ID NO: 94098
  derived and/or modified CDS sequence (opt1) from neuraminidase__InfluenzaB__AHL93096

SEQ ID NO: 94122 - RNA, 1401 nt, Artificial Sequence; identical to SEQ ID NO: 92841
  derived and/or modified CDS sequence (opt1) from neuraminidase__InfluenzaB__AHL93107

SEQ ID NO: 94123 - RNA, 1401 nt, Artificial Sequence; identical to SEQ ID NO: 92841
  derived and/or modified CDS sequence (opt1) from neuraminidase__InfluenzaB__AHL93118

SEQ ID NO: 94124 - RNA, 1401 nt, Artificial Sequence; identical to SEQ ID NO: 92812
  derived and/or modified CDS sequence (opt1) from neuraminidase__InfluenzaB__AHL93129

SEQ ID NO: 94125 - RNA, 1401 nt, Artificial Sequence; identical to SEQ ID NO: 92841
  derived and/or modified CDS sequence (opt1) from neuraminidase__InfluenzaB__AHL93140

SEQ ID NO: 94126 - RNA, 1401 nt, Artificial Sequence; identical to SEQ ID NO: 92812
  derived and/or modified CDS sequence (opt1) from neuraminidase__InfluenzaB__AHL93151

SEQ ID NO: 94127 - RNA, 1401 nt, Artificial Sequence; identical to SEQ ID NO: 92841
  derived and/or modified CDS sequence (opt1) from neuraminidase__InfluenzaB__AHL93162

SEQ ID NO: 94128 - RNA, 1401 nt, Artificial Sequence; identical to SEQ ID NO: 92841
  derived and/or modified CDS sequence (opt1) from neuraminidase__InfluenzaB__AHL93173

SEQ ID NO: 94129 - RNA, 1401 nt, Artificial Sequence; identical to SEQ ID NO: 92812
  derived and/or modified CDS sequence (opt1) from neuraminidase__InfluenzaB__AHL93184

SEQ ID NO: 94130 - RNA, 1401 nt, Artificial Sequence; identical to SEQ ID NO: 92841
  derived and/or modified CDS sequence (opt1) from neuraminidase__InfluenzaB__AHL93195

SEQ ID NO: 94131 - RNA, 1401 nt, Artificial Sequence; identical to SEQ ID NO: 92841
  derived and/or modified CDS sequence (opt1) from neuraminidase__InfluenzaB__AHL93206

SEQ ID NO: 94132 - RNA, 1401 nt, Artificial Sequence; identical to SEQ ID NO: 92985
  derived and/or modified CDS sequence (opt1) from neuraminidase__InfluenzaB__AHL93217

SEQ ID NO: 94133 - RNA, 1401 nt, Artificial Sequence; identical to SEQ ID NO: 92985
  derived and/or modified CDS sequence (opt1) from neuraminidase__InfluenzaB__AHL93228

SEQ ID NO: 94134 - RNA, 1401 nt, Artificial Sequence
  derived and/or modified CDS sequence (opt1) from neuraminidase__InfluenzaB__AHL93239
augcugcccagcaccauccagacccucacgcuguuccugaccuccggcggggugcuccugagccuguacgucuccgccagccucuccuaccugcuguacagcgacauccuccugaaguucuccccgaccgagaucaccgcccccacgaugccccuggacugcgcgaacgccagcaacgugcaggccgugaaccgcuccgccaccaagggcgucaccuuccuccugcccgagccggaguggaccuacccccggcugagcugccccggguccacguuccagaaggcccuccugaucagcccccaccgcuucggcgagaccaaggggaacuccgcgccgcugaucauccgggagcccuucaucgccugcggccccaacgagugcaagcacuucgcccucacccacuacgccgcgcagcccggcggguacuacaacggcacccgcggggaccggaacaagcugcgccaccugaucagcgugaagcucggcaagaucccgacgguggagaacuccaucuuccacauggccgccuggagcggguccgccugccacgacggcaaggaguggaccuacaucggcgucgacgggcccgacaacaacgcccugcugaaggugaaguacggcgaggcguacaccgacaccuaccacagcuacgccaacaagauccuccggacgcaggaguccgccugcaacugcaucgggggcaacugcuaccugaugaucaccgacggcagcgccagcgggguguccgagugccgcuuccugaagauccgggagggccgcaucaucaaggagaucuuccccaccgggcgggucaagcacaccgaggagugcacgugcggcuucgccagcaacaagaccaucgagugcgcgugccgcgacaacuccuacaccgccaagcggcccuucgugaagcucaacguggagaccgacacggccgagauccgccugaugugcaccgacaccuaccuggacaccccgcggcccgacgacgggagcaucacgggccccugcgaguccaacggcgacaaggggagcggcgggaucaagggcggguucguccaccagcgcauggaguccaagaucggccggugguacagccgcaccauguccaagaccgagcggaugggcauggggcucuacgugaaguacgacggcgaccccugggccgacagcgacgcccuggcguucuccggggugauggucagcaugaaggagccgggcugguacuccuucggguucgagaucaaggacaagaagugcgacgugcccugcaucggcaucgagauggugcacgacggcgggaaggagaccuggcacagcgccgccacggccaucuacugccugaugggcuccgggcagcuccugugggacaccgucaccggcguggacauggcccuguga

SEQ ID NO: 94135 - RNA, 1401 nt, Artificial Sequence
  derived and/or modified CDS sequence (opt1) from neuraminidase__InfluenzaB__AHL93250
augcugcccagcaccauccagaugcucacccuguuccugacguccggcggggugcuccugagccuguacgucuccgccagccucuccuaccugcuguacagcgacauccuccugaaguucuccccgaccgagaucaccgcccccaccaugccccuggacugcgcgaacgccagcaacgugcacgccgugaaccgcuccgccacgaagggcgucaccuuccuccugcccgagccggaguggaccuacccccggcugagcugccccggguccaccuuccagaaggcccuccugaucagcccccaccgcuucggcgagacgaaggggaacuccgcgccgcugaucauccgggagcccuucaucgccugcggccccaacgagugcaagcacuucgcccucacccacuacgccgcgcagcccggcggguacuacaacggcacccgcggggaccggaacaagcugcgccaccugaucagcgugaagcucggcaagaucccgaccguggagaacuccaucuuccacauggccgccuggagcggguccgccugccacgacggcaaggaguggacguacaucggcgucgacgggcccgacaacaacgcccugcugaagaucaaguacggcgaggcguacaccgacaccuaccacagcuacgccaacaacauccuccggacccaggaguccgccugcaacugcaucgggggcaacugcuaccugaugaucacggacggcagcgccagcgggguguccgagugccgcuuccugaagauccgggagggccgcaucaucaaggagaucuuccccaccgggcgggugaagcacaccgaggagugcacgugcggcuucgccagcaacaagaccaucgagugcgcgugccgcgacaacuccuacaccgccaagcggcccuucgucaagcucaacguggagaccgacaccgccgagauccgccugaugugcacggacaccuaccuggacaccccgcggcccgacgacgggagcaucaccggccccugcgaguccaacggcgacaaggggagcggcgggaucaagggcggguucgugcaccagcgcauggccuccaagaucggccggugguacagccgcacgauguccaagaccgagcggaugggcauggggcucuacgucaaguacgacggcgaccccuggaccgacagcgacgcccuggcguuccgcggggugaugguguccaugaaggagccgggcugguacagcuucggguucgagaucaaggacaagaagugcgacguccccugcaucggcaucgagauggugcacgacggcgggaaggagaccuggcacuccgccgccacggccaucuacugccugaugggcagcgggcagcuccugugggacaccgugaccggcgucgacauggcccuguga

SEQ ID NO: 94136 - RNA, 1401 nt, Artificial Sequence; identical to SEQ ID NO: 92985
  derived and/or modified CDS sequence (opt1) from neuraminidase__InfluenzaB__AHL93261

SEQ ID NO: 94137 - RNA, 1401 nt, Artificial Sequence; identical to SEQ ID NO: 92985
  derived and/or modified CDS sequence (opt1) from neuraminidase__InfluenzaB__AHL93272

SEQ ID NO: 94138 - RNA, 1401 nt, Artificial Sequence; identical to SEQ ID NO: 92985
  derived and/or modified CDS sequence (opt1) from neuraminidase__InfluenzaB__AHL93283

SEQ ID NO: 94139 - RNA, 1401 nt, Artificial Sequence; identical to SEQ ID NO: 92985
  derived and/or modified CDS sequence (opt1) from neuraminidase__InfluenzaB__AHL93294

SEQ ID NO: 94140 - RNA, 1401 nt, Artificial Sequence
  derived and/or modified CDS sequence (opt1) from neuraminidase__InfluenzaB__AHL93305
augcugcccagcaccauccagacccucacgcuguuccugaccuccggcggggugcuccugagccuguacgucuccgccagccucuccuaccugcuguacagcgacauccuccugaaguucuccccgaccgagaucaccgcccccacgaugccccuggacugcgcgaacgccagcaacgugcaggccgugaaccgcuccgccaccaagggcgucacccuccugcugcccgagccggaguggaccuacccccggcucagcugccccggguccacguuccagaaggcccugcugaucagcccccaccgcuucggcgagaccaaggggaacuccgcgccgcucaucauccgggagcccuucguggccugcggccccaacgagugcaagcacuucgcccugacccacuacgccgcgcagcccggcggguacuacaacggcacccgcggggaccggaacaagcugcgccaccucaucagcgugaagcugggcaagaucccgacggucgagaacuccaucuuccacauggccgccuggagcggguccgccugccacgacggcaaggaguggaccuacaucggcguggacgggcccgacaacaacgcccugcucaaggugaaguacggcgaggcguacaccgacaccuaccacagcuacgccaacaagauccugcggacgcaggaguccgccugcaacugcaucgggggcaacugcuaccugaugaucaccgacggcagcgccagcggggucuccgagugccgcuuccucaagauccgggagggccgcaucaucaaggagaucuuccccaccgggcgggugaagcacaccgaggagugcacgugcggcuucgccagcaacaagaccaucgagugcgcgugccgcgacaacuccuacaccgccaagcggcccuucgugaagcugaacgucgagaccgacacggccgagauccgccugaugugcaccgacaccuaccucgacaccccgcggcccaacgacgggagcaucacgggccccugcgaguccaacggcgacaaggggagcggcgggaucaagggcggguucgugcaccagcgcauggaguccaagaucggccggugguacagccgcaccauguccaagaccgagcggaugggcauggggcuguacgugaaguacgacggcgaccccugggccgacagcgacgcccuggcguucuccggggucauggugagcaugaaggagccgggcugguacuccuucggguucgagaucaaggacaagaagugcgacgugcccugcaucggcaucgagaugguccacgacggcgggaaggagaccuggcacagcgccgccacggccaucuacugccucaugggcuccgggcagcugcugugggacaccgugaccggcguggacauggcccucuga

SEQ ID NO: 94141 - RNA, 1401 nt, Artificial Sequence; identical to SEQ ID NO: 92985
  derived and/or modified CDS sequence (opt1) from neuraminidase__InfluenzaB__AHL93316

SEQ ID NO: 94142 - RNA, 1401 nt, Artificial Sequence
  derived and/or modified CDS sequence (opt1) from neuraminidase__InfluenzaB__AHL93338
augcugcccagcaccauccagacccucacgcuguuccugaccuccggcggggugcuccugagccuguacgucuccgccagccucuccuaccugcuguacagcgacauccuccugaaguucuccccgaccgagaucaccgcccccacgaugccccuggacugcgcgaacgccagcaacgugcaggccgugaaccgcuccgccaccaagggcgucacccuccugcugcccgagccggaguggaccuacccccggcucagcugccccggguccacguuccagaaggcccugcugaucagcccccaccgcuucggcgagaccaaggggaacuccgcgccgcucaucauccgggagcccuucaucgccugcggccccaacgagugcaagcacuucgcccugacccacuacgccgcgcagcccggcggguacuacaacggcacccgcggggaccggaacaagcugcgccaccucaucagcgugaagcugggcaagaucccgacgguggagaacuccaucuuccacauggccgccuggagcggguccgccugccacgacggcaaggaguggaccuacaucggcgucgacgggcccgacaacaacgcccugcucaaggugaaguacggcgaggcguacaccgacaccuaccacagcuacgccaacaagauccugcggacgcaggaguccgccugcaacugcaucgggggcaacugcuaccugaugaucaccgacggcagcgccagcgggguguccgagugccgcuuccucaagauccgggagggccgcaucaucaaggagaucuuccccaccgggcgggucaagcacaccgaggagugcacgugcggcuucgccagcaacaagaccaucgagugcgcgugccgcgacaacuccuacaccgccaagcggcccuucgugaagcugaacguggagaccgacgccgccgagauccgccugaugugcacggacaccuaccucgacaccccgcggcccaacgacgggagcaucaccggccccugcgaguccaacggcgacaaggggagcggcgggaucaagggcggguucguccaccagcgcauggaguccaagaucggccggugguacagccgcacgauguccaagaccgagcggaugggcauggggcuguacgugaaguacgacggcgaccccugggccgacagcgacgcgcuggccuucuccggggugauggucagcaugaaggagccgggcugguacuccuucggguucgagaucaaggacaagaagugcgacgugcccugcaucggcaucgagauggugcacgacggcgggaaggagaccuggcacagcgccgccaccgccaucuacugccucaugggcuccgggcagcugcugugggacacggucaccggcguggacauggcgcucuga

SEQ ID NO: 94143 - RNA, 1401 nt, Artificial Sequence
  derived and/or modified CDS sequence (opt1) from neuraminidase__InfluenzaB__AHL93349
augcugcccagcaccauccagacccucacgcuguuccugaccuccggcggggugcuccugagccuguacgucuccgccagccucuccuaccugcuguacagcgacauccuccugaaguucuccccgaccgagaucaccgcccccacgaugccccuggacugcgcgaacgccagcaacgugcaggccgugaaccgcuccgccaccaagggcgucacccuccugcugcccgagccggaguggaccuacccccggcucagcugccagggguccacguuccagaaggcccugcugaucagcccccaccgcuucggcgagaccaaggggaacuccgcgccccucaucauccgggagccguucaucgccugcggccccaacgagugcaagcacuucgcccugacccacuacgccgcgcagcccggcggguacuacaacggcacccgcggggaccggaacaagcugcgccaccucaucagcgugaagcugggcaagauccccacgguggagaacuccaucuuccacauggccgccuggagcggguccgccugccacgacggcaaggaguggaccuacaucggcgucgacgggccggacaacaacgcccugcucaaggugaaguacggcgaggcguacaccgacaccuaccacagcuacgccaacaagauccugcggacgcaggaguccgccugcaacugcaucgggggcaacugcuaccugaugaucaccgacggcagcgccagcgggguguccgagugccgcuuccucaagauccgggagggccgcaucaucaaggagaucuuccccaccgggcgggucaagcacaccgaggagugcacgugcggcuucgccagcaacaagaccaucgagugcgcgugccgcgacaacuccuacaccgccaagcggcccuucgugaagcugaacguggagaccgacacggccgagauccgccugaugugcaccgacaccuaccucgacacgccccggccgaacgacgggagcaucaccggccccugcgaguccaacggcgacaaggggagcggcgggaucaagggcggguucguccaccagcgcauggaguccaagaucggccggugguacagccgcaccauguccaagaccgagcggaugggcauggagcuguacgugaaguacgacggggaccccugggccgacagcgacgcccuggcguucuccggcgugauggucagcaugaaggagcccgggugguacuccuucggcuucgagaucaaggacaagaagugcgacgugccgugcaucgggaucgagauggugcacgacggcggcaaggagaccuggcacagcgccgccacggccaucuacugccucaugggguccggccagcugcugugggacaccgucaccggggugaacauggcccucuga

SEQ ID NO: 94144 - RNA, 1401 nt, Artificial Sequence; identical to SEQ ID NO: 92985
  derived and/or modified CDS sequence (opt1) from neuraminidase__InfluenzaB__AHL93371

SEQ ID NO: 94145 - RNA, 1401 nt, Artificial Sequence
  derived and/or modified CDS sequence (opt1) from neuraminidase__InfluenzaB__AHL93382
augcugcccagcaccauccagacccucacgcuguuccugaccuccggcggggugcuccugagccuguacgucuccgccagccucuccuaccugcuguacagcgacauccuccugaaguucuccccgaccgagaucaccgcccccacgaugccccuggacugcgcgaacgccagcaacgugcaggccgugaaccgcuccgccaccaagggcgucacccuccugcugcccgagccggaguggaccuacccccggcucagcugccccggguccacguuccagaaggcccugcugaucagcccccaccgcuucggcgagaccaaggggaacuccgcgccgcucaucauccgggagcccuucaucgccugcggccccaacgagugcaagcacuucgcccugacccacuacgccgcgcagcccggcggguacuacaacggcacccgcggggaccggaacaagcugcgccaccucaucagcgugaagcugggcaagaucccgacgguggagaacuccaucuuccacauggccgccuggagcggguccgccugccacgacggcaaggaguggaccuacaucggcgucgacgggcccgacaacaacgcccugcucaaggugaaguacggcgaggcguacaccgacaccuaccacagcuacgccaacaagauccugcggacgcaggaguccgccugcaacugcaucgggggcaacugcuaccugaugaucaccgacggcagcgccagcgggguguccgagugccgcuuccucaagauccgggagggccgcaucaucaaggagaucuuccccaccgggcgggucaagcacaccgaggagugcacgugcggcuucgccagcaacaagaccaucgagugcgcgugccgcgacaacuccuacaccgccaagcggcccuucgugaagcugaacguggagaccgacacggccgagauccgccugaugugcaccgacaccuaccucgacaccccgcggcccaacgacgggagcaucacgggccccugcgaguccaacggcgacaaggggagcggcgggaucaagggcggguucguccaccagcgcauggaguccaagaucggccggugguacagccgcaccauguccaagaccgagcggaugggcauggagcuguacgugaaguacgacggggaccccugggccgacagcgacgcccuggcguucuccggcgugauggucagcaugaaggagccggggugguacuccuucggcuucgagaucaaggacaagaagugcgacgugcccugcaucgggaucgagauggugcacgacggcggcaaggagaccuggcacagcgccgccacggccaucuacugccucaugggguccggccagcugcugugggacaccgucaccggggugaacauggcccucuga

SEQ ID NO: 94146 - RNA, 1401 nt, Artificial Sequence; identical to SEQ ID NO: 92985
  derived and/or modified CDS sequence (opt1) from neuraminidase__InfluenzaB__AHL93393

SEQ ID NO: 94147 - RNA, 1401 nt, Artificial Sequence; identical to SEQ ID NO: 92985
  derived and/or modified CDS sequence (opt1) from neuraminidase__InfluenzaB__AHL93404

SEQ ID NO: 94148 - RNA, 1401 nt, Artificial Sequence; identical to SEQ ID NO: 92985
  derived and/or modified CDS sequence (opt1) from neuraminidase__InfluenzaB__AHL93415

SEQ ID NO: 94149 - RNA, 1401 nt, Artificial Sequence; identical to SEQ ID NO: 92985
  derived and/or modified CDS sequence (opt1) from neuraminidase__InfluenzaB__AHL93426

SEQ ID NO: 94150 - RNA, 1401 nt, Artificial Sequence; identical to SEQ ID NO: 92985
  derived and/or modified CDS sequence (opt1) from neuraminidase__InfluenzaB__AHL93437

SEQ ID NO: 94151 - RNA, 1401 nt, Artificial Sequence; identical to SEQ ID NO: 94145
  derived and/or modified CDS sequence (opt1) from neuraminidase__InfluenzaB__AHL93448

SEQ ID NO: 94152 - RNA, 1404 nt, Artificial Sequence
  derived and/or modified CDS sequence (opt1) from neuraminidase__InfluenzaB__AHL93459
augcugcccagcaccauccagacccucacgcuguuccugaccuccggcggggugcuccugagccuguacgucuccgccagccucuccuaccugcuguacagcgacauccuccugaaguucuccccgaccgagaucaccgcccccacgaugccccuggacugcgcgaacgccagcaacgugcaggccgugaaccgcuccgccaccaagggcgucacccuccugcugcuccccgagccggaguggaccuacccccggcugagcugccccggguccacguuccagaaggcccugcucaucagcccccaccgcuucggcgagaccaaggggaacuccgcgccgcugaucauccgggagcccuucaucgccugcggccccaacgagugcaagcacuucgcccugacccacuacgccgcgcagcccggcggguacuacaacggcacccgcggggaccggaacaagcuccgccaccugaucagcgugaagcugggcaagaucccgacgguggagaacuccaucuuccacauggccgccuggagcggguccgccugccacgacggcaaggaguggaccuacaucggcgucgacgggcccgacaacaacgcccuccugaaggugaaguacggcgaggcguacaccgacaccuaccacagcuacgccaacaagauccugcggacgcaggaguccgccugcaacugcaucgggggcaacugcuaccucaugaucaccgacggcagcgccagcgggguguccgagugccgcuuccugaagauccgggagggccgcaucaucaaggagaucuuccccaccgggcgggucaagcacaccgaggagugcacgugcggcuucgccagcaacaagaccaucgagugcgcgugccgcgacaacuccuacaccgccaagcggcccuucgugaagcugaacguggagaccgacacggccgagauccgccucaugugcaccgacaccuaccuggacaccccgcggcccaacgacgggagcaucacgggccccugcgaguccaacggcgacaaggggagcggcgggaucaagggcggguucguccaccagcgcauggaguccaagaucggccggugguacagccgcaccauguccaagaccgagcggaugggcauggggcuguacgugaaguacgacggcgaccccugggccgacagcgacgcccucgcguucuccggggugauggucagcaugaaggagccgggcugguacuccuucggguucgagaucaaggacaagaagugcgacgugcccugcaucggcaucgagauggugcacgacggcgggaaggagaccuggcacagcgccgccacggccaucuacugccugaugggcuccgggcagcugcucugggacaccgucaccggcguggacauggcccuguga

SEQ ID NO: 94153 - RNA, 1401 nt, Artificial Sequence
  derived and/or modified CDS sequence (opt1) from neuraminidase__InfluenzaB__AHL93470
augcugcccagcaccauccagacccucacgcuguuccugaccuccggcggggugcuccugagccuguacgucuccgccagccucuccuaccugcuguacagcgacauccuccugaaguucuccccgaccgagaucaccgcccccacgaugccccuggacugcgcgaacgccagcaacgugcaggccgugaaccgcuccgccaccaagggcgucacccuccugcugcccgagccggaguggaccuacccccggcucagcugccccggguccacguuccagaaggcccugcugaucagcccccaccgcuucggcgagaccaaggggaacuccgcgccgcucaucauccgggagcccuucaucgccugcggccccaacgagugcaagcacuucgcccugacccacuacgccgcgcagcccggcggguacuacaacggcacccgcggggaccggaacaagcugcgccaccucaucagcgugaagcugggcaagaucccgacgguggagaacuccaucuuccacauggccgccuggagcggguccgccugccacgacggcaaggaguggaccuacaucggcgucgacgggcccgacaacaacgcccugcucaaggugaaguacggcgaggcguacaccgacaccuaccacagcuacgccaacaagauccugcggacgcaggaguccgccugcaacugcaucgggggcaacugcuaccugaugaucaccgacggcagcgccagcgggguguccgagugccgcuuccucaagauccgggagggccgcaucaucaaggagaucuuccccaccgggcgggucaagcacaccgaggagugcacgugcggcuucgccagcaacaagaccaucgagugcgcgugccgcgacaacuccuacaccgccaagcggcccuucgugaagcugaacguggagaccgacacggccgagauccgccugaugugcaccgacaccuaccucgacaccccgcggcccaacgacgggagcaucacgggccccugcgaguccaacggcgacaaggggagcggcgggaucaagggcggguucguccaccagcgcauggaguccaagaucggccggugguacagccgcaccauguccaagaccgagcggaugggcauggggcuguacgugaaguacgacggcgaccccugggccgacagcgacgcccugaccuucuccggggugauggucagcaugaaggagccgggcugguacuccuucggguucgagaucaaggacaagaagugcgacgugcccugcaucggcaucgagauggugcacgacggcgggaaggagacguggcacagcgcggccaccgccaucuacugccucaugggcuccgggcagcugcugugggacaccgucaccggcguggacauggcccucuga

SEQ ID NO: 94154 - RNA, 1401 nt, Artificial Sequence; identical to SEQ ID NO: 92922
  derived and/or modified CDS sequence (opt1) from neuraminidase__InfluenzaB__AHL93481

SEQ ID NO: 94155 - RNA, 1401 nt, Artificial Sequence; identical to SEQ ID NO: 92980
  derived and/or modified CDS sequence (opt1) from neuraminidase__InfluenzaB__AHL93492

SEQ ID NO: 94156 - RNA, 1401 nt, Artificial Sequence; identical to SEQ ID NO: 92841
  derived and/or modified CDS sequence (opt1) from neuraminidase__InfluenzaB__AHL93503

SEQ ID NO: 94157 - RNA, 1401 nt, Artificial Sequence
  derived and/or modified CDS sequence (opt1) from neuraminidase__InfluenzaB__AHL93514
augcugcccagcaccauccagacccucacgcuguuccugaccuccggcggggugcuccugagccuguacgucuccgccagccucuccuaccugcuguacagcgacauccuccugaaguucuccccgaccgagaucaccgcccccacgaugccccuggacugcgcgaacgccagcaacgugcaggccgugaaccgcuccgccaccaagggcgucacccuccugcugcccgagccggaguggaccuacccccggcucagcugccccggguccacguuccagaaggcccugcugaucagcccccaccgcuucggcgagaccaaggggaacuccgcgccgcucaucauccgggagcccuucaucgccugcggccccaacgagugcaagcacuucgcccugacccacuacgccgcgcagcccggcggguacuacaacggcacccgcggggaccggaacaagcugcgccaccucaucagcaucaagcugggcaagaucccgacgguggagaacuccaucuuccacauggccgccuggagcggguccgccugccacgacggcaaggaguggaccuacaucggcguggacgggcccgacaacaacgcccugcucaaggucaaguacggcgaggcguacaccgacaccuaccacagcuacgccaacaagauccugcggacgcaggaguccgccugcaacugcaucgggggcaacugcuaccugaugaucaccgacggcagcgccagcgggguguccgagugccgcuuccucaagauccgggagggccgcaucaucaaggagaucuuccccaccgggcgggugaagcacaccgaggagugcacgugcggcuucgccagcaacaagaccaucgagugcgcgugccgcgacaacuccuacaccgccaagcggcccuucgucaagcugaacguggagaccgacacggccgagauccgccugaugugcaccgacaccuaccucgacaccccgcggcccgacgacgggagcaucacgggcuccugcgagagcaacggcgacaagggguccggcgggaucaagggcggguucgugcaccagcgcauggagagcaagaucggccggugguacucccgcaccaugagcaagaccgagcggaugggcauggggcuguacgucaaguacgacggcgaccccugggccgacuccgacgcccugaccuucagcggggugaugguguccaugaaggagcccggcugguacagcuucggguucgagaucaaggacaagaagugcgacgucccgugcaucggcaucgagauggugcacgacggcgggaaggagacguggcacuccgcggccaccgccaucuacugccucaugggcagcgggcagcugcugugggacaccgugaccggcgucgacauggcccucuga

SEQ ID NO: 94158 - RNA, 1401 nt, Artificial Sequence; identical to SEQ ID NO: 92841
  derived and/or modified CDS sequence (opt1) from neuraminidase__InfluenzaB__AHL93525

SEQ ID NO: 94159 - RNA, 1401 nt, Artificial Sequence; identical to SEQ ID NO: 92980
  derived and/or modified CDS sequence (opt1) from neuraminidase__InfluenzaB__AHL93536

SEQ ID NO: 94160 - RNA, 1401 nt, Artificial Sequence
  derived and/or modified CDS sequence (opt1) from neuraminidase__InfluenzaB__AHL93558
augcugcccagcaccauccagacccucacgcuguuccugaccuccggcggggugcuccugagccuguacgucuccgccagccucuccuaccugcuguacagcgacauccuccugaaguucuccccgaccgagaucaccgcccccgcgaugccccuggacugcgccaacgccagcaacgugcaggccgugaaccgcuccgccacgaagggcgucacccuccugcugcccgagccggaguggaccuacccccggcucagcugccccggguccaccuuccagaaggcgcugcugaucagcccccaccgcuucggcgagacgaaggggaacuccgccccgcucaucauccgggagcccuucaucgccugcggccccaacgagugcaagcacuucgcccugacccacuacgcggcccagcccggcggguacuacaacggcacccgcggggaccggaacaagcugcgccaccucaucagcgugaagcugggcaagaucccgaccguggagaacuccaucuuccacauggccgccuggagcggguccgccugccacgacggcaaggaguggacguacaucggcgucgacgggcccgacaacaacgcgcugcucaaggugaaguacggcgaggccuacaccgacaccuaccacagcuacgccaacaagauccugcggacccaggaguccgccugcaacugcaucgggggcaacugcuaccugaugaucacggacggcagcgccagcgggguguccgagugccgcuuccucaagauccgggagggccgcaucaucaaggagaucuuccccaccgggcgggucaagcacaccgaggagugcacgugcggcuucgcgagcaacaagaccaucgagugcgccugccgcgacaacuccuacaccgccaagcggcccuucgugaagcugaacguggagaccgacaccgccgagauccgccugaugugcacggacaccuaccucgacaccccgcggcccaacgacgggagcaucaccggccccugcgaguccgacggcgacaaggggagcggcgggaucaagggcggguucauccaccagcgcauggaguccaagaucggccggugguacagccgcacgauguccaagaccgagcggaugggcauggggcuguacgucaaguacgacggcgaccccugggccgacagcgacgcgcuggccuucuccggggugauggugagcaugaaggagccgggcugguacuccuucggguucgagaucaaggacaagaagugcgacguccccugcaucggcaucgagauggugcacgacggcgggaaggagaccuggcacagcgccgccaccgccaucuacugccucaugggcuccgggcagcugcugugggacacggugaccggcgucgacauggcgcucuga

SEQ ID NO: 94161 - RNA, 1401 nt, Artificial Sequence
  derived and/or modified CDS sequence (opt1) from neuraminidase__InfluenzaB__AHL93569
augcugcccagcaccauccagacccucacgcuguuccugaccuccggcggggugcuccugagccuguacgucuccgccagccucuccuaccugcuguacagcgacauccuccugaaguucuccccgaccgagaucaccgcccccacgaugccccuggacugcgcgaacgccagcaacgugcaggccgugaaccgcuccgccaccaagggcgucacccuccugcugcccgagccggaguggaccuacccccggcucagcugccccggguccacguuccagaaggcccugcugaucagcccccaccgcuucggcgagaccaaggggaacuccgcgccgcucaucauccgggagcccuucaucgccugcggccccaacgagugcaagcacuucgcccugacccacuacgccgcgcagcccggcggguacuacaacggcacccgcggggaccggaacaagcugcgccaccucaucagcgugaagcugggcaagaucccgacgguggagaacuccaucuuccacauggccgccuggagcggguccgccugccacgacggcaaggaguggaccuacaucggcgucgacgggcccgacaacaacgcccugcucaaggugaaguacggcgaggcguacaccgacaccuaccacagcuacgccaacaagauccugcggacgcaggaguccgccugcaacugcaucgggggcaacugcuaccugaugaucaccgacggcagcgccagcgggguguccgagugccgcuuccucaagauccgggagggccgcaucaucaaggagaucuuccccaccgggcgggucaagcacaccgaggagugcacgugcggcuucgccagcaacaagaccaucgagugcgcgugccgcgacaacuccuacaccgccaagcggcccuucgugaagcugaacguggagaccgacacggccgagauccgccugaugugcaccgacaccuaccucgacaccccgcggcccaacgacgggagcaucacgggccccugcgaguccgacggcgacaaggggagcggcgggaucaagggcggguucguccaccagcgcauggaguccaagaucggccggugguacagccgcaccauguccaagaccgagcggaugggcauggggcuguacgugaaguacgacggcgaccccugggccgacagcgacgcccugaccuucuccggggugauggucagcaugaaggagccgggcugguacuccuucggguucgagaucaaggacaagaagugcgacgugcccugcaucggcaucgagauggugcacgacggcgggaaggagacguggcacagcgcggccaccgccaucuacugccucaugggcuccgggcagcugcugugggacaccgucaccggcguggacauggcccucuga

SEQ ID NO: 94162 - RNA, 1401 nt, Artificial Sequence; identical to SEQ ID NO: 92980
  derived and/or modified CDS sequence (opt1) from neuraminidase__InfluenzaB__AHL93580

SEQ ID NO: 94163 - RNA, 1401 nt, Artificial Sequence; identical to SEQ ID NO: 92980
  derived and/or modified CDS sequence (opt1) from neuraminidase__InfluenzaB__AHL93591

SEQ ID NO: 94164 - RNA, 1401 nt, Artificial Sequence
  derived and/or modified CDS sequence (opt1) from neuraminidase__InfluenzaB__AHL93613
augcugcccagcaccauccagacccucacgcuguuccugaccuccggcggggugcuccugagccuguacgucuccgccagccucuccuaccugcuguacagcgacauccuccugaaguucuccccgaccgagaucaccgcccccacgaugccccuggacugcgcgaacgccagcaacgugcaggccgugaaccgcuccgccaccaagggcgucacccuccugcugcccgagccggaguggaccuacccccggcucagcugccccggguccacguuccagaaggcccugcugaucagcccccaccgcuucggcgagaccaaggggaacuccgcgccgcucaucauccgggagcccuucaucgccugcggccccaacgagugcaagcacuucgcccugacccacuacgccgcgcagcccggcggguacuacaacggcacccgcggggaccggaacaagcugcgccaccucaucagcgugaagcugggcaagaucccgacgguggagaacuccaucuuccacauggccgccuggagcggguccgccugccacgacggcaaggaguggaccuacaucggcgucgacgggcccgacaacaacgcccugcucaaggugaaguacggcgaggcguacaccgacaccuaccacagcuacgccaacaagauccugcggacgcaggaguccgccugcaacugcaucgggggcaacugcuaccugauggugaccgacggcagcgccagcggggucuccgagugccgcuuccucaagauccgggagggccgcaucaucaaggagaucuuccccaccgggcgggugaagcacaccgaggagugcacgugcggcuucgccagcaacaagaccaucgagugcgcgugccgcgacaacuccuacaccgccaagcggcccuucgugaagcugaacgucgagaccgacacggccgagauccgccugaugugcaccgacaccuaccucgacaccccgcggcccgacgacgggagcaucacgggccccugcgaguccaacggcgacaaggggagcggcgggaucaagggcggguucgugcaccagcgcauggaguccaagaucggccggugguacagccgcaccauguccaagaccgagcggaugggcauggggcuguacgugaaguacgacggcgaccccugggccgacagcgacgcccuggucuucuccggggugauggugagcaugaaggagccgggcugguacuccuucggguucgagaucaaggacaagaagugcgacguccccugcaucggcaucgagauggugcacgacggcgggaaggagaccuggcacagcgcggccacggccaucuacugccucaugggcuccgggcagcugcugugggacaccgugaccggcgucgacauggcccucuga

SEQ ID NO: 94165 - RNA, 1401 nt, Artificial Sequence; identical to SEQ ID NO: 92980
  derived and/or modified CDS sequence (opt1) from neuraminidase__InfluenzaB__AHL93624

SEQ ID NO: 94166 - RNA, 1401 nt, Artificial Sequence; identical to SEQ ID NO: 94164
  derived and/or modified CDS sequence (opt1) from neuraminidase__InfluenzaB__AHL93635

SEQ ID NO: 94167 - RNA, 1401 nt, Artificial Sequence; identical to SEQ ID NO: 94164
  derived and/or modified CDS sequence (opt1) from neuraminidase__InfluenzaB__AHL93646

SEQ ID NO: 94168 - RNA, 1401 nt, Artificial Sequence; identical to SEQ ID NO: 92841
  derived and/or modified CDS sequence (opt1) from neuraminidase__InfluenzaB__AHL93657

SEQ ID NO: 94169 - RNA, 1401 nt, Artificial Sequence; identical to SEQ ID NO: 92980
  derived and/or modified CDS sequence (opt1) from neuraminidase__InfluenzaB__AHL93668

SEQ ID NO: 94170 - RNA, 1401 nt, Artificial Sequence
  derived and/or modified CDS sequence (opt1) from neuraminidase__InfluenzaB__AHL93679
augcugcccagcaccauccagacccucacgcuguuccugaccuccggcggggugcuccugagccuguacgucuccgcccuccugagcuaccugcucuacuccgacauccugcugaaguucagcccgaccgagaucaccgcccccacgaugucccucgacugcgcgaacgccagcaacgugcaggccgugaaccgcuccgccaccaagggcgucaccuuccugcugcccgagcccgaguggaccuacccgcggcucagcugccccggguccacguuccagaaggcccugcugaucagcccccaccgcuucggcgagaccaaggggaacuccgcgccccucaucauccgggagccguucaucgccugcggccccaacgagugcaagcacuucgcccugacccacuacgccgcgcagcccggcggguacuacaacggcacccgcggggaccggaacaagcugcgccaccucaucagcgugaagcugggcaagauccccacgguggagaacuccaucuuccacauggccgccuggagcggguccgccugccacgacggcaaggaguggaccuacaucggcgucgacgggccggacaacgacgcccugcucaaggugaaguacggcgaggcguacaccgacaccuaccacagcuacgccaacaagauccugcggacgcaggaguccgccugcaacugcaucgggggcaacugcuaccugaugaucaccgacggcagcgccagcgggguguccgagugccgcuuccucaagauccgggagggccgcaucaucaaggagauccugcccaccgggcgggucaagcacaccgaggagugcacgugcggcuucgccagcaacaagaccaucgagugcgcgugccgcgacaacuccuacaccgccaagcggcccuucgugaagcugaacguggagaccgacacggccgagauccgccucaugugcaccgacaccuaccuggacacgccccggccggacgacgggagcaucaccggccccugcgaguccaacggcgacaaggggagcggcgggaucaagggcggguucguccaccagcgcauggaguccaagaucggccggugguacagccgcaccauguccaagaccgagcggaugggcauggggcuguacgugaaguacgacggcgaccccugggccgacagcgacgcccucgcguucuccggggugauggucagcaugaaggagcccggcugguacuccuucggguucgagaucaaggacaagaagugcgacgugccgugcaucggcaucgagauggugcacgacggcgggaaggagaccuggcacagcgccgccacggccaucuacugccugaugggcuccgggcagcugcucugggacaccgucaccggcguggacauggcccuguga

SEQ ID NO: 94171 - RNA, 1401 nt, Artificial Sequence; identical to SEQ ID NO: 94164
  derived and/or modified CDS sequence (opt1) from neuraminidase__InfluenzaB__AHL93690

SEQ ID NO: 94172 - RNA, 1401 nt, Artificial Sequence; identical to SEQ ID NO: 94164
  derived and/or modified CDS sequence (opt1) from neuraminidase__InfluenzaB__AHL93701

SEQ ID NO: 94173 - RNA, 1401 nt, Artificial Sequence; identical to SEQ ID NO: 94164
  derived and/or modified CDS sequence (opt1) from neuraminidase__InfluenzaB__AHL93712

SEQ ID NO: 94174 - RNA, 1401 nt, Artificial Sequence
  derived and/or modified CDS sequence (opt1) from neuraminidase__InfluenzaB__AHL93723
augcugcccagcaccauccagaugcucacccuguuccugacguccggcggggugcuccugagccuguacgucuccgccagccucuccuaccugcuguacagcgacauccuccugaaguucuccccgaccgagaucaccgcccccaccaugccccuggacugcgcgaacgccagcaacgugcacgccgugaaccgcuccgccacgaagggcgucaccuuccuccugcccgagccggaguggaccuacccccggcugagcugccccggguccaccuuccagaaggcccuccugaucagcccccaccgcuucggcgagacgaaggggaacuccgcgccgcugaucauccgggagcccuucaucgccugcggccccaacgagugcaagcacuucgcccucacccacuacgccgcgcagcccggcggguacuacaacggcacccgcggggaccggaacaagcugcgccaccugaucagcgugaagcucggcaagaucccgaccguggagaacuccaucuuccacauggccgccuggagcggguccgccugccacgacggcaaggaguggacguacaucggcgucgacgggcccgacaacaacgcccugcugaagaucaaguacggcgaggcguacaccgacaccuaccacagcuacgccaacaacauccuccggacccaggaguccgccugcaacugcaucgggggcaacugcuaccugaugaucacggacggcagcgccagcgggguguccgagugccgcuuccugaagauccgggagggccgcaucaucaaggagaucuuccccaccgggcgggugaagcacaccgaggagugcacgugcggcuucgccagcaacaagaccaucgagugcgcgugccgcgacaacuccuacaccgccaagcggcccuucgucaagcucaacguggagaccgacaccgccgagauccgccugaugugcacggacaccuaccuggacaccccgcggcccgacgacgggagcaccacgggccccugcgaguccaacggcgacaaggggagcggcgggaucaagggcggguucgugcaccagcgcauggccuccaagaucggccggugguacagccgcaccauguccaagaccgagcggaagggcauggggcucuacgucaaguacgacggcgaccccuggaccgacagcgacgcccuggcguuccgcggggugaugguguccaugaaggagccgggcugguacagcuucggguucgagaucaaggacaagaagugcgacguccccugcaucggcaucgagauggugcacgacggcgggaaggagacguggcacuccgccgccaccgccaucuacugccugaugggcagcgggcagcuccugugggacaccgugaccggcgucgacauggcccuguga

SEQ ID NO: 94175 - RNA, 1401 nt, Artificial Sequence; identical to SEQ ID NO: 92980
  derived and/or modified CDS sequence (opt1) from neuraminidase__InfluenzaB__AHL93734

SEQ ID NO: 94176 - RNA, 1401 nt, Artificial Sequence
  derived and/or modified CDS sequence (opt1) from neuraminidase__InfluenzaB__AHL93745
augcugcccagcaccauccagaugcucacccuguuccugacguccggcggggugcuccugagccuguacgucuccgccagccucuccuaccugcuguacagcgacauccuccugaaguucuccccgaccgagaucaccgcccccaccaugccccuggacugcgcgaacgccagcaacgugcacgccgugaaccgcuccgccacgaagggcgucaccuuccuccugcccgagccggaguggaccuacccccggcugagcugccccggguccaccuuccagaaggcccuccugaucagcccccaccgcuucggcgagacgaaggggaacuccgcgccgcugaucauccgggagcccuucaucgccugcggccccaacgagugcaagcacuucgcccucacccacuacgccgcgcagcccggcggguacuacaacggcacccgcggggaccggaacaagcugcgccaccugaucagcgugaagcucggcaagaucccgaccguggagaacuccaucuuccacauggccgccuggagcggguccgccugccacgacggcaaggaguggacguacaucggcgucgacgggcccgacaacaacgcccugcugaagaucaaguacggcgaggcguacaccgacaccuaccacagcuacgccaacaacgugcuccggacccaggaguccgccugcaacugcaucgggggcaacugcuaccugaugaucacggacggcagcgccagcgggguguccgagugccgcuuccugaagauccgggagggccgcaucaucaaggagaucuuccccaccgggcgggucaagcacaccgaggagugcacgugcggcuucgccagcaacaagaccaucgagugcgcgugccgcgacaacuccuacaccgccaagcggcccuucgugaagcucaacguggagaccgacaccgccgagauccgccugaugugcacggacaccuaccuggacaccccgcggcccgacgacgggagcaucaccggccccugcgaguccaacggcgacaaggggagcggcgggaucaagggcggguucguccaccagcgcauggccuccaagaucggccggugguacagccgcacgauguccaagaccgagcggaagggcauggggcucuacgugaaguacgacggcgaccccuggaccgacagcgacgcccuggcguuccgcggggugauggucuccaugaaggagccgggcugguacagcuucggguucgagaucaaggacaagaagugcgacgugcccugcaucggcaucgagauggugcacgacggcgggaaggagaccuggcacuccgccgccacggccaucuacugccugaugggcagcgggcagcuccugugggacaccgucaccggcguggacauggcccuguga

SEQ ID NO: 94177 - RNA, 1401 nt, Artificial Sequence; identical to SEQ ID NO: 93143
  derived and/or modified CDS sequence (opt1) from neuraminidase__InfluenzaB__AHL93756

SEQ ID NO: 94178 - RNA, 1401 nt, Artificial Sequence; identical to SEQ ID NO: 94164
  derived and/or modified CDS sequence (opt1) from neuraminidase__InfluenzaB__AHL93767

SEQ ID NO: 94179 - RNA, 1401 nt, Artificial Sequence
  derived and/or modified CDS sequence (opt1) from neuraminidase__InfluenzaB__AHL93778
augcugcccagcaccauccagacccucauccuguuccugacguccggcggggugcuccugagccuguacgucuccgcccuccugagcuaccugcucuacuccgacauccugcugaaguucagcccgaccgagaucaccgcccccaccaugucccucgacugcgcgaacgccagcaacgugcaggccgugaaccgcuccgccacgaagggcgucaccuuccugcugcccgagcccgaguggaccuacccgcggcucagcugccccggguccaucuuccagaaggcccugcugaucagcccccaccgcuucggcgagaccaaggggaacuccgcgccccucaucauccgggagccguucaucgccugcggccccaacgagugcaagcacuucgcccugacgcacuacgccgcgcagcccggcggguacuacaacggcacccgcggggaccggaacaagcugcgccaccucaucagcgugaagcugggcaagauccccaccguggagaacuccaucuuccacauggccgccuggagcggguccgccugccacgacggcaaggaguggaccuacaucggcgucgacgggccggacaacgacgcccugcucaaggugaaguacggcgaggcguacacggacaccuaccacagcuacgccaacaagauccugcggacccaggaguccgccugcaacugcaucgggggcaacugcuaccugaugaucaccgacggcagcgccagcgggguguccgagugccgcuuccucaagauccgggagggccgcaucaucaaggagaucuuccccacggggcgggucaagcacaccgaggagugcacgugcggcuucgccagcaacaagaccaucgagugcgcgugccgcgacaacuccuacaccgccaagcggcccuucgugaagcugaacguggagaccgacaccgccgagauccgccugaugugcaccgacacguaccucgacacgccccggccggacgacgggagcaucaccggccccugcgaguccaacggcgacaaggggagcggcgggaucaagggcggguucguccaccagcgcauggaguccaagaucggccggugguacagccgcaccauguccaagaccgagcggaugggcauggggcuguacgugaaguacgacggcgaccccugggccgacagcgacgcccuggcguucuccggggugauggucagcaugaaggagcccggcugguacuccuucggguucgagaucaaggacaagaagugcgacgugccgugcaucggcaucgagauggugcacgacggcgggaaggagaccuggcacagcgccgccaccgccaucuacugccucaugggcuccgggcagcugcugugggacaccgucacgggcguggacauggcccucuga

SEQ ID NO: 94180 - RNA, 1401 nt, Artificial Sequence
  derived and/or modified CDS sequence (opt1) from neuraminidase__InfluenzaB__AHL93789
augcugcccagcaccauccagacccucacgcuguuccugaccuccggcggggugcuccugagccuguacgucuccgccagccucuccuaccugcuguacagcgacauccuccugaaguucuccccgaccggcaucaccgcccccacgaugccccuggacugcgcgaacgccagcaacgugcaggccgugaaccgcuccgccaccaagggggucacccuccugcugcccgagccggaguggaccuacccccggcucagcugccccggcuccacguuccagaaggcccugcugaucagcccccaccgcuucggggagaccaagggcaacuccgcgccgcucaucauccgggagcccuucaucgccugcggccccaacgagugcaagcacuucgcccugacccacuacgccgcgcagcccgggggcuacuacaacgggacccgcggcgaccggaacaagcugcgccaccucaucagcgugaagcuggggaagaucccgacgguggagaacuccaucuuccacauggccgccuggagcggcuccgccugccacgacggcaaggaguggaccuacaucggggucgacggccccgacaacaacgcccugcucaaggugaaguacggggaggcguacaccgacaccuaccacagcuacgccaacaagauccugcggacgcaggaguccgccugcaacugcaucggcggcaacugcuaccugauggugaccgacgggagcgccagcggcgucuccgagugccgcuuccucaagauccgggaggggcgcaucaucaaggagaucuuccccaccggccgggugaagcacaccgaggagugcacgugcggguucgccagcaacaagaccaucgagugcgcgugccgcgacaacuccuacaccgccaagcggcccuucgugaagcugaacgucgagaccgacacggccgagauccgccugaugugcaccgacaccuaccucgacaccccgcggcccgacgacggcagcaucacgggccccugcgaguccaacggggacaagggcagcgggggcaucaagggcggguucgugcaccagcgcauggaguccaagaucggccggugguacagccgcaccauguccaagaccgagcggauggggaugggccuguacgugaaguacgacggggaccccugggccgacagcgacgcccuggucuucuccggcgugauggugagcaugaaggagccggggugguacuccuucggcuucgagaucaaggacaagaagugcgacguccccugcaucggcaucgagauggugcacgacgggggcaaggagaccuggcacagcgcggccacggccaucuacugccucaugggguccggccagcugcugugggacaccgugaccggcgucgacauggcccucuga

SEQ ID NO: 94181 - RNA, 1401 nt, Artificial Sequence; identical to SEQ ID NO: 92980
  derived and/or modified CDS sequence (opt1) from neuraminidase__InfluenzaB__AHL93800

SEQ ID NO: 94182 - RNA, 1401 nt, Artificial Sequence; identical to SEQ ID NO: 92980
  derived and/or modified CDS sequence (opt1) from neuraminidase__InfluenzaB__AHL93811

SEQ ID NO: 94183 - RNA, 1401 nt, Artificial Sequence; identical to SEQ ID NO: 93516
  derived and/or modified CDS sequence (opt1) from neuraminidase__InfluenzaB__AHL93822

SEQ ID NO: 94184 - RNA, 1401 nt, Artificial Sequence; identical to SEQ ID NO: 92980
  derived and/or modified CDS sequence (opt1) from neuraminidase__InfluenzaB__AHL93833

SEQ ID NO: 94185 - RNA, 1401 nt, Artificial Sequence
  derived and/or modified CDS sequence (opt1) from neuraminidase__InfluenzaB__AHL93844
augcugcccagcaccauccagacccucacgcuguuccugaccuccggcggggugcuccugagccuguacgucuccgccagccucuccuaccugcuguacagcggcauccuccugaaguucuccccgaccgagaucaccgcccccacgaugccccuggacugcgcgaacgccagcaacgugcaggccgugaaccgcuccgccaccaaggaggucacccuccugcugcccgagccggaguggaccuacccccggcucagcugccccggguccacguuccagaaggcccugcugaucagcccccaccgcuucggcgagaccaaggggaacuccgcgccgcucaucauccgggagcccuucaucgccugcggccccaacgagugcaagcacuucgcccugacccacuacgccgcgcagcccggcggguacuacaacggcacccgcggggaccggaacaagcugcgccaccucaucagcgugaagcugggcaagaucccgacgguggagaacuccaucuuccacauggccgccuggagcggguccgccugccacgacggcaaggaguggaccuacaucggcgucgacgggcccgacgacaacgcccugcucaaggugaaguacggcgaggcguacaccgacaccuaccacagcuacgcccacaagauccugcggacgcaggaguccgccugcaacugcaucgggggcaacugcuaccugaugaucaccgacggcagcgccagcgggguguccgagugccgcuuccucaagauccgggagggccgcaucaucaaggagaucuuccccaccgggcgggucaagcacaccgaggagugcacgugcggcuucgccagcaacaagaccaucgagugcgcgugccgcgacaacuccuacaccgccaagcggcccuucgugaagcugaacguggagaccgacacggccgagauccgccugaugugcaccgacaccuaccucgacaccccgcggcccaacgacgggagcaucacgggccccugcgaguccaacggcgacaaggggagcggcgggaucaagggcggguucguccaccagcgcauggaguccaagaucggccggugguacagccgcaccauguccaagaccgagcggaugggcauggggcuguacgugaaguacgacggcgaccccugggccgacagcgacgcccuggcguucuccggggugauggucagcaugaaggagccgggcugguacuccuucggguucgagaucaaggacaagaagugcgacgugcccugcaucggcaucgagauggugcacgacggcgggaaggagaccuggcacagcgccgccacggccaucuacugccucaugggcuccgggcagcugcugugggacaccgucaccggcguggacauggcccucuga

SEQ ID NO: 94186 - RNA, 1401 nt, Artificial Sequence; identical to SEQ ID NO: 92980
  derived and/or modified CDS sequence (opt1) from neuraminidase__InfluenzaB__AHL93855

SEQ ID NO: 94187 - RNA, 1401 nt, Artificial Sequence; identical to SEQ ID NO: 92980
  derived and/or modified CDS sequence (opt1) from neuraminidase__InfluenzaB__AHL93866

SEQ ID NO: 94188 - RNA, 1401 nt, Artificial Sequence; identical to SEQ ID NO: 92980
  derived and/or modified CDS sequence (opt1) from neuraminidase__InfluenzaB__AHL93877

SEQ ID NO: 94189 - RNA, 1401 nt, Artificial Sequence; identical to SEQ ID NO: 92980
  derived and/or modified CDS sequence (opt1) from neuraminidase__InfluenzaB__AHL93888

SEQ ID NO: 94190 - RNA, 1401 nt, Artificial Sequence
  derived and/or modified CDS sequence (opt1) from neuraminidase__InfluenzaB__AHL93899
augcugcccagcaccauccagaugcucacccuguuccugacguccggcggggugcuccugagccuguacgucuccgccagccucuccuaccugcuguacagcgacauccuccugaaguucuccccgaccgagaucaccgcccccaccaugccccuggacugcgcgaacgccagcaacgugcacgccgugaaccgcuccgccacgaagggcgucaccuuccuccugcccgagccggaguggaccuacccccggcugagcugccccggguccaccuuccagaaggcccuccugaucagcccccaccgcuucggcgagacgaaggggaacuccgcgccgcugaucauccgggagcccuucaucgccugcgagcccaacgagugcaagcacuucgcccucacccacuacgccgcgcagcccggcggcuacuacaacgggacccgcggcgaccggaacaagcugcgccaccugaucagcgugaagcucgggaagaucccgaccguggagaacuccaucuuccacauggccgccuggagcggcuccgccugccacgacgggaaggaguggacguacaucggcgucgacggccccgacaacaacgcccugcugaagaucaaguacggggaggcguacaccgacaccuaccacagcuacgccaacaacauccuccggacccaggaguccgccugcaacugcaucggcgggaacugcuaccugaugaucacggacggcagcgccagcggcguguccgagugccgcuuccugaagauccgggaggggcgcaucaucaaggagaucuuccccaccggccgggugaagcacaccgaggagugcacgugcggguucgccagcaacaagaccaucgagugcgcgugccgcgacaacuccuacaccgccaagcggcccuucgucaagcucaacguggagaccgacaccgccgagauccgccugaugugcacggacaccuaccuggacaccccgcggcccgacgacggcagcaccacggggcccugcgaguccaacggcgacaagggcagcgggggcaucaagggcggguucgugcaccagcgcauggccuccaagaucgggcggugguacagccgcaccauguccaagaccgagcggaagggcaugggccucuacgucaaguacgacggggaccccuggaccgacagcgacgcccuggcguuccgcggcgugaugguguccaugaaggagccggggugguacagcuucggcuucgagaucaaggacaagaagugcgacguccccugcaucgggaucgagauggugcacgacggcggcaaggagacguggcacuccgccgccaccgccaucuacugccugauggggagcggccagcuccugugggacaccgugaccggggucgacauggcccuguga

SEQ ID NO: 94191 - RNA, 1401 nt, Artificial Sequence
  derived and/or modified CDS sequence (opt1) from neuraminidase__InfluenzaB__AHL93910
augcugcccagcaccauccagaugcucacccuguuccugacguccggcggggugcuccugagccuguacgucuccgccagccucuccuaccugcuguacagcgacauccuccugaaguucuccccgaccgagaucaccgcccccaccaugccccuggacugcgcgaacgccagcaacgugcacgccgugaaccgcuccgccacgaagggcgucaccuuccuccugcccgagccggaguggaccuacccccggcugagcugccccggguccaccuuccagaaggcccuccugaucagcccccaccgcuucggcgagacgaaggggaacuccgcgccgcugaucauccgggagcccuucaucgccugcggccccaacgagugcaagcacuucgcccucacccacuacgccgcgcagcccggcggguacuacaacggcacccgcggggaccggaacaagcugcgccaccugaucagcgugaagcucggcaagaucccgaccguggagaacuccaucuuccacauggccgccuggagcggguccgccugccacgacggcaaggaguggacguacaucggcgucgacgggcccgacaacaacgcccugcugaagaucaaguacggcgaggcguacaccgacaccuaccacagcuacgccaacaacauccuccggacccaggaguccgccugcaacugcaucgggggcaacugcuaccugaugaucacggacggcagcgccagcgggguguccgagugccgcuuccugaagauccgggagggccgcaucaucaaggagaucuuccccaccgggcgggugaagcacaccgaggagugcacgugcggcuucgccagcaacaagaccaucgagugcacgugccgcgacaacuccuacaccgcgaagcggcccuucgucaagcucaacguggagaccgacaccgccgagauccgccugaugugcaccgacaccuaccuggacaccccgcggcccgacgacgggggcaucacgggccccugcgagagcaacggggacaagggcuccgggggcaucaagggcggguucgugcaccagcgcauggccagcaagaucggccggugguacucccgcaccaugagcaagaccgagcggaaggggaugggccucuacgucaaguacgacggggaccccuggaccgacuccgacgcccuggccuuccgcggcgugauggugagcaugaaggagccggggugguacuccuucggcuucgagaucaaggacaagaagugcgacguccccugcaucggcaucgagauggugcacgacgggggcaaggagacguggcacagcgcggccaccgccaucuacugccugaugggguccggccagcuccugugggacaccgugaccggcgucgacauggcccuguga

SEQ ID NO: 94192 - RNA, 1401 nt, Artificial Sequence; identical to SEQ ID NO: 92980
  derived and/or modified CDS sequence (opt1) from neuraminidase__InfluenzaB__AHL93921

SEQ ID NO: 94193 - RNA, 1401 nt, Artificial Sequence
  derived and/or modified CDS sequence (opt1) from neuraminidase__InfluenzaB__AHL93932
augcugcccagcaccauccagacccucacgcuguuccugaccuccggcggggugcuccugagccuguacgucuccgccagccucuccuaccugcuguacagcgacauccuccugaaguucuccccgaccgagaucaccgcccccacgaugccccuggacugcgcgaacgccagcaacgugcaggccgugaaccgcuccgccaccaagggcgucacccuccugcugcccgagccggaguggaccuacccccggcucagcugccccggguccacguuccagaaggcccugcugaucagcccccaccgcuucggcgagaccaaggggaacuccgcgccgcucaucauccgggagcccuucaucgccugcggccccaacgagugcaagcacuucgcccugacccacuacgccgcgcagcccggcggguacuacaacggcacccgcggggaccggaacaagcugcgccaccucaucagcgugaagcugggcaagaucccgacgguggagaacuccaucuuccacauggccgccuggagcggguccgccugccacgacggcaaggaguggaccuacaucggcgucgacgggcccgacaacaacgcccugcucaaggugaaguacggcgaggcguacaccgacaccuaccacagcuacgccaacaagauccugcggacgcaggaguccgccugcaacugcaucgggggcaacugcuaccugauggugaccgacggcagcgccagcggggucuccgagugccgcuuccucaagauccgggagggccgcaucaucaaggagaucuuccccaccgggcgggugaagcacaccgaggagugcacgugcggcuucgccagcaacaagaccaucgagugcgcgugccgcgacaacuccuacaccgccaagcggcccuucgugaagcugaacgucgagaccgacacggccgagauccgccugaugugcaccgacaccuaccucgacaccccgcggcccgacgacgggagcaucacgggccccugcgaguccaacggcgacaaggggagcggcgggaucaagggcggguucgugcaccagcgcauggaguccaagaucggccggugguacagccgcaccauguccaagaccgagcggaugggcauggagcuguacgugaaguacgacggggaccccugggccgacagcgacgcccuggcguucuccggcgucauggugagcaugaaggagccggggugguacuccuucggcuucgagaucaaggacaagaagugcgacgugcccugcaucgggaucgagaugguccacgacggcggcaaggagaccuggcacagcgccgccacggccaucuacugccucaugggguccggccagcugcugugggacaccgugaccgggguggacauggcccucuga

SEQ ID NO: 94194 - RNA, 1401 nt, Artificial Sequence; identical to SEQ ID NO: 93143
  derived and/or modified CDS sequence (opt1) from neuraminidase__InfluenzaB__AHL93943

SEQ ID NO: 94195 - RNA, 1401 nt, Artificial Sequence; identical to SEQ ID NO: 92980
  derived and/or modified CDS sequence (opt1) from neuraminidase__InfluenzaB__AHL93954

SEQ ID NO: 94196 - RNA, 1401 nt, Artificial Sequence
  derived and/or modified CDS sequence (opt1) from neuraminidase__InfluenzaB__AHL93965
augcugcccagcaccauccagacccucacgcuguuccugaccuccggcggggugcuccugagccuguacgucuccgccagccucuccuaccugcuguacagcgacauccuccugaaguucuccccgaccgagaucaccgcccccgcgaugccccuggacugcgccaacgccagcaacgugcaggccgugaacugcuccgccacgaagggcgucacccuccugcugcccgagccggaguggaccuacccccgccucagcugccccggguccaccuuccagaaggcgcugcugaucagcccccaccgguucggcgagacgaaggggaacuccgccccgcucaucauccgcgagcccuucaucgccugcggccccaacgagugcaagcacuucgcccugacccacuacgcggcccagcccggcggguacuacaacggcacccgcggggaccggaacaagcugcggcaccucaucagcgugaagcugggcaagaucccgaccguggagaacuccaucuuccacauggccgccuggagcggguccgccugccacgacggcaaggaguggacguacaucggcgucgacgggcccgacaacaacgcgcugcucaaggugaaguacggcgaggccuacaccgacaccuaccacagcuacgccaacaagauccugcgcacccaggaguccgccugcaacugcaucgggggcaacugcuaccugaugaucacggacggcagcgccagcgggguguccgagugccgguuccucaagauccgcgagggccggaucaucaaggagaucuuccccaccgggcgcgucaagcacaccgaggagugcacgugcggcuucgcgagcaacaagaccaucgagugcgccugccgggacaacuccuacaccgccaagcgccccuucgugaagcugaacguggagaccgacaccgccgagauccggcugaugugcacggacaccuaccucgacaccccgcgccccaacgacgggagcaucaccggccccugcgaguccgacggcgacaaggggaacggcgggaucaagggcggguucguccaccagcggauggagagcaagaucggccgcugguacucccggacgaugagcaagaccgagcgcaugggcauggggcuguacgugaaguacgacggcgaccccugggccgacuccgacgcgcuggccuucagcggggugauggucuccaugaaggagccgggcugguacagcuucggguucgagaucaaggacaagaagugcgacgugcccugcaucggcaucgagauggugcacgacggcgggaaggagaccuggcacuccgccgccaccgccaucuacugccucaugggcagcgggcagcugcugugggacacggucaccggcguggacauggcgcucuga

SEQ ID NO: 94197 - RNA, 1401 nt, Artificial Sequence; identical to SEQ ID NO: 92899
  derived and/or modified CDS sequence (opt1) from neuraminidase__InfluenzaB__AHL93976

SEQ ID NO: 94198 - RNA, 1401 nt, Artificial Sequence; identical to SEQ ID NO: 94170
  derived and/or modified CDS sequence (opt1) from neuraminidase__InfluenzaB__AHL93987

SEQ ID NO: 94199 - RNA, 1401 nt, Artificial Sequence
  derived and/or modified CDS sequence (opt1) from neuraminidase__InfluenzaB__AHL93998
augcugcccagcaccauccagacccucacgcuguuccugaccuccggcggggugcuccugagccuguacgucuccgccagccucuccuaccugcuguacagcgacauccuccugaaguucucccagaccgagaucaccgccccgaucaugccccuggacugcgcgaacgccagcaacgugcaggccgugaaccgcuccgccgccaagggcgucacgcuccugcugcccgagcccgaguggaccuacccgcggcucagcugccccggguccaccuuccagaaggcgcugcugaucagcccccaccgcuucggcgagaucaaggggaacuccgcgccccucaucauccgggagccguucaucgccugcggccccaccgagugcaagcacuucgcccugacgcacuacgccgcccagcccggcggguacuacaacggcacccgcgaggaccggaacaagcugcgccaccucaucagcgugaagcuggggaagauccccaccguggagaacuccaucuuccacauggccgccuggagcggcuccgccugccacgacgggaaggaguggaccuacaucggcgucgacggcccggacagcaacgcgcugcucaagaucaaguacggggaggccuacacggacaccuaccacuccuacgccaagaacauccugcggacccaggagagcgccugcaacugcaucggcggggacugcuaccugaugaucaccgacggccccgccagcggcguguccgagugccgcuuccucaagauccgggaggggcgcaucaucaaggagaucuuccccacgggccgggugaagcacaccgaggagugcacgugcggguucgcgagcaacaagaccaucgagugcgccugccgcgacaaccgguacaccgccaagcgccccuucgucaagcugaacguggagaccgacaccgccgagauccggcugaugugcaccgagacguaccucgacaccccgcgccccaacgacggcuccaucaccgggcccugcgagagcgacggcgacaagggcuccgggggcaucaagggcggguucgugcaccagcggauggccagcaagaucgggcgcugguacucccggaccaugagcaagacgaagcgcaugggcaugggccuguacgucaaguacgacggggaccccuggaccgacuccgaggcgcuggcccucagcggcgugaugguguccauggaggagccggggugguacagcuucggcuucgagaucaaggacaagaagugcgacguccccugcaucgggaucgagauggugcacgacggcggcaagaccaccuggcacuccgccgccacggccaucuacugccugauggggagcggccagcugcucugggacaccgugaccggggucgacauggcgcuguga

SEQ ID NO: 94200 - RNA, 1401 nt, Artificial Sequence
  derived and/or modified CDS sequence (opt1) from neuraminidase__InfluenzaB__AHL94009
augcugcccagcaccauccagaugcucacccuguuccugacguccggcggggugcuccugagccuguacgucuccgccagccucuccuaccugcuguacagcgacauccuccugaaguucuccccgaccgagaucaccgcccccaccaugccccuggacugcgcgaacgccagcaacgugcacgccgugaaccgguccgccacgaagggcgucaccuuccuccugcccgagccgaaguggaccuacccccggcugagcugccccggguccaccuuccagaaggcccuccugaucagcccccaccgcuucggcgagacgaaggggaacuccgcgccgcugaucauccgggagcccuucaucgccugcggccccaacgagugccgccacuucgcccucacccacuacgccgcgcagcccggcggguacuacaacggcacccgcggggaccggaacaagcugcggcaccugaucagcgugaagcucggcaagaucccgaccguggagaacuccaucuuccacauggccgccuggagcggguccgccugccacgacggcaaggaguggacguacaucggcgucgacgggcccgacaacaacgcccugcugaagaucaaguacggcgaggcguacaccgacaccuaccacagcuacgccaacaacauccuccgcacccaggaguccgccugcaacugcaucgggggcaacugcuaccugaugaucacggacggcagcgccagcgggguguccgagugccgguuccugaagauccgcgagggccggaucaucaaggagaucuuccccaccgggcgcgugaagcacaccgaggagugcacgugcggcuucgccagcaacaagaccaucgagugcgcgugccgggacaacuccuacaccgccaagcgccccuucgucaagcucaacguggagaccgacaccgccgagauccggcugaugugcacggacaccuaccuggacaccccgcgccccgacgacgggagcaucaccggccccugcgaguccaacggcgacaaggggagcggcgggaucaagggcggguucgugcaccagcggauggccuccaagaucggccgcugguacagccggacgauguccaagaccgagcgcaagggcauggggcucuacgucaaguacgacggcgaccccuggaccgacagcgacgcccuggcguuccgcggggugaugguguccaugaaggagccgggcugguacagcuucggguucgagaucaaggacaagaagugcgacguccccugcaucggcaucgagauggugcacgacggcgggaaggagaccuggcacuccgccgccacggccaucuacugccugaugggcagcgggcagcuccugugggacaccgugaccggcgucgacauggcccuguga

SEQ ID NO: 94201 - RNA, 1401 nt, Artificial Sequence; identical to SEQ ID NO: 92980
  derived and/or modified CDS sequence (opt1) from neuraminidase__InfluenzaB__AHL94020

SEQ ID NO: 94202 - RNA, 1401 nt, Artificial Sequence; identical to SEQ ID NO: 92980
  derived and/or modified CDS sequence (opt1) from neuraminidase__InfluenzaB__AHL94031

SEQ ID NO: 94203 - RNA, 1401 nt, Artificial Sequence; identical to SEQ ID NO: 93143
  derived and/or modified CDS sequence (opt1) from neuraminidase__InfluenzaB__AHL94042

SEQ ID NO: 94204 - RNA, 1401 nt, Artificial Sequence
  derived and/or modified CDS sequence (opt1) from neuraminidase__InfluenzaB__AHL94053
augcugcccagcaccauccagacccucacgcuguuccugaccuccggcggggugcuccugagccuguaccucuccgcccugcugagcuaccuccuguacuccgacauccugcucaaguucagcccgaccgagaucaccgcccccacgaugucccuggacugcgcgaacgccagcaacguccaggccgugaaccgcuccgccaccaagggcgugaccuuccugcuccccgagcccgaguggaccuacccgcggcugagcugccccggguccacguuccagcgcgcccugcucaucagcccccaccgguucggcgagaccaaggggaacuccgcgccccugaucauccgcgagccguucaucgccugcggccccaacgagugcaagcacuucgcccugacccacuacgccgcgcagcccggcggguacuacaacggcacccgcggggaccggaacaagcuccggcaccugaucagcgucaagcugggcaagauccccacgguggagaacuccaucuuccacauggccgccuggagcggguccgccugccacgacggcaaggaguggaccuacaucggcguggacgggccggacaacgacgcccuccugaaggucaaguacggcgaggcguacaccgacaccuaccacagcuacgccaacaagauccugcgcacgcaggaguccgccugcaacugcaucgggggcaacugcuaccucaugaucaccgacggcagcgccagcgggguguccgagugccgguuccugaagauccgcgagggccggaucaucaaggagaucuuccccaccgggcgcgugaagcacaccgaggagugcacgugcggcuucgccagcaacaagaccaucgagugcgcgugccgggacaacuccuacaccgccaagcgccccuucgucaagcugaacguggagaccgacacggccgagauccggcucaugugcaccgacaccuaccuggacacgccccgcccggacgacgggagcaucaccggccccugcgaguccaacggcgacaaggggagcggcgggaucaagggcggguucgugcaccagcggauggaguccaagaucggccgcugguacagccggaccauguccaagaccgagcgcaugggcauggggcuguacgucaaguacgacggcgaccccugggccgacagcgacgcccucgcguucuccggggugauggugagcaugaaggagcccggcugguacuccuucggguucgagaucaaggacaagaagugcgacgucccgugcaucggcaucgagauggugcacgacggcgggaaggagaccuggcacagcgccgccacggccaucuacugccugaugggcuccgggcagcugcucugggacaccgugaccggcgucgacauggcccuguga

SEQ ID NO: 94205 - RNA, 1401 nt, Artificial Sequence; identical to SEQ ID NO: 92980
  derived and/or modified CDS sequence (opt1) from neuraminidase__InfluenzaB__AHL94064

SEQ ID NO: 94206 - RNA, 1401 nt, Artificial Sequence; identical to SEQ ID NO: 92980
  derived and/or modified CDS sequence (opt1) from neuraminidase__InfluenzaB__AHL94075

SEQ ID NO: 94207 - RNA, 1401 nt, Artificial Sequence
  derived and/or modified CDS sequence (opt1) from neuraminidase__InfluenzaB__AHL94086
augcugcccagcaccauccagacccucacgcuguuccugaccuccggcggggugcuccugagccuguacgucuccgccagccucuccuaccugcuguacagcgacauccuccugaaguucucccgcaccgagaucaccgccccgaucaugccccuggacugcgcgaacgccagcaacgugcaggccgugaaccgguccgccacgaagggcgucaccuuccuccugcccgagcccgaguggaccuacccgcgccugagcugccccggguccaccuuccagaaggcccuccugaucagcccccaccgguucggcgagacgaaggggaacuccgcgccccugaucauccgcgagccguucguggccugcggccccaaggagugcaagcacuucgcccucacccacuacgccgcgcagcccggcggguacuacaacggcacccgggaggaccgcaacaagcugcggcaccugaucagcgugaagcucgggaagauccccaccgucgagaacuccaucuuccacauggccgccuggagcggcuccgccugccacgacgggcgcgaguggacguacaucggcguggacggcccggacagcaacgcccugcugaagaucaaguacggggaggcguacaccgacaccuaccacuccuacgccaagaacauccuccggacccaggagagcgccugcaacugcaucggcggggacugcuaccugaugaucacggacggccccgccagcggcaucuccgagugccgcuuccugaagauccgggaggggcgcaucaucaaggagaucuuccccaccggccgggugaagcacaccgaggagugcacgugcggguucgccagcaacaagaccaucgagugcgcgugccgcgacaacuccuacaccgccaagcggcccuucgucaagcucaacguggagaccgacaccgccgagauccgccugaugugcacggagaccuaccuggacaccccgcggcccaacgacggcagcaucaccgggcccugcgaguccaacggcgacaagggcagcgggggcaucaagggcggguucgugcaccagcgcauggccuccaagaucgggcggugguacagccgcacgauguccaagaccaagcggaugggcaugggccucuacgucaaguacgacggggaccccuggaccgacagcgaggcccuggcgcuguccggcgugauggugagcauggaggagccggggugguacuccuucggcuucgagaucaaggacaagaagugcgacguccccugcaucgggaucgagauggugcacgacggcggcaagaccacguggcacagcgccgccaccgccaucuacugccucaugggguccggccagcugcugugggacaccgugaccggggucaacaugacgcucuga

SEQ ID NO: 94208 - RNA, 1401 nt, Artificial Sequence; identical to SEQ ID NO: 93143
  derived and/or modified CDS sequence (opt1) from neuraminidase__InfluenzaB__AHL94095

SEQ ID NO: 94209 - RNA, 1401 nt, Artificial Sequence; identical to SEQ ID NO: 92980
  derived and/or modified CDS sequence (opt1) from neuraminidase__InfluenzaB__AHL94106

SEQ ID NO: 94210 - RNA, 1401 nt, Artificial Sequence
  derived and/or modified CDS sequence (opt1) from neuraminidase__InfluenzaB__AHL94117
augcugcccagcaccauccagaugcucacccuguuccugacguccggcggggugcuccugagccuguacgucuccgccagccucuccuaccugcuguacagcgacauccuccugaaguucuccccgaccgagaucaccgcccccaccaugccccuggacugcgcgaacgccagcaacgugcacgccgugaaccgcuccgccacgaagggcgucaccuuccuccugcccgagccggaguggaccuacccccggcugagcugccccggguccaccuuccagaaggcccuccugaucagcccccaccgcuucggcgagacgaaggggaacuccgcgccgcugaucauccgggagcccuucaucgccugcggccccaacgagugcaagcacuucgcccucacccacuacgccgcgcagcccggcggguacuacaacggcacccgcggggaccggaacaagcugcgccaccugaucagcgugaagcucggcaagaucccgaccguggagaacuccaucuuccacauggccgccuggagcggguccgccugccacgacggcaaggaguggacguacaucggcgucgacgggcccgacaacaacgcccugcugaagaucaaguacggcgaggcguacaccgacaccuaccacagcuacgccaacaacauccuccggacccaggaguccgccugcaacugcaucgggggcaacugcuaccugaugaucacggacggcagcgccagcgggguguccgagugccgcuuccugaagauccgggagggccgcaucaucaaggagaucuuccccaccgggcgggugaagcacaccgaggagugcacgugcggcuucgccagcaacaagaccaucgagugcgcgugccgcgacaacuccuacaccgccaagcggcccuucgucaagcucaacguggagaccgacaccgccgagauccgccugaugugcacggacaccuaccuggacaccccgcggcccgacgacgggagcaucaccggccccugcgaguccaacggcgacaaggggagcggcgggaucaagggcggguucgugcaccagcgcauggccuccaagaucggccggugguacagccgcacgauguccaagaccgagcggaagggcauggggcuccacgucaaguacgacggcgaccccuggaccgacagcgacgcccuggcguuccgcggggugaugguguccaugaaggagccgggcugguacagcuucggguucgagaucaaggacaagaagugcgacguccccugcaucggcaucgagauggugcacgacggcgggaaggagaccuggcacuccgccgccacggccaucuacugccugaugggcagcgggcagcuccugugggacaccgugaccggcgucaacauggcccuguga

SEQ ID NO: 94211 - RNA, 1401 nt, Artificial Sequence; identical to SEQ ID NO: 92980
  derived and/or modified CDS sequence (opt1) from neuraminidase__InfluenzaB__AHL94128

SEQ ID NO: 94212 - RNA, 1401 nt, Artificial Sequence
  derived and/or modified CDS sequence (opt1) from neuraminidase__InfluenzaB__AHL94139
augcugcccagcaccauccagacccucacgcuguuccugaccuccggcggggugcuccugagccuguacgucuccgcccuccugagcuaccugcucuacuccgacauccugcugaaguucagcccgaccgagaucaccgcccccacgaugucccucgacugcgcgaacgccagcaacgugcaggccgugaaccgcuccgccaccaagggcgucaccuuccugcugcccgagcccgaguggaccuacccgcggcucagcugccccggguccacguuccagcgcgcccugcugaucagcccccaccgguucggcgagaccaaggggaacuccgcgccccucaucauccgcgagccguucaucgccugcggccccaacgagugcaagcacuucgcccugacccacuacgccgcgcagcccggcggguacuacaacggcacccgcggggaccggaacaagcugcggcaccucaucagcgugaagcugggcaagauccccacgguggagaacuccaucuuccacauggccgccuggagcggguccgccugccacgacggcaaggaguggaccuacaucggcgucgacgggccggacaacgacgcccugcucaaggugaaguacggcgaggcguacaccgacaccuaccacagcuacgccaacaagauccugcgcacgcaggaguccgccugcaacugcaucgggggcaacugcuaccugaugaucaccgacggcagcgccagcgggguguccgagugccgguuccucaagauccgcgagggccggaucaucaaggagaucuuccccaccgggcgcgucaagcacaccgaggagugcacgugcggcuucgccagcaacaagaccaucgagugcgcgugccgggacaacuccuacaccgccaagcgccccuucgugaagcugaacguggagaccgacacggccgagaucaagcugaugugcaccgacaccuaccucgacacgccccggccggacgacgggagcaucaccggccccugcgaguccaacggcgacaaggggagcggcgggaucaagggcggguucguccaccagcgcauggaguccaagaucggccggugguacagccgcaccauguccaagaccgagcggaugggcauggggcuguacgugaaguacgacggcgaccccugggccgacagcgacgcccuggcguucuccggggugauggucagcaugaaggagcccggcugguacuccuucggguucgagaucaaggacaagaagugcgacgugccgugcaucggcaucgagauggugcacgacggcgggaaggagaccuggcacagcgccgccacggccaucuacugccucaugggcuccgggcagcugcugugggacaccgucaccggcguggacauggcccucuga

SEQ ID NO: 94213 - RNA, 1401 nt, Artificial Sequence; identical to SEQ ID NO: 94170
  derived and/or modified CDS sequence (opt1) from neuraminidase__InfluenzaB__AHL94150

SEQ ID NO: 94214 - RNA, 1401 nt, Artificial Sequence
  derived and/or modified CDS sequence (opt1) from neuraminidase__InfluenzaB__AHL94161
augcugcccagcaccauccagaugcucacccuguuccugacguccggcggggugcuccugagccuguacgucuccgccagccucuccuaccugcuguacagcgacauccuccugaaguucuccccgaccgagaucaccgcccccaccaugccccuggacugcgcgaacgccagcaacgugcacgccgugaaccgcuccgccacgaagggcgucaccuuccuccugcccgagccggaguggaccuacccccggcugagcugccccggguccaccuuccagaaggcccuccugaucagcccccaccgcuucggcgagacgaaggggaacuccgcgccgcugaucauccgggagcccuucaucgccugcggccccaacgagugcaagcacuucgcccucacccacuacgccgcgcagcccggcggguacuacaacggcacccgcggggaccggaacaagcugcgccaccugaucagcgugaagcucggcaagaucccgaccguggagaacuccaucuuccacauggccgccuggagcggguccgccugccacgacggcaaggaguggacguacaucggcgucgacgggcccgacaacaacgcccugcugaagaucaaguacggcgaggcguacaccgacaccuaccacagcuacgccaacaacauccuccggacccaggaguccgccugcaacugcaucgggggcaacugcuaccugaugaucacggacggcagcgccagcgggguguccgagugccgcuuccugaagauccgggagggccgcaucaucaaggagaucuuccccaccgggcgggugaagcacaccgaggagugcacgugcggcuucgccagcaacaagaccaucgagugcgcgugccgcgacaacuccuacaccgccaagcggcccuucgucaagcucaacguggagaccgacaccgccaagauccgccugaugugcacggacaccuaccuggacaccccgcggcccgacgacgggagcaucaccggccccugcgaguccaacggcgacaaggggagcggcgggaucaagggcggguucgugcaccagcgcauggccuccaagaucggccggugguacagccgcacgauguccaagaccgagcggaagggcauggggcucuacgucaaguacgacggcgaccccuggaccgacagcgacgcccuggcguuccgcggggugaugguguccaugaaggagccgggcugguacagcuucggguucgagaucaaggacaagaagugcgacguccccugcaucggcaucgagauggugcacgacggcgggaaggagaccuggcacuccgccgccacggccaucuacugccugaugggcagcgggcagcuccugugggacaccgugaccggcgucgacauggcccuguga

SEQ ID NO: 94215 - RNA, 1401 nt, Artificial Sequence; identical to SEQ ID NO: 94170
  derived and/or modified CDS sequence (opt1) from neuraminidase__InfluenzaB__AHL94183

SEQ ID NO: 94216 - RNA, 1404 nt, Artificial Sequence
  derived and/or modified CDS sequence (opt1) from neuraminidase__InfluenzaB__AHL94194
augcugcccagcaccauccagacccucacgcuguuccugaccuccggcggggugcuccugagccuguacgucuccgcccuccugagcuaccugcucuacuccgacauccugcugaaguucagcccgaccgagaucaccgcccccacgaugucccucgacugcgcgaacgccagcaacgugcaggccgugaaccgcuccgccaccaagggcgucaccuuccugcugcuccccgagcccgaguggaccuacccgcggcugagcugccccggguccacguuccagcgcgcccugcucaucagcccccaccgguucggcgagaccaaggggaacuccgcgccccugaucauccgcgagccguucaucgccugcggccccaacgagugcaagcacuucgcccugacccacuacgccgcgcagcccggcggguacuacaacggcacccgcggggaccggaacaagcuccggcaccugaucagcgugaagcugggcaagauccccacgguggagaacuccaucuuccacauggccgccuggagcggguccgccugccacgacggcaaggaguggaccuacaucggcgucgacgggccggacaacgacgcccuccugaaggugaaguacggcgaggcguacaccgacaccuaccacagcuacgccaacaagauccugcgcacgcaggaguccgccugcaacugcaucgggggcaacugcuaccucaugaucaccgacggcagcgccagcgggguguccgagugccgguuccugaagauccgcgagggccggaucaucaaggagaucuuccccaccgggcgcgucaagcacaccgaggagugcacgugcggcuucgccagcaacaagaccaucgagugcgcgugccgggacaacuccuacaccgccaagcgccccuucgugaagcugaacguggagaccgacacggccgagauccggcucaugugcaccgacaccuaccuggacacgccccgcccggacgacgggagcaucaccggccccugcgaguccaacggcgacaaggggagcggcgggaucaagggcggguucguccaccagcggauggaguccaagaucggccgcugguacagccggaccauguccaagaccgagcgcaugggcauggggcuguacgugaaguacgacggcgaccccugggccgacagcgacgcccucgcguucuccggggugauggucagcaugaaggagcccggcugguacuccuucggguucgagaucaaggacaagaagugcgacgugccgugcaucggcaucgagauggugcacgacggcgggaaggagaccuggcacagcgccgccacggccaucuacugccugaugggcuccgggcagcugcucugggacaccgucaccggcguggacauggcccuguga

SEQ ID NO: 94217 - RNA, 1401 nt, Artificial Sequence; identical to SEQ ID NO: 92980
  derived and/or modified CDS sequence (opt1) from neuraminidase__InfluenzaB__AHL94205

SEQ ID NO: 94218 - RNA, 1401 nt, Artificial Sequence; identical to SEQ ID NO: 93143
  derived and/or modified CDS sequence (opt1) from neuraminidase__InfluenzaB__AHL94214

SEQ ID NO: 94219 - RNA, 1401 nt, Artificial Sequence
  derived and/or modified CDS sequence (opt1) from neuraminidase__InfluenzaB__AHL94224
augcugcccagcaccauccagaugcucacccuguuccugacguccggcggggugcuccugagccuguacgucuccgccagccucuccuaccugcuguacagcgacauccuccugaaguucuccccgaccgagaucaccgcccccaccaugccccuggacugcgcgaacgccagcaacgugcacgccgugaaccgcuccgccacgaagggcgucaccuuccuccugcccgagccggaguggaccuacccccggcugagcugccccggguccaccuuccagaaggcccuccugaucagcccccaccgcuucggcgagacgaaggggaacuccgcgccgcugaucauccgggagcccuucaucgccugcggccccaacgagugcaagcacuucgcccucacccacuacgccgcgcagcccggcggguacuacaacggcacccgcggggaccggaacaagcugcgccaccugaucagcgugaagcucggcaagaucccgaccguggagaacuccaucuuccacauggccgccuggagcggguccgccugccacgacggcaaggaguggacguacaucggcgucgacgggcccgacaacaacgcccugcugaagaucaaguacggcgaggcguacaccgacaccuaccacagcuacgccaacaacauccuccggacccaggaguccgccugcaacugcaucgggggcaacugcuaccugaugaucacggacggcagcgccagcgggguguccgagugccgcuuccugaagauccgggagggccgcaucaucaaggagaucuuccccaccgggcgggugaagcacaccgaggagugcacgugcggcuucgccagcaacaagaccaucgagugcgcgugccgcgacaacuccuacaccgccaagcggcccuucgucaagcucaacguggagaccgacaccgccgagauccgccugaugugcacggacaccuaccuggacaccccgcggcccgacgacgggagcaucaccggccccugcgaguccaacggcgacaaggggagcggcgggaucaagggcggguucgugcaccagcgcauggccuccaagaucggccggugguacagccgcacgauguccaagaccgagcggaagggcauggggcucuacgucaaguacgacggcgaccccuggaucgacagcgacgcccuggcguuccgcggggugaugguguccaugaaggagccgggcugguacagcuucggguucgagaucaaggacaagaagugcgacguccccugcaucggcaucgagauggugcacgacggcgggaaggagaccuggcacuccgccgccaccgccaucuacugccugaugggcagcgggcagcuccugugggacacggugaccggcgucgacauggcccuguga

SEQ ID NO: 94220 - RNA, 1401 nt, Artificial Sequence; identical to SEQ ID NO: 92980
  derived and/or modified CDS sequence (opt1) from neuraminidase__InfluenzaB__AHL94235

SEQ ID NO: 94221 - RNA, 1401 nt, Artificial Sequence; identical to SEQ ID NO: 93143
  derived and/or modified CDS sequence (opt1) from neuraminidase__InfluenzaB__AHL94246

SEQ ID NO: 94222 - RNA, 1401 nt, Artificial Sequence; identical to SEQ ID NO: 93143
  derived and/or modified CDS sequence (opt1) from neuraminidase__InfluenzaB__AHL94257

SEQ ID NO: 94223 - RNA, 1401 nt, Artificial Sequence; identical to SEQ ID NO: 92841
  derived and/or modified CDS sequence (opt1) from neuraminidase__InfluenzaB__AHL94267

SEQ ID NO: 94224 - RNA, 1401 nt, Artificial Sequence; identical to SEQ ID NO: 92841
  derived and/or modified CDS sequence (opt1) from neuraminidase__InfluenzaB__AHL94278

SEQ ID NO: 94225 - RNA, 1401 nt, Artificial Sequence; identical to SEQ ID NO: 92841
  derived and/or modified CDS sequence (opt1) from neuraminidase__InfluenzaB__AHL94299

SEQ ID NO: 94226 - RNA, 1401 nt, Artificial Sequence
  derived and/or modified CDS sequence (opt1) from neuraminidase__InfluenzaB__AHL94310
augcugcccagcaccauccagacccucacgcuguuccugaccuccggcggggugcuccugagccuguacgucuccgccagccucuccuaccugcuguacagcgacauccuccugaaguucucccgcaccgagaucaccgccccgaucaugccccuggacugcgcgaacgccagcaacgugcaggccgugaaccgguccgccacgaagggcgucacgccccuccugcccgagccggaguggaccuacccccgccugagcugccccggguccaccuuccagaaggcccuccugaucagcccccaccgguucggcgagaccaaggggaacuccgcgccgcugaucauccgcgagcccuucaucgccugcggccccaaggagugcaagcacuucgcccucacccacuacgccgcgcagcccggcggguacuacaacggcacccgggaggaccgcaacaagcugcggcaccugaucagcgugaagcucgggaagaucccgaccguggagaacuccaucuuccacauggccgccuggagcggcuccgccugccacgacgggcgcgaguggacguacaucggcgucgacggccccgacagcaacgcccugcugaagaucaaguacggggaggcguacaccgacaccuaccacuccuacgccaagaacauccuccggacccaggagagcgccugcaacugcaucggcggggacugcuaccugaugaucacggacggcagcgccuccggcaucagcgagugccgcuuccugaagauccgggaggggcgcaucaucaaggagaucuuccccaccggccgggugaagcacaccgaggagugcacgugcggguucgccuccaacaagaccaucgagugcgcgugccgcgacaacagcuacaccgccaagcggcccuucgugaagcucaacgucgagaccgacaccgccgagauccgccugaugugcacggagaccuaccuggacaccccgcggcccaacgacggcuccaucgccgggcccugcgagagcaacggcgacgagggcuccgggggcaucaagggcggguucgugcaccagcgcauggccagcaagaucgggcggugguacucccgcaccaugagcaagacgaagcggaugggcaugggccucuacgugaaguacgacggggaccccuggaccgacuccgaggcgcuggcccugagcggcgucaugguguccauggaggagccggggugguacagcuucggcuucgagaucaaggacaagaagugcgacgugcccugcaucgggaucgagaugguccacgacggcggcaagaccaccuggcacuccgccgccacggccaucuacugccucauggggagcggccagcugcugugggacaccgugaccggggugaacaugacccucuga

SEQ ID NO: 94227 - RNA, 1401 nt, Artificial Sequence; identical to SEQ ID NO: 94226
  derived and/or modified CDS sequence (opt1) from neuraminidase__InfluenzaB__AHL94321

SEQ ID NO: 94228 - RNA, 1401 nt, Artificial Sequence
  derived and/or modified CDS sequence (opt1) from neuraminidase__InfluenzaB__AHL94332
augcugcccagcaccauccagacccucacgcuguuccugaccuccggcggggugcuccugagccuguacgucuccgccagccucuccuaccugcuguacagcgacauccuccugaaguucucccgcaccgagaucaccgccccgaucaugccccuggacugcgcgaacgccagcaacgugcaggccgugaaccgguccgccacgaagggcgucacgccccuccugcccgagccggaguggaccuacccccgccugagcugccccggguccaccuuccagaaggcccuccugaucagcccccaccgguucggcgagaccaaggggaacuccgcgccgcugaucauccgcgagcccuucaucgccugcggccccaaggagugcaagcacuucgcccucacccacuacgccgcgcagcccggcggguacuacaacggcacccgggaggaccgcaacaagcugcggcaccugaucagcgugaagcucgggaagaucccgaccguggagaacuccaucuuccacauggccgccuggagcggcuccgccugccacgacgggcgcgaguggacguacaucggcgucgacggccccgacagcaacgcccugcugaagaucaaguacggggaggcguacaccgacaccuaccacuccuacgccaagaacauccuccggacccaggagagcgccugcaacugcaucggcggggacugcuaccugaugaucacggacggccccgccagcggcaucuccgagugccgcuuccugaagauccgggaggggcgcaucaucaaggagaucuuccccaccggccgggugaagcacaccgaggagugcacgugcggguucgccagcaacaagaccaucgagugcgcgugccgcgacaacuccuacaccgccaagcggccguucgugaagcucaacgucgagaccgacaccgccgagauccgccugaugugcacggagaccuaccuggacacgccccggcccaacgacggcagcaucaccgggcccugcgaguccaacggcgacgagggcagcgggggcaucaagggcggguucgugcaccagcgcauggccuccaagaucgggcggugguacagccgcaccauguccaagaccaagcggaugggcaugggccucuacgugaaguacgacggggacccguggaccgacagcgaggcccuggcgcuguccggcgucauggugagcauggaggagcccgggugguacuccuucggcuucgagaucaaggacaagaagugcgacgugcccugcaucgggaucgagaugguccacgacggcggcaagaccacguggcacagcgccgccaccgccaucuacugccucaugggguccggccagcugcugugggacaccgugaccggggugaacaugacgcucuga

SEQ ID NO: 94229 - RNA, 1401 nt, Artificial Sequence; identical to SEQ ID NO: 92841
  derived and/or modified CDS sequence (opt1) from neuraminidase__InfluenzaB__AHL94343

SEQ ID NO: 94230 - RNA, 1401 nt, Artificial Sequence
  derived and/or modified CDS sequence (opt1) from neuraminidase__InfluenzaB__AHL94354
augcugcccagcaccauccagacccucacgcuguuccugaccuccggcggggugcuccugagccuguacgucuccgccagccucuccuaccugcuguacagcgacauccuccugaaguucuccccgaccgagaucaccgcccccacgaugccccuggacugcgcgaacgccagcaacgugcaggccgugaaccgcuccgccaccaagggcgucacccuccugcugcccgagccggaguggaccuacccccggcucagcugccccggguccacguuccagaaggcccugcugaucagcccccaccgcuucggcgagaccaaggggaacuccgcgccgcucaucauccgggagcccuucaucgccugcggccccaacgagugcaagcacuucgcccugacccacuacgccgcgcagcccggcggguacuacaacggcacccgcggggaccggaacaagcugcgccaccucaucagcgugaagcugggcaagaucccgacgguggagaacuccaucuuccacauggccgccuggagcggguccgccugccacgacggcaaggaguggaccuacaucggcgucgacgggcccgacaacaacgcccugcucaaggugaaguacggcgaggcguacaccgacaccuaccacagcuacgccaacaagauccugcggacgcaggaguccgccugcaacugcaucgggggcaacugcuaccugaugaucaccgacggcagcgccagcgggguguccgagugccgcuuccucaagauccgggagggccgcaucaucaaggagaucuuccccaccgggcgggucaagcacaccgaggagugcacgugcggcuucgccagcaacaagaccaucgagugcgcgugccgcgacaaccgguacaccgccaagcgccccuucgugaagcugaacguggagaccgacacggccgagauccggcugaugugcaccgacaccuaccucgacaccccgcgccccaacgacggguccaucacgggccccugcgagagcgacggcgacaagggguccggcgggaucaagggcggguucguccaccagcggaugaaguccaagaucggccgcugguacagccggaccaugagcaagaccgagcgcaugggcauggggcuguacgugaaguacgacggcgaccccugggccgacuccgacgcccuggcguucagcggggugauggucuccaugaaggagccgggcugguacagcuucggguucgagaucaaggacaagaagugcgacgugcccugcaucggcaucgagauggugcacgacggcgggaaggagaccuggcacuccgccgccacggccaucuacugccucaugggcagcgggcagcugcugugggacaccgucaccggcguggacauggcccucuga

SEQ ID NO: 94231 - RNA, 1401 nt, Artificial Sequence; identical to SEQ ID NO: 94230
  derived and/or modified CDS sequence (opt1) from neuraminidase__InfluenzaB__AHL94365

SEQ ID NO: 94232 - RNA, 1401 nt, Artificial Sequence
  derived and/or modified CDS sequence (opt1) from neuraminidase__InfluenzaB__AHL94387
augcugcccagcaccauccagacccucacgcuguuccugaccuccggcggggugcuccugagccuguacgucuccgccagccucuccuaccugcuguacagcgacauccuccugaaguucuccccgaccgagaucaccgcccccacgaugccccuggacugcgcgaacgccagcaccgugcaggccgugaaccgcuccgccaccaagggcgucacccuccugcugcccgagccggaguggacguacccccggcucagcugccccggguccaccuuccagaaggcccugcugaucagcccccaccgcuucggcgagaccaaggggaacuccgcgccgcucaucauccgggagcccuucaucgccugcggccccaacgagugcaagcacuucgcccugacccacuacgccgcgcagcccggcggguacuacaacggcacgcgcggggaccggaacaagcugcgccaccucaucagcgugaagcugggcaagaucccgaccguggagaacuccaucuuccacauggccgccuggagcggguccgccugccacgacggcaaggaguggaccuaccugggcgucgacgggcccgacaacaacgcccuccugaaggugaaguacggcgaggcguacaccgacacguaccacagcuacgccaacaagauccugcggacccaggaguccgccugcaacugcaucgggggcaacugcuaccucaugaucaccgacggcagcgccagcgggguguccgagugccgcuuccugaagauccgggagggccgcaucaucaaggagaucuuccccaccgggcgggucaagcacacggaggagugcacgugcggcuucgccagcaacaagaccaucgagugcgcgugccgcgacaaccgguacaccgccaagcgccccuucgugaagcugaacguggagaccgacaccgccgagauccggcucaugugcaccgacaccuaccuggacacgccgcgccccaacgacggguccaucaccggccccugcgagagcgacggcgacaagggguccggcgggaucaagggcggguucguccaccagcggaugaaguccaagaucggccgcugguacagccggaccaugagcaagaccgagcgcaugggcauggggcuguacgugaaguacgacggcgaccccugggccgacuccgacgcccucgcguucagcggggugauggucuccaugaaggagccgggcugguacagcuucggguucgagaucaaggacaagaagugcgacgugcccugcaucggcaucgagauggugcacgacggcgggaaggagaucuggcacuccgccgccacggccaucuacugccugaugggcagcgggcagcugcucugggacaccgucaccggcguggacauggcccuguga

SEQ ID NO: 94233 - RNA, 1404 nt, Artificial Sequence
  derived and/or modified CDS sequence (opt1) from neuraminidase__InfluenzaB__AHL94398
augcugcccagcaccauccagacccucacgcuguuccugaccuccggcggggugcuccugagccuguacgucuccgccagccucuccuaccugcuguacagcgacauccuccugaaguucuccccgaccgagaucaccgcccccacgaugccccuggacugcgcgaacgccagcaacgugcaggccgugaaccgcuccgccaccaagggcgucacccuccugcugcuccccgagccggaguggaccuacccccggcugagcugccccggguccacguuccagaaggcccugcucaucagcccccaccgcuucggcgagaccaaggggaacuccgcgccgcugaucauccgggagcccuucaucgccugcggccccaacgagugcaagcacuucgcccugacccacuacgccgcgcagcccggcggguacuacaacggcacccgcggggaccggaacaagcuccgccaccugaucagcgugaagcugggcaagaucccgacgguggagaacuccaucuuccacauggccgccuggagcggguccgccugccacgacggcaaggaguggaccuacaucggcgucgacgggcccgacaacaacgcccuccugaaggugaaguacggcgaggcguacaccgacaccuaccacagcuacgccaacaagauccugcggacgcaggaguccgccugcaacugcaucgggggcaacugcuaccucaugaucaccgacggcagcgccagcgggguguccgagugccgcuuccugaagauccgggagggccgcaucaucaaggagaucuuccccaccgggcgggucaagcacaccgaggagugcacgugcggcuucgccagcaacaagaccaucgagugcgcgugccgcgacaaccgguacaccgccaagcgccccuucgugaagcugaacguggagaccgacacggccgagauccggcucaugugcaccgacaccuaccuggacaccccgcgccccaacgacggguccaucacgggccccugcgagagcgacggcgacaagggguccggcgggaucaagggcggguucguccaccagcggaugaaguccaagaucggccgcugguacagccggaccaugagcaagaccgagcgcaugggcauggggcuguacgugaaguacgacggcgaccccugggccgacuccgacgcccucgcguucagcggggugauggucuccaugaaggagccgggcugguacagcuucggguucgagaucaaggacaagaagugcgacgugcccugcaucggcaucgagauggugcacgacggcgggaaggagaccuggcacuccgccgccacggccaucuacugccugaugggcagcgggcagcugcucugggacaccgucaccggcguggacauggcccuguga

SEQ ID NO: 94234 - RNA, 1401 nt, Artificial Sequence; identical to SEQ ID NO: 94230
  derived and/or modified CDS sequence (opt1) from neuraminidase__InfluenzaB__AHL94409

SEQ ID NO: 94235 - RNA, 1401 nt, Artificial Sequence
  derived and/or modified CDS sequence (opt1) from neuraminidase__InfluenzaB__AHL94431
augcugcccagcaccauccagacccucacgcuguuccugaccuccggcggggugcuccugagccuguacgucuccgccagccucuccuaccugcuguacagcgacauccuccugaaguucucccagaccgagaucaccgccccgaucaugccccuggacugcgcgaacgccagcaacgugcaggccgugaaccacuccgccgccaagggcgucacgcucauccugcccgagcccgaguggaccuacccgcgccugagcugccccggguccaccuuccagaaggcgcuccugaucagcccccaccgguucggcgagaucaaggggaacuccgcgccccugaucauccgcgagccguucaucgccugcggccccaccgagugcaagcacuucgcccucacgcacuacgccgcccagcccggcggguacuacaacggcacccgggaggaccgcaacaagcugcggcaccugaucagcgugaagcucgggaagauccccaccguggagaacuccaucuuccacauggccgccuggagcggcuccgccugccacgacgggaaggaguggaccuacaucggcgucgacggcccggacagcaacgcgcugcugaagaucaaguacggggaggccuacacggacaccuaccacuccuacgccaagaacauccuccgcacccaggagagcgccugcaacugcaucggcggggacugcuaccugaugaucaccgacggccccgccagcggcguguccgagugccgguuccugaagauccgcgaggggcggaucaucaaggagaucuuccccacgggccgcgugaagcacaccgaggagugcacgugcggguucgcgagcaacaagaccaucgagugcgccugccgggacaaccgcuacaccgccaagcggcccuucgucaagcucaacguggagaccgacaccgccgagauccgccugaugugcaccgagacguaccuggacaccccgcggcccaacgacggcuccaucaccgggcccugcgagagcgacggcgacaagggcuccgggggcaucaagggcggguucgugcaccagcgcauggccagcaagaucgggcggugguacucccgcaccaugagcaagacgaagcggaugggcaugggccucuacgucaaguacgacggggaccccuggaccgacuccgaggcgcuggcccugagcggcgugaugaucuccauggaggagccggggugguacagcuucggcuucgagaucaaggacaagaagugcgacgugcccugcaucgggaucgagaugguccacgacggcggcaagaccaccuggcacuccgccgccacggccaucuacugccucauggggagcggccagcugcugugggacaccgugaccgggguggacauggcgcucuga

SEQ ID NO: 94236 - RNA, 1401 nt, Artificial Sequence
  derived and/or modified CDS sequence (opt1) from neuraminidase__InfluenzaB__AHL94442
augcugcccagcaccauccagacccucacgcuguuccugaccuccggcggggugcuccugagccuguacauguccgccagccucuccuaccugcuguacagcgacauccuccugaaguucucccgcaccgagaucaccgccccgaucaugccccuggacugcgcgaacgccagcaacguccaggccgugaaccgguccgccacgaagggcgugacgccccuccugcccgagccggaguggaccuacccccgccugagcugccccggguccaccuuccagaaggcccuccugaucagcccccaccgguucggcgagaccaaggggaacuccgcgccgcugaucauccgcgagcccuucaucgccugcggccccaaggagugcaagcacuucgcccucacccacuacgccgcgcagcccggcggguacuacaacggcacccgggaggaccgcaacaagcugcggcaccugaucagcgucaagcucgggaagaucccgaccguggagaacuccaucuuccacauggccgccuggagcggcuccgccugccacgacgggcgcgaguggacguacaucggcguggacggccccgacagcaacgcccugcugaagaucaaguacggggaggcguacaccgacaccuaccacuccuacgccaagaacauccuccggacccaggagagcgccugcaacugcaucggcggggacugcuaccugaugaucacggacggcagcgccuccggcaucagcgagugccgcuuccugaagauccgggaggggcgcaucaucaaggagaucuuccccaccggccgggucaagcacaccgaggagugcacgugcggguucgccuccaacaagaccaucgagugcgcgugccgcgacaacagcuacaccgccaagcggcccuucgugaagcucaacguggagaccgacaccgccgagauccgccugaugugcacggagaccuaccuggacaccccgcggcccaacgacggcuccaucgccgggcccugcgagagcaacggcgacgagggcuccgggggcaucaagggcggguucguccaccagcgcauggccagcaagaucgggcggugguacucccgcaccaugagcaagacgaagcggaugggcaugggccucuacgugaaguacgacggggaccccuggaccgacuccgaggcgcuggcccugagcggcgugauggucuccauggaggagccggggugguacagcuucggcuucgagaucaaggacaagaagugcgacgugcccugcaucgggaucgagauggugcacgacggcggcaagaccaccuggcacuccgccgccacggccaucuacugccucauggggagcggccagcugcugugggacaccgucaccggggugaacaugacccucuga

SEQ ID NO: 94237 - RNA, 1401 nt, Artificial Sequence; identical to SEQ ID NO: 94226
  derived and/or modified CDS sequence (opt1) from neuraminidase__InfluenzaB__AHL94464

SEQ ID NO: 94238 - RNA, 1401 nt, Artificial Sequence; identical to SEQ ID NO: 92841
  derived and/or modified CDS sequence (opt1) from neuraminidase__InfluenzaB__AHL94475

SEQ ID NO: 94239 - RNA, 1401 nt, Artificial Sequence; identical to SEQ ID NO: 94230
  derived and/or modified CDS sequence (opt1) from neuraminidase__InfluenzaB__AHL94486

SEQ ID NO: 94240 - RNA, 1401 nt, Artificial Sequence; identical to SEQ ID NO: 92841
  derived and/or modified CDS sequence (opt1) from neuraminidase__InfluenzaB__AHL94497

SEQ ID NO: 94241 - RNA, 1401 nt, Artificial Sequence; identical to SEQ ID NO: 94226
  derived and/or modified CDS sequence (opt1) from neuraminidase__InfluenzaB__AHL94508

SEQ ID NO: 94242 - RNA, 1401 nt, Artificial Sequence
  derived and/or modified CDS sequence (opt1) from neuraminidase__InfluenzaB__AHL94519
augcugcccagcaccauccagacccucacgcuguuccugaccuccggcggggugcuccugagccuguacgucuccgccagccucuccuaccugcuguacagcgacauccuccugaaguucuccccgaccgagaucaccgcccccacgaugccccuggacugcgcgaacgccagcaacgugcaggccgugaaccgcuccgccaccaagggcgucacccuccugcugcccgagccggaguggaccuacccccggcucagcugccccggguccacguuccagaaggcccugcugaucagcccccaccgcuucggcgagaccaaggggaacuccgcgccgcucaucauccgggagcccuucaucgccugcggccccaacgagugcaagcacuucgcccugacccacuacgccgcgcagcccggcggguacuacaacggcacccgcggggaccggaacaagcugcgccaccucaucagcgugaagcugggcaagaucccgacgguggagaacuccaucuuccacauggccgccuggagcggguccgccugccacgacggcaaggaguggaccuacaucggcgucgacgggcccgacaacaacgcccugcucaaggugaaguacggcgaggcguacaccgacaccuaccacagcuacgccaacaagauccugcggacgcaggaguccgccugcaacugcaucgggggcaacugcuaccugaugaucaccgacggcagcgccagcgggguguccgagugccgcuuccucaagauccgggagggccgcaucaucaaggagaucuuccccaccgggcgggucaagcacaccgaggagugcacgugcggcuucgccagcaacaagaccaucgagugcgcgugccgcgacaacuccuacaccgccaagcggcccuucgugaagcugaacguggagaccgacacggccgagauccgccugaugugcaccgacaccuaccucgacaccccgcggcccaacgacgggagcaucacgggccccugcgaguccgacggcgacaaggggagcggcgggaucaagggcggguucguccaccagcgcauggaguccaagaucggccggugguacagccgcaccauguccaagaccgagcggaugggcauggggcuguacgugaaguacgacggcgaccccuggaccgacagcgacgcccuggccuucuccggggugauggucagcaugaaggagccgggcugguacuccuucggguucgagaucaaggacaagaagugcgacgugcccugcaucggcaucgagauggugcacgacggcgggaaggagacguggcacagcgcggccaccgccaucuacugccucaugggcuccgggcagcugcugugggacaccgucaccggcguggacauggcccucuga

SEQ ID NO: 94243 - RNA, 1401 nt, Artificial Sequence; identical to SEQ ID NO: 94226
  derived and/or modified CDS sequence (opt1) from neuraminidase__InfluenzaB__AHL94530

SEQ ID NO: 94244 - RNA, 1401 nt, Artificial Sequence; identical to SEQ ID NO: 94230
  derived and/or modified CDS sequence (opt1) from neuraminidase__InfluenzaB__AHL94541

SEQ ID NO: 94245 - RNA, 1401 nt, Artificial Sequence
  derived and/or modified CDS sequence (opt1) from neuraminidase__InfluenzaB__AHL94563
augcugcccagcaccauccagacccucacgcuguuccugacccucggcggggugcugcugucccucuacgucagcgccucccugagcuaccugcucuacuccgacauccugcugaaguucagccgcaccgagaucaccgccccgaucaugccccucgacugcgcgaacgccuccaacgugcaggccgugaaccggagcgccacgaagggcgucacccugcugcuccccgagcccgaguggaccuacccgcgccuguccugccccgggagcaccuuccagaaggcccugcucaucagcccccaccgguucggcgagacgaaggggaacuccgcgccccugaucauccgcgagccguucaucgccugcggccccaaggagugcaagcacuucgcccugacccacuacgccgcgcagcccggcggguacuacaacggcacccgggaggaccgcaacaagcuccggcaccugaucuccgugaagcuggggaagauccccaccguggagaacagcaucuuccacauggccgccugguccggcagcgccugccacgacgggcgcgaguggacguacaucggcgucgacggcccggacuccaacgcccuccugaagaucaaguacggggaggcguacaccgacaccuaccacagcuacgccaagaacauccugcggacccaggaguccgccugcaacugcaucggcggggacugcuaccucaugaucacggacggccccgccagcggcaucagcgagugccgcuuccugaagauccgggaggggcgcaucaucaaggagaucuuccccaccggccgggugaagcacaccgaggagugcacgugcggguucgccuccaacaagaccaucgagugcgcgugccgcgacaacagcuacaccgccaagcggcccuucgugaagcugaacgucgagaccgacaccgccgagauccgccucaugugcacggagaccuaccuggacaccccgcggcccaacgacggcuccaucaccgggcccugcgagagcaacggcgacaagggcuccgggggcaucaagggcggguucgugcaccagcgcauggccagcaagaucgggcggugguacucccgcacgaugagcaagaccaagcggaugggcaugggccuguacgugaaguacgacggggaccccuggaccgacuccgaggcccucgcgcugagcggcgucaugguguccauggaggagccggggugguacagcuucggcuucgagaucaaggacaagaagugcgacgugcccugcaucgggaucgagaugguccacgacggcggcaagaccacguggcacuccgccgccaccgccaucuacugccugauggggagcggccagcuccugugggacaccgugaccggggugaacaugacgcuguga

SEQ ID NO: 94246 - RNA, 1401 nt, Artificial Sequence; identical to SEQ ID NO: 94199
  derived and/or modified CDS sequence (opt1) from neuraminidase__InfluenzaB__AHL94574

SEQ ID NO: 94247 - RNA, 1401 nt, Artificial Sequence
  derived and/or modified CDS sequence (opt1) from neuraminidase__InfluenzaB__AHL94585
augcugcccagcaccauccagacccucacgcuguuccugaccuccggcggggugcuccugagccuguacgucuccgccagccucuccuaccugcuguacagcgacauccuccugaaguucucccagaccgagaucaccgccccgaucaugccccuggacugcgcgaacgccagcaacgugcaggccgugaaccgcuccgccgccaagggcgucacgcuccugcugcccgagcccgaguggaccuacccgcggcucagcugccccggguccaccuuccagaaggcgcugcugaucagcccccaccgcuucggcgagaucaaggggaacuccgcgccccucaucauccgggagccguucaucgccugcggccccaccgagugcaagcacuucgcccugacgcacuacgccgcccagcccggcggguacuacaacggcacccgcgaggaccggaacaagcugcgccaccucaucagcgugaagcuggggaagauccccaccguggagaacuccaucuuccacauggccgccuggagcggcuccgccugccacgacgggaaggaguggaccuacaucggcgucgacggcccggacagcaacgcgcugcucaagaucaaguacggggaggccuacacggacaccuaccacuccuacgccaagaacauccugcggacccaggagagcgccugcaacugcaucggcggggacugcuaccugaugaucaccgacggccccgccagcggcguguccgagugccgcuuccucaagauccgggaggggcgcaucaucaaggagaucuuccccaagggccgggugaagcacacggaggagugcacgugcggguucgcgagcaacaagaccaucgagugcgccugccgcgacaaccgguacaccgccaagcgccccuucgucaagcugaacguggagaccgacaccgccgagauccggcugaugugcaccgagaccuaccucgacacgccgcgccccaacgacggcuccaucaccgggcccugcgagagcgacggcgacaagggcuccgggggcaucaagggcggguucgugcaccagcggauggccagcaagaucgggcgcugguacucccggaccaugagcaagaccaagcgcaugggcaugggccuguacgucaaguacgacggggaccccuggacggacuccgaggcgcuggcccucagcggcgugaugguguccauggaggagccggggugguacagcuucggcuucgagaucaaggacaagaagugcgacguccccugcaucgggaucgagauggugcacgacggcggcaagaccaccuggcacuccgccgccaccgccaucuacugccugauggggagcggccagcugcucugggacacggugaccggggucgacauggcgcuguga

SEQ ID NO: 94248 - RNA, 1401 nt, Artificial Sequence; identical to SEQ ID NO: 94199
  derived and/or modified CDS sequence (opt1) from neuraminidase__InfluenzaB__AHL94596

SEQ ID NO: 94249 - RNA, 1401 nt, Artificial Sequence
  derived and/or modified CDS sequence (opt1) from neuraminidase__InfluenzaB__AHL94607
augcugcccagcaccauccagacccucacgcuguuccugaccuccggcggggugcuccugagccuguacgucuccgccagccucuccuaccugcuguacagcgacauccuccugaaguucuccccgaccgagaucaccgcccccacgaugccccuggacugcgcgaacgccagcaacgugcaggccgugaaccgcuccgccaccaagggcgucacccuccugcugcccgagccggaguggaccuacccccggcucagcugccccggguccacguuccagaaggcccugcugaucagcccccaccgcuucggcgagaccaaggggaacuccgcgccgcucaucauccgggagcccuucaucgccugcggccccaacgagugcaagcacuucgcccugacccacuacgccgcgcagcccggcggguacuacaacggcacccgcggggaccggaacaagcugcgccaccucaucagcgugaagcugggcaagaucccgacgguggagaacuccaucuuccacauggccgccuggagcggguccgccugccacgacggcaaggaguggaccuacaucggcgucgacgggcccgacaacaacgcccugcucaaggugaaguacggcgaggcguacaccgacaccuaccacagcuacgccaacaagauccugcggacgcaggaguccgccugcaacugcaucgggggcaacugcuaccugaugaucaccgacggcagcgccagcgggguguccgagugccgcuuccucaagauccgggagggccgcaucaucaaggagaucuuccccaccgggcgggucaagcacaccgaggagugcacgugcggcuucgccagcaacaagaccaucgagugcgcgugccgcgacaaccgguacaccgccaagcgccccuucgugaagcugaacguggagaccgacacggccgagauccggcugaugugcaccgacaccuaccucgacaccccgcgccccaacgacggguccaucacgggccccugcgagagcgacggcgacaagggguccggcgggaucaagggcggguucguccaccagcggcucaagagcaagaucggccgcugguacucccggaccaugagcaagaccgagcgcaugggcauggggcuguacgugaaguacgacggcgaccccugggccgacuccgacgcccugaccuucagcggggugauggucuccaugaaggagccgggcugguacagcuucggguucgagaucaaggacaagaagugcgacgugcccugcaucggcaucgagauggugcacgacggcgggaaggagacguggcacuccgcggccaccgccaucuacugccugaugggcagcgggcagcugcucugggacaccgucaccggcguggacauggcccuguga

SEQ ID NO: 94250 - RNA, 1401 nt, Artificial Sequence; identical to SEQ ID NO: 94230
  derived and/or modified CDS sequence (opt1) from neuraminidase__InfluenzaB__AHL94618

SEQ ID NO: 94251 - RNA, 1401 nt, Artificial Sequence; identical to SEQ ID NO: 94226
  derived and/or modified CDS sequence (opt1) from neuraminidase__InfluenzaB__AHL94628

SEQ ID NO: 94252 - RNA, 1401 nt, Artificial Sequence; identical to SEQ ID NO: 94230
  derived and/or modified CDS sequence (opt1) from neuraminidase__InfluenzaB__AHL94639

SEQ ID NO: 94253 - RNA, 1401 nt, Artificial Sequence
  derived and/or modified CDS sequence (opt1) from neuraminidase__InfluenzaB__AHL94650
augcugcccagcaccauccagacccucacgcuguuccugaccuccggcggggugcuccugagccuguacgucuccgccagccucuccuaccugcuguacagcgacauccuccugaaguucuccccgaccgagaucaccgcccccacgaugccccuggacugcgcgaacgccagcaacgugcaggccgugaaccgcuccgccaccaagggcgucacccuccugcugcccgagccggaguggaccuacccccggcucagcugccccggguccacguuccagaaggcccugcugaucagcccccaccgcuucggcgagaccaaggggaacuccgcgccgcucaucauccgggagcccuucaucgccugcggccccaacgagugcaagcacuucgcccugacccacuacgccgcgcagcccggcggguacuacaacggcacccgcggggaccggaacaagcugcgccaccucaucagcgugaagcugggcaagaucccgacgguggagaacuccaucuuccacauggccgccuggagcggguccgccugccacgacggcaaggaguggaccuacaucggcgucgacgggcccgacaacaacgcccugcucaaggugaaguacggcgaggcguacaccgacaccuaccacagcuacgccaacaagauccugcggacgcaggaguccgccugcaacugcaucgggggcaacugcuaccugaugaucaccgacggcagcgccagcgggguguccgagugccgcuuccucaagauccgggagggccgcaucauccgggagaucuuccccaccgggcgcgucaagcacaccgaggagugcacgugcggcuucgccagcaacaagaccaucgagugcgcgugccgggacaaccgcuacaccgccaagcggcccuucgugaagcugaacguggagaccgacacggccgagauccgccugaugugcaccgacaccuaccucgacaccccgcggcccaacgacggguccaucacgggccccugcgagagcgacggcgacaagggguccggcgggaucaagggcggguucguccaccagcgcaugaaguccaagaucggccggugguacagccgcaccaugagcaagaccgagcggaugggcauggggcuguacgugaaguacgacggcgaccccugggccgacuccgacgcccuggcguucagcggggugauggucuccaugaaggagccgggcugguacagcuucggguucgagaucaaggacaagaagugcgacgugcccugcaucggcaucgagauggugcacgacggcgggaaggagaccuggcacuccgccgccacggccaucuacugccucaugggcagcgggcagcugcugugggacaccgucaccggcguggacauggcccucuga

SEQ ID NO: 94254 - RNA, 1401 nt, Artificial Sequence
  derived and/or modified CDS sequence (opt1) from neuraminidase__InfluenzaB__AHL94661
augcugcccagcaccauccagacccucacgcuguuccugaccuccggcggggugcuccugagccuguacgucuccgccagccucuccuaccugcuguacagcgacauccuccugaaguucccguccaccgagaucaccgcccccacgaugccccuggacugcgcgaacgccagcaacgugcaggccgugaaccgcuccgccaccaagggcgucacccuccugcugcccgagccggaguggaccuacccccggcucagcugccccggguccacguuccagaaggcccugcugaucagcccccaccgcuucggcgagaccaaggggaacuccgcgccgcucaucauccgggagcccuucaucgccugcggccccaaggagugcaagcacuucgcccugacccacuacgccgcgcagcccggcggguacuacaacggcacccgcggggaccggaacaagcugcgccaccucaucagcgugaagcugggcaagaucccgacgguggagaacuccaucuuccacauggccgccuggagcggguccgccugccacgacggcaaggaguggaccuacaucggcgucgacgggcccgacaacaacgcccugcucaagaucaaguacggcgaggcguacaccgacaccuaccacagcuacgccaacaacauccugcggacgcaggaguccgccugcaacugcaucgggggcaacugcuaccugaugaucaccgacggcagcgccagcgggguguccgagugccgcuuccucaagauccgggagggccgcaucaucaaggagaucuuccccaccgggcggauccagcacaccgaggagugcacgugcggcuucgccagcaacaagaccaucgagugcgcgugccgcgacaacuccuacaccgccaagcggcccuucgugaagcugaacgucgagaccgacacggccgagauccgccugaugugcaccaagaccuaccucgacaccccgcggcccgaggacgggagcaucacgggccccugcgaguccaacggcgggaagggcagcgggggcaucaagggcggguucgugcaccagcgcauggccuccaagaucggccggugguacagccgcaccauguccaagaccgagcggaaggggaugggccuguacgugaaguacaacggggaccccugggccgacagcgacgcgcuggucuucuccggcgugauggugagcauggaggagccggggugguacuccuucggcuucgagaucaaggacaagaagugcgacguccccugcaucggcaucgagauggugcacgacgggggcaaggagaccuggcacagcgccgccacggccaucuacugccucaugggguccggccagcugcugugggacaccgugaccggcgucaacaugacccucuga

SEQ ID NO: 94255 - RNA, 1401 nt, Artificial Sequence
  derived and/or modified CDS sequence (opt1) from neuraminidase__InfluenzaB__AHL94672
augcugcccagcaccauccagacccucacgcuguuccugaccuccggcggggugcuccugagccuguacgucuccgccagccucuccuaccugcuguacagcgacauccuccugaaguucucccgcaccgagaucaccgccccgaucaugccccuggacugcgcgaacgccagcaacgugcaggccgugaaccgguccgccacgaagggcgucacgccccuccugcccgagccggaguggaccuacccccgccugagcugccccggguccaccuuccagaaggcccuccugaucagcccccaccgguucggcgagaccaaggggaacuccgcgccgcugaucauccgcgagcccuucaucgccugcggccccaaggagugcaagcacuucgcccucacccacuacgccgcgcagcccggcggguacuacaacggcacccgggaggaccgcaacaagcugcggcaccugaucagcgugaagcucgggaagaucccgaccguggagaacuccaucuuccacauggccgccuggagcggcuccgccugccacgacgggcgcgaguggacguacaucggcgucgacggccccgacagcaacgcccugcugaagaucaaguacggggaggcguacaccgacaccuaccacuccuacgccaagaacauccuccggacccaggagagcgccugcaacugcaucggcggggacugcuaccugaugaucacggacggcagcgccuccggcaucagcgagugccgcuuccugaagauccgggaggggcgcaucaucaaggagaucuuccccaccggccgggugaagcacaccgaggagugcacgugcggguucgccuccaacaagaccaucgagugcgcgugccgcgacaacagcuacaccgccaagcggcccuucgugaagcucaacgucgagaccgacaccgccgagauccgccugaugugcacggagaccuaccuggacaccccgcggcccaacgacggcuccaucagcgggcccugcgaguccaacggcgacgagggcagcgggggcaucaagggcggguucgugcaccagcgcauggccuccaagaucgggcggugguacagccgcaccauguccaagacgaagcggaugggcaugggccucuacgugaaguacgacggggaccccuggaccgacagcgaggcccuggcgcuguccggcgucauggugagcauggaggagccggggugguacuccuucggcuucgagaucaaggacaagaagugcgacgugcccugcaucgggaucgagaugguccacgacggcggcaagaccaccuggcacagcgccgccacggccaucuacugccucaugggguccggccagcugcugugggacaccgugaccggggugaacaugacccucuga

SEQ ID NO: 94256 - RNA, 1401 nt, Artificial Sequence
  derived and/or modified CDS sequence (opt1) from neuraminidase__InfluenzaB__AHL94683
augcugcccagcaccauccagacccucacgcuguuccugaccuccggcggggugcuccugagccuguacgucuccgccagccucuccuaccugcuguacagcgacauccuccugaaguucucccgcaccgagaucaccgccccgaucaugccccuggacugcgcgaacgccagcaacgugcaggccgugaaccgguccgccacgaagggcgucacgccccuccugcccgagccggaguggaccuacccccgccugagcugccccggguccaccuuccagaaggcccuccugaucagcccccaccgguucggcgagaccaaggggaacuccgcgccgcugaucauccgcgagcccuucaucgccugcggccccaaggagugcaagcacuucgcccucacccacuacgccgcgcagcccggcggguacuacaacggcacccgggaggaccgcaacaagcugcggcaccugaucagcgugaagcucgggaagaucccgaccguggagaacuccaucuuccacauggccgccuggagcggcuccgccugccacgacgggcgcgaguggacguacaucggcgucgacggccccgacagcaacgcccugcugaagaucaaguacggggaggcguacaccgacaccuaccacuccuacgccaagaacauccuccggacccaggagagcgccugcaacugcaucggcggggacugcuaccugaugaucacggacggcagcgccuccggcaucagcgagugccgcuuccugaagauccgggaggggcgcaucaucaaggagaucuuccccaccggccgggugaagcacaccgaggagugcacgugcggguucgccuccaacaagaccaucgagugcgcgugccgcgacaacagcuacaccgccaagcggcccuucgugaagcucaacgucgagaccgacaccgccgagauccgccugaugugcacggagaccuaccuggacaccccgcggcccaacgacggcuccaucaccgggcccugcgagagcaacggcggcgagggguccggcgggaucaagggcggguucgugcaccagcgcauggccagcaagaucggccggugguacucccgcacgaugagcaagaccaagcggaugggcauggggcucuacgugaaguacgacggcgaccccuggaccgacuccgaggcccuggcgcugagcggggucaugguguccauggaggagccgggcugguacagcuucggguucgagaucaaggacaagaagugcgacgugcccugcaucggcaucgagaugguccacgacggcgggaagaccacguggcacuccgccgccaccgccaucuacugccucaugggcagcgggcagcugcugugggacaccgugaccggcgugaacaugacgcucuga

SEQ ID NO: 94257 - RNA, 1401 nt, Artificial Sequence
  derived and/or modified CDS sequence (opt1) from neuraminidase__InfluenzaB__AHL94694
augcugcccagcaccauccagacccucacgcuguuccugaccuccggcggggugcuccugagccuguacgucuccgccagccucuccuaccugcuguacagcgacauccuccugaaguucuccccgaccgagaucaccgcccccacgaugccccuggacugcgcgaacgccagcaacgugcaggccgugaaccgcuccgccaccaagggcgucacccuccugcugcccgagccggaguggaccuacccccggcucagcugccccggguccacguuccagaaggcccugcugaucagcccccaccgcuucggcgagaccaaggggaacuccgcgccgcucaucauccgggagcccuucaucgccugcggccccaacgagugcaagcacuucgcccugacccacuacgccgcgcagcccggcggguacuacaacggcacccgcggggaccggaacaagcugcgccaccucaucagcgugaagcugggcaagaucccgacgguggagaacuccaucuuccacauggccgccuggagcggguccgccugccacgacggcaaggaguggaccuacaucggcgucgacgggcccgacaacaacgcccugcucaaggugaaguacggcgaggcguacaccgacaccuaccacagcuacgccaacaagauccugcggacgcaggaguccgccugcaacugcaucgggggcaacugcuaccugaugaucaccgacggcagcgccagcgggguguccgagugccgcuuccucaagauccgggagggccgcaucaucaaggagaucuuccccaccgggcgggucaagcacaccgaggagugcacgugcggcuucgccagcaacaagaccaucgagugcgcgugccgcgacaaccgguacaccgccaagcgccccuucgugaagcugaacguggagaccgacacggccgagauccggcugaugugcaccgacaccuaccucgacaccccgcgccccaacgacggguccaucacgggccccugcgagagcgacggcgacaagggguccggcgggaucaagggcggguucguccaccagcggaugaaguccaagaucggccgcugguacagccggaccaugagcaagaccgagcgcaugggcauggggcuguacgugaaguacgacggcgaccccugggccgacuccgacgcccugaccuucagcggggugauggucuccaugaaggagccgggcugguacagcuucggguucgagaucaaggacaagaagugcgacgugcccugcaucggcaucgagauggugcacgacggcgggaaggagacguggcacuccgcggccaccgccaucuacugccucaugggcagcgggcagcugcugugggacaccgucaccggcguggacauggcccucuga

SEQ ID NO: 94258 - RNA, 1401 nt, Artificial Sequence; identical to SEQ ID NO: 94230
  derived and/or modified CDS sequence (opt1) from neuraminidase__InfluenzaB__AHL94705

SEQ ID NO: 94259 - RNA, 1401 nt, Artificial Sequence; identical to SEQ ID NO: 92841
  derived and/or modified CDS sequence (opt1) from neuraminidase__InfluenzaB__AHL94716

SEQ ID NO: 94260 - RNA, 1401 nt, Artificial Sequence
  derived and/or modified CDS sequence (opt1) from neuraminidase__InfluenzaB__AHL94727
augcugcccagcaccauccagacccucacgcuguuccugaccuccggcggggugcuccugagccuguacgucuccgccagccucuccuaccugcuguacagcgacauccuccugaaguucccguccaccgagaucaccgcccccacgaugccccuggacugcgcgaacaccagcaacgugcaggccgugaaccgcuccgccaccaagggcgucacccuccugcugcccgagccggaguggacguacccccggcucagcugccccggguccaccuuccagaaggcccugcugaucagcccccaccgcuucggcgagaccaaggggaacuccgccccgcucaucauccgggagcccuucaucgcgugcggccccaaggagugcaagcacuucgcccugacccacuacgccgcccagcccggcggguacuacaacggcacgcgcggggaccggaacaagcugcgccaccucaucagcgugaagcugggcaagaucccgaccguggagaacuccaucuuccacauggcggccuggagcggguccgccugccacgacggcaaggaguggaccuacaucggcgucgacgggcccgacaacaacgcccugcucaagaucaaguacggcgaggccuacaccgacacguaccacagcuacgcgaacaacauccugcggacccaggaguccgccugcaacugcaucgggggcaacugcuaccugaugaucaccgacggcagcgccagcgggguguccgagugccgcuuccucaagauccgggagggccgcaucaucaaggagaucuuccccaccgggcggauccagcacacggaggagugcacgugcggcuucgccagcaacaagaccaucgagugcgccugccgcgacaacuccuacaccgcgaagcggcccuucgugaagcugaacgucgagaccgacaccgccgagauccgccugaugugcaccaagaccuaccucgacacgccgcggcccgaggacgggagcaucaccggccccugcgaguccaacggcgggaagggcagcgggggcaucaagggcggguucgugcaccagcgcauggccuccaagaucggccggugguacagccgcaccauguccaagaccgagcggaaggggaugggccuguacgugaaguacaacggggaccccugggccgacagcgacgcccuggucuucuccggcgugauggugagcauggaggagccggggugguacuccuucggcuucgagaucaaggacaagaagugcgacguccccugcaucggcaucgagauggugcacgacgggggcaaggagacguggcacagcgcggccaccgccaucuacugccucaugggguccggccagcugcugugggacaccgugaccggcgucaacaugacgcucuga

SEQ ID NO: 94261 - RNA, 1401 nt, Artificial Sequence; identical to SEQ ID NO: 92841
  derived and/or modified CDS sequence (opt1) from neuraminidase__InfluenzaB__AHL94738

SEQ ID NO: 94262 - RNA, 1401 nt, Artificial Sequence
  derived and/or modified CDS sequence (opt1) from neuraminidase__InfluenzaB__AHL94749
augcugcccagcaccauccagacccucacgcuguuccugaccuccggcggggugcuccugagccuguacgucuccgccagccucuccuaccugcuguacagcgacauccuccugaaguucuccccgaccgagaucaccgcccccacgaugccccuggacugcgcgaacgccagcaacgugcaggccgugaaccgcuccgccaccaagggcgucacccuccugcugcccgagccggaguggaccuacccccggcucagcugccccggguccacguuccagaaggcccugcugaucagcccccaccgcuucggcgagaccaaggggaacuccgcgccgcucaucauccgggagcccuucaucgccugcggccccaacgagugcaagcacuucgcccugacccacuacgccgcgcagcccggcggguacuacaacggcacccgcggggaccggaacaagcugcgccaccucaucagcgugaagcugggcaagaucccgacgguggagaacuccaucuuccacauggccgccuggagcggguccgccugccacgacggcaaggaguggaccuacaucggcgucgacgggcccgacaacaacgcccugcucaaggugaaguacggcgaggcguacaccgacaccuaccacagcuacgccaacaagauccugcggacgcaggaguccgccugcaacugcaucgggggcaacugcuaccugaugaucaccgacggcagcgccagcgggguguccgagugccgcuuccucaagauccgggagggccgcaucaucaaggagaucuuccccaccgggcgggucaagcacaccgaggagugcacgugcggcuucgccagcaacaagaccaucgagugcgcgugccgcgacaaccgguacaccgccaagcgccccuucgugaagcugaacguggagaccgacacggccgagauccggcugaugugcaccgacaccuaccucgacaccccgcgccccaacgacggguccaucacgggccccugcgagagcgacggcgacaagggguccggcgggaucaagggcggguucguccaccagcggaugaaguccaagaucggccgcugguacagccggaccaugagcaagaccgagcgcaugggcauggggcuguacgugaaguacgacggcgaccccugggccgacuccgacgcccuggcguucagcggggugauggucuccaugaaggagccgggcugguacagcuucggguucgagaucaaggacaagaagugcgacgugcccugcaucggcguggagaugguccacgacggcgggaaggagaccuggcacuccgccgccacggccaucuacugccucaugggcagcgggcagcugcugugggacaccgugaccggcguggacauggcccucuga

SEQ ID NO: 94263 - RNA, 1401 nt, Artificial Sequence
  derived and/or modified CDS sequence (opt1) from neuraminidase__InfluenzaB__AHL94760
augcugcccagcaccauccagacccucacgcuguuccugaccuccggcggggugcuccugagccuguacgucuccgccagccucuccuaccugcuguacagcgacauccuccugaaguucucccagaccgagaucaccgccccgaucaugccccuggacugcgcgaacgccagcaacgugcaggccgugaaccacuccgccgccaagggcgucacgcuccugcugcccgagcccgaguggaccuacccgcgccucagcugccccggguccaccuuccagaaggcgcugcugaucagcccccaccgguucggcgagaucaaggggaacuccgcgccccucaucauccgcgagccguucaucgccugcggccccaccgagugcaagcacuucgcccugacgcacuacgccgcccagcccggcggguacuacaacggcacccgggaggaccgcaacaagcugcggcaccucaucagcgugaagcuggggaagauccccaccguggagaacuccaucuuccacauggccgccuggagcggcuccgccugccacgacgggaaggaguggaccuacaucggcgucgacggcccggacagcaacgcgcugcucaagaucaaguacggggaggccuacacggacaccuaccacuccuacgccaagaacauccugcgcacccaggagagcgccugcaacugcaucggcggggacugcuaccugaugaucaccgacggccccgccagcggcguguccgagugccgguuccucaagauccgcgaggggcggaucaucaaggagaucuuccccacgggccgcgugaagcacaccgaggagugcacgugcggguucgcgagcaacaagaccaucgagugcgccugccgggacaaccgcuacaccgccaagcggcccuucgucaagcugaacguggagaccgacaccgccgagauccgccugaugugcaccgagacguaccucgacaccccgcggcccaacgacggcuccaucaccgggcccugcgagagcgacggcgacaagggcuccgggggcaucaagggcggguucgugcaccagcgcauggccagcaagaucgggcggugguacucccgcaccaugagcaagacgaagcggaugggcaugggccuguacgucaaguacgacggggaccccuggaccgacuccgaggcgcuggcccucagcggcgugaugguguccauggaggagccggggugguacagcuucggcuucgagaucaaggacaagaagugcgacauccccugcaucgggaucgagaugguccacgacggcggcaagaccaccuggcacuccgccgccacggccaucuacugccugauggggagcggccagcugcucugggacaccgugaccgggguggacauggcgcuguga

SEQ ID NO: 94264 - RNA, 1401 nt, Artificial Sequence; identical to SEQ ID NO: 94230
  derived and/or modified CDS sequence (opt1) from neuraminidase__InfluenzaB__AHL94770

SEQ ID NO: 94265 - RNA, 1401 nt, Artificial Sequence; identical to SEQ ID NO: 94228
  derived and/or modified CDS sequence (opt1) from neuraminidase__InfluenzaB__AHL94781

SEQ ID NO: 94266 - RNA, 1401 nt, Artificial Sequence; identical to SEQ ID NO: 94226
  derived and/or modified CDS sequence (opt1) from neuraminidase__InfluenzaB__AHL94791

SEQ ID NO: 94267 - RNA, 1401 nt, Artificial Sequence; identical to SEQ ID NO: 94257
  derived and/or modified CDS sequence (opt1) from neuraminidase__InfluenzaB__AHL94801

SEQ ID NO: 94268 - RNA, 1401 nt, Artificial Sequence; identical to SEQ ID NO: 94226
  derived and/or modified CDS sequence (opt1) from neuraminidase__InfluenzaB__AHL94812

SEQ ID NO: 94269 - RNA, 1401 nt, Artificial Sequence; identical to SEQ ID NO: 94226
  derived and/or modified CDS sequence (opt1) from neuraminidase__InfluenzaB__AHL94821

SEQ ID NO: 94270 - RNA, 1401 nt, Artificial Sequence; identical to SEQ ID NO: 94230
  derived and/or modified CDS sequence (opt1) from neuraminidase__InfluenzaB__AHL94831

SEQ ID NO: 94271 - RNA, 1401 nt, Artificial Sequence
  derived and/or modified CDS sequence (opt1) from neuraminidase__InfluenzaB__AHL94840
augcugcccagcaccauccagacccucacgcuguuccugaccuccggcggggugcuccugagccuguacgucuccgccagccucuccuaccugcuguacagcggcauccuccugaaguucucccgcaccgagaucaccgccccgaucaugccccuggacugcgcgaacgccagcaacgugcaggccgugaaccgguccgccacgaagggggucacccuccugcugcccgagcccgaguggaccuacccgcgccucagcugccccggcuccaccuuccagaaggcccugcugaucagcccccaccgguucggggagacgaagggcaacuccgcgccccucaucauccgcgagccguucaucgccugcggccccaaggagugcaagcacuucgcccugacccacuacgccgcgcagcccgggggcuacuacaacgggacccgggaggaccgcaacaagcugcggcaccucaucagcgugaagcugggcaagauccccaccguggagaacuccaucuuccacauggccgccuggagcggguccgccugccacgacggccgcgaguggacguacaucggcgucgacgggccggacagcaacgcccugcucaagaucaaguacggcgaggcguacaccgacaccuaccacuccuacgccaagaacauccugcggacccaggagagcgccugcaacugcaucgggggcgacugcuaccugaugaucacggacggccccgccagcgggaucuccgagugccgcuuccucaagauccgggagggccgcaucaucaaggagaucuuccccaccgggcgggugaagcacaccgaggagugcacgugcggcuucgccagcaacaagaccaucgagugcgcgugccgcgacaacuccuacaccgccaagcggcccuucgugaagcugaacgucgagaccgacaccgccgagauccgccugaugugcacggagaccuaccucgacaccccgcggcccaacgacgggagcaucaccggccccugcgaguccaacggcgacaaggggagcggcgggaucaagggcggguucgugcaccagcgcauggccuccaagaucggccggugguacagccgcacgauguccaagaccaagcggaugggcauggggcuguacgugaaguacgacggcgaccccuggaccgacagcgaggcccuggcgcucuccggggucauggugagcauggaggagccgggcugguacuccuucggguucgagaucaaggacaagaagugcgacgugcccugcaucggcaucgagaugguccacgacggcgggaagaccacguggcacagcgccgccaccgccaucuacugccugaugggcuccgggcagcugcucugggacaccgugaccggcgugaacaugacgcuguga

SEQ ID NO: 94272 - RNA, 1401 nt, Artificial Sequence
  derived and/or modified CDS sequence (opt1) from neuraminidase__InfluenzaB__AHL94851
augcugcccagcaccauccagacccucacgcuguuccugaccuccggcggggugcuccugagccuguacgucuccgccagccucuccuaccugcuguacagcgacauccuccugaaguucucccagaccgagaucaccgccccgaucaugccccuggacugcacgaacgcgagcaacgugcaggccgugaaccgcuccgccgccaagggcgucacccuccugcugcccgagcccgaguggaccuacccgcggcucagcugccccggguccaccuuccagaaggcccugcugaucagcccccaccgcuucggcgagaucaaggggaacuccgcgccccucaucauccgggagccguucaucgccugcggccccacggagugcaagcacuucgcccugacccacuacgccgcgcagcccggcggguacuacaacggcacccgcgaggaccggaacaagcugcgccaccucaucagcgugaagcuggggaagauccccaccguggagaacuccaucuuccacauggccgccuggagcggcuccgccugccacgacgggaaggaguggacguacaucggcgucgacggcccggacagcaacgcccugcucaagaucaaguacggggaggcguacaccgacaccuaccacuccuacgccaagaacauccugcggacccaggagagcgccugcaacugcaucggcggggacugcuaccugaugaucacggacggccccgccagcggcguguccgagugccgcuuccucaagauccgggaggggcgcaucaucaaggagaucuuccccaccggccgggugaagcacaccgaggagugcacgugcggguucgccagcaacaagaccaucgagugcgcgugccgcgacaaccgguacaccgccaagcgccccuucgucaagcugaacguggagaccgacaccgccgagauccggcugaugugcacggagaccuaccucgacaccccgcgccccaacgacggcuccaucaccgggcccugcgagagcgacggcgacaagggcuccgggggcaucaagggcggguucgugcaccagcggaugacgagcaagaucgggcgcugguacucccggaccaugagcaagaccaagcgcaugggcaugggccuguacgucaaguacgacggggaccccuggaccgacuccgaggcccuggcccucagcggcgugaugguguccauggaggagccggggugguacagcuucggcuucgagaucaaggacaagaagugcgacguccccugcaucgggaucgagauggugcacgacggcggcaagacgaccuggcacuccgcggccaccgccaucuacugccugauggggagcggccagcugcucugggacaccgugacgggggucgacauggcccuguga

SEQ ID NO: 94273 - RNA, 1401 nt, Artificial Sequence; identical to SEQ ID NO: 92659
  derived and/or modified CDS sequence (opt1) from neuraminidase__InfluenzaB__AHL94862

SEQ ID NO: 94274 - RNA, 1401 nt, Artificial Sequence; identical to SEQ ID NO: 92841
  derived and/or modified CDS sequence (opt1) from neuraminidase__InfluenzaB__AHL94873

SEQ ID NO: 94275 - RNA, 1401 nt, Artificial Sequence; identical to SEQ ID NO: 94145
  derived and/or modified CDS sequence (opt1) from neuraminidase__InfluenzaB__AHL94884

SEQ ID NO: 94276 - RNA, 1401 nt, Artificial Sequence; identical to SEQ ID NO: 92985
  derived and/or modified CDS sequence (opt1) from neuraminidase__InfluenzaB__AHL94893

SEQ ID NO: 94277 - RNA, 1401 nt, Artificial Sequence; identical to SEQ ID NO: 92985
  derived and/or modified CDS sequence (opt1) from neuraminidase__InfluenzaB__AHL94904

SEQ ID NO: 94278 - RNA, 1401 nt, Artificial Sequence
  derived and/or modified CDS sequence (opt1) from neuraminidase__InfluenzaB__AHL94915
augcugcccagcaccauccagacccucacgcuguuccugaccuccggcggggugcuccugagccuguacgucuccgccagccucuccuaccugcuguacagcgacauccuccugaaguucuccccgaccgagaucaccgcccccacgaugccccuggacugcgcgaacgccagcaacguccagguggugaaccgcuccgccaccaagggcgugacccuccugcugcccgagccggaguggaccuacccccggcucagcugccccggguccacguuccagaaggcccugcugaucagcccccaccgcuucggcgagaccaaggggaacuccgccccgcucaucauccgggagcccuucaucgcgugcggccccaacgagugcaagcacuucgcccugacccacuacgccgcccagcccggcggguacuacaacggcacccgcggggaccggaacaagcugcgccaccucaucagcgugaagcugggcaagaucccgacggucgagaacuccaucuuccacauggcggccuggagcggguccgccugccacgacggcaaggaguggaccuacaucggcguggacgggcccgacaacaacgcccugcucaaggugaaguacggcgaggccuacaccgacaccuaccacagcuacgcgaacaagauccugcggacgcaggaguccgccugcaacugcaucgggggcaacugcuaccugaugaucaccgacggcagcgccagcggggucuccgagugccgcuuccucaagauccgggagggccgcaucaucaaggagaucuuccccaccgggcgggugaagcacaccgaggagugcacgugcggcuucgccagcaacaagaccaucgagugcgccugccgcgacaacuccuacaccgcgaagcggcccuucgugaagcugaacgucgagaccgacacggccgagauccgccugaugugcaccgacaccuaccucgacaccccgcggcccgacgacgggagcaucacgggccccugcgaguccaacggcgacaaggggagcggcgggaucaagggcggguucgugcaccagcgcauggaguccaagaucggccggugguacagccgcaccauguccaagaccgagcggaugggcauggggcuguacgugaaguacgacggcgaccccugggccgacagcgacgcccuggccuucuccggggucauggugagcaugaaggagccgggcugguacuccuucggguucgagaucaaggacaagaagugcgacgugcccugcaucggcaucgagaugguccacgacggcgggaaggagaccuggcacagcgcggccacggccaucuacugccucaugggcuccgggcagcugcugugggacaccgugaccggcguggacauggcccucuga

SEQ ID NO: 94279 - RNA, 1401 nt, Artificial Sequence; identical to SEQ ID NO: 94145
  derived and/or modified CDS sequence (opt1) from neuraminidase__InfluenzaB__AHL94926

SEQ ID NO: 94280 - RNA, 1401 nt, Artificial Sequence
  derived and/or modified CDS sequence (opt1) from neuraminidase__InfluenzaB__AHL94937
augcugcccagcaccauccagacccucacgcuguuccugaccuccggcggggugcuccugagccuguacgucuccgccagccucuccuaccugcuguacagcgacauccuccugaaguucuccccgaccgagaucaccgcccccacgcugccccucgacugcgcgaacgccagcaacgugcaggccgugaaccgcuccgccaccaagggcgucacccugcugcuccccgagccggaguggaccuacccccggcugagcugccccggguccacguuccagaaggcccugcucaucagcccccaccgcuucggcgagaccaaggggaacuccgcgccgcugaucauccgggagcccuucaucgccugcggccccaacgagugcaagcacuucgcccugacccacuacgccgcgcagcccggcggguacuacaacggcacccgcggggaccggaacaagcuccgccaccugaucagcgugaagcugggcaagaucccgacgguggagaacuccaucuuccacauggccgccuggagcggguccgccugccacgacggcaaggaguggaccuacaucggcgucgacgggcccgacaacaacgcccuccugaaggugaaguacggcgaggcguacaccgacaccuaccacagcuacgccaacaagauccugcggacgcaggaguccgccugcaacugcaucgggggcaacugcuaccucaugaucaccgacggcagcgccagcgggguguccgagugccgcuuccugaagauccgggagggccgcaucaucaaggagaucuuccccaccgggcgggucaagcacaccgaggagugcacgugcggcuucgccagcaacaagaccaucgagugcgcgugccgcgacaacuccuacaccgccaagcggcccuucgugaagcugaacguggagaccgacacggccgagauccgccucaugugcaccgacaccuaccuggacaccccgcggcccaacgacgggagcaucacgggccccugcgaguccaacggcgacaaggggagcggcgggaucaagggcggguucguccaccagcgcauggaguccaagaucggccggugguacagccgcaccauguccaagaccgagcggaugggcauggggcuguacgugaaguacgacggcgaccccugggccgacagcgacgcccucgcguucuccggggugauggucagcaugaaggagccgggcugguacuccuucggguucgagaucaaggacaagaagugcgacgugcccugcaucggcaucgagauggugcacgacggcgggaaggagaccuggcacagcgccgccacggccaucuacugccugaugggcuccgggcagcugcucugggacaccgucaccggcguggacauggcccuguga

SEQ ID NO: 94281 - RNA, 1401 nt, Artificial Sequence; identical to SEQ ID NO: 94164
  derived and/or modified CDS sequence (opt1) from neuraminidase__InfluenzaB__AHL94948

SEQ ID NO: 94282 - RNA, 1401 nt, Artificial Sequence; identical to SEQ ID NO: 92980
  derived and/or modified CDS sequence (opt1) from neuraminidase__InfluenzaB__AHL94959

SEQ ID NO: 94283 - RNA, 1401 nt, Artificial Sequence; identical to SEQ ID NO: 92980
  derived and/or modified CDS sequence (opt1) from neuraminidase__InfluenzaB__AHL94969

SEQ ID NO: 94284 - RNA, 1401 nt, Artificial Sequence; identical to SEQ ID NO: 92980
  derived and/or modified CDS sequence (opt1) from neuraminidase__InfluenzaB__AHL94978

SEQ ID NO: 94285 - RNA, 1401 nt, Artificial Sequence
  derived and/or modified CDS sequence (opt1) from neuraminidase__InfluenzaB__AHM00990
augcugcccagcaccauccagacccucacgcuguuccugaccuccggcggggugcuccugagccuguacgucuccgccagccucuccuaccugcuguacagcgacauccuccugaaguucucccagaccgagaucaccgccccgaucaugccccuggacugcacgaacgcgagcaacgugcaggccgugaaccacuccgccgccaagggcgucacccuccugcugcccgagcccgaguggaccuacccgcgccucagcugccccggguccaccuuccagaaggcccugcugaucagcccccaccgguucggcgagaucaaggggaacuccgcgccccucaucauccgcgagccguucaucgccugcggccccacggagugcaagcacuucgcccugacccacuacgccgcgcagcccggcggguacuacaacggcacccgggaggaccgcaacaagcugcggcaccucaucagcgugaagcuggggaagauccccaccguggagaacuccaucuuccacauggccgccuggagcggcuccgccugccacgacgggaaggaguggacguacaucggcgucgacggcccggacagcaacgcccugcucaagaucaaguacggggaggcguacaccgacaccuaccacuccuacgccaagaacauccugcgcacccaggagagcgccugcaacugcaucggcggggacugcuaccugaugaucacggacggccccgccagcggcguguccgagugccgguuccucaagauccgcgaggggcggaucaucaaggagaucuuccccaccggccgcgugaagcacaccgaggagugcacgugcggguucgccagcaacaagaccaucgagugcgcgugccgggacaaccgcuacaccgccaagcggcccuucgucaagcugaacguggagaccgacaccgccgagauccgccugaugugcacggagaccuaccucgacaccccgcggcccaacgacggcuccaucaccgggcccugcgagagcgacggcgacaagggcuccgggggcaucaagggcggguucgugcaccagcgcauggccagcaagaucgggcggugguacucccgcacgaugagcaagaccaagcggaugggcaugggccuguacgucaaguacgacggggaccccuggaccgacuccgaggcccuggcgcucagcggcgugaugguguccauggaggagccggggugguacagcuucggcuucgagaucaaggacaagaagugcgacguccccugcaucgggaucgagauggugcacgacggcggcaagaccacguggcacuccgccgccaccgccaucuacugccugauggggagcggccagcugcucugggacaccgugaccggggucgacauggcccuguga

SEQ ID NO: 94286 - RNA, 1401 nt, Artificial Sequence; identical to SEQ ID NO: 94230
  derived and/or modified CDS sequence (opt1) from neuraminidase__InfluenzaB__AHM01001

SEQ ID NO: 94287 - RNA, 1401 nt, Artificial Sequence
  derived and/or modified CDS sequence (opt1) from neuraminidase__InfluenzaB__AHM01012
augcugcccagcaccauccagacccucacgcuguuccugaccuccggcggggugcuccugagccuguacgucuccgccagccucuccuaccugcuguacagcgacauccuccugaaguucuccccgaccgagaucaccgcccccacgaugccccuggacugcgcgaacgccagcaacgugcaggccgugaaccgcuccgccaccaagggcgucacccuccugcugcccgagccggaguggaccuacccccggcucagcugccccggguccacguuccagaaggcccugcugaucagcccccaccgcuucggcgagaccaaggggaacuccgcgccgcucaucauccgggagcccuucaucgccugcggccccaacgagugcaagcacuucgcccugacccacuacgccgcgcagcccggcggguacuacaacggcacccgcggggaccggaacaagcugcgccaccucaucagcgugaagcugggcaagaucccgacgguggagaacuccaucuuccacauggccgccuggagcggguccgccugccacgacggcaaggaguggaccuacaucggcgucgacgggcccgacaacaacgcccugcucaaggugaaguacggcgaggcguacaccgacaccuaccacagcuacgccaacaagauccugcggacgcaggaguccgccugcaacugcaucgggggcaacugcuaccugaugaucaccgacggcagcgccagcgggguguccgagugccgcuuccucaagauccgggagggccgcaucaucaaggagaucuuccccaccgggcgggucaagcacaccgaggagugcacgugcggcuucgccagcaacaagaccaucgagugcgcgugccgcgacaaccgguacaccgccaagcgccccuucgugaagcugaacguggagaccgacacggccgagauccggcugaugugcaccgacaccuaccucgacaccccgcgccccaacgacggguccaucacgggccccugcgagagcgacggcgacaagggguccggcgggaucaagggcggguucguccaccagcggaugaaguccaagaucggccgcugguacagccggaccaugagcaagaccgagcgcaugggcauggggcuguacgugaaguacgacggcgaccccuggaccgacuccgacgcccuggccuucagcggggugauggucuccaugaaggagccgggcugguacagcuucggguucgagaucaaggacaagaagugcgacgugcccugcaucggcaucgagauggugcacgacggcgggaaggagacguggcacuccgcggccaccgccaucuacugccucaugggcagcgggcagcugcugugggacaccgucaccggcguggacauggcccucuga

SEQ ID NO: 94288 - RNA, 1401 nt, Artificial Sequence; identical to SEQ ID NO: 94230
  derived and/or modified CDS sequence (opt1) from neuraminidase__InfluenzaB__AHM01023

SEQ ID NO: 94289 - RNA, 1401 nt, Artificial Sequence; identical to SEQ ID NO: 94230
  derived and/or modified CDS sequence (opt1) from neuraminidase__InfluenzaB__AHM01034

SEQ ID NO: 94290 - RNA, 1401 nt, Artificial Sequence
  derived and/or modified CDS sequence (opt1) from neuraminidase__InfluenzaB__AHM01045
augcugcccagcaccauccagacccucacgcuguuccugaccuccggcggggugcuccugagccuguacgucuccgccagccucuccuaccugcuguacagcgacauccuccugaaguucuccccgaccgagaucaccgcccccacgaugccccuggacugcgcgaacgccagcaacgugcaggccgugaaccgcuccgccaccaagggcgucacccuccugcugcccgagccgggguggaccuacccccggcucagcugccccggcuccacguuccagaaggcccugcugaucagcccccaccgcuucggggagaccaagggcaacuccgcgccgcucaucauccgggagcccuucaucgccugcggccccaacgagugcaagcacuucgcccugacccacuacgccgcgcagcccgggggcuacuacaacgggacccgcggcgaccggaacaagcugcgccaccucaucagcgugaagcuggggaagaucccgacgguggagaacuccaucuuccacauggccgccuggagcggcuccgccugccacgacggcaaggaguggaccuacaucggggucgacggccccgacaacaacgcccugcucaaggugaaguacggggaggcguacaccgacaccuaccacagcuacgccaacaagauccugcggacgcaggaguccgccugcaacugcaucggcggcaacugcuaccugaugaucaccgacgggagcgccagcggcguguccgagugccgcuuccucaagauccgggaggggcgcaucaucaaggagaucuuccccaccggccgggucaagcacaccgaggagugcacgugcggguucgccagcaacaagaccaucgagugcgcgugccgcgacaaccgguacaccgccaagcgccccuucgugaagcugaacguggagaccgacacggccgagauccggcugaugugcaccgacaccuaccucgacaccccgcgccccaacgacggcuccaucacgggccccugcgagagcgacggggacaagggcuccgggggcaucaagggcggguucguccaccagcggaugaaguccaagaucggccgcugguacagccggaccaugagcaagaccgagcgcauggggaugggccuguacgugaaguacgacggggaccccugggccgacuccgacgcccuggcguucagcggcgugauggucuccaugaaggagccggggugguacagcuucggcuucgagaucaaggacaagaagugcgacgugcccugcaucggcaucgagauggugcacgacgggggcaaggagaccuggcacuccgccgccacggccaucuacugccucauggggagcggccagcugcugugggacaccgucgccggcguggacauggcgcucuga

SEQ ID NO: 94291 - RNA, 1401 nt, Artificial Sequence
  derived and/or modified CDS sequence (opt1) from neuraminidase__InfluenzaB__AHM01056
augcugcccagcaccacccagacgcucacccuguuccugaccuccggcggggugcuccugagccuguacgucuccgccagccucuccuaccugcuguacagcgacauccuccugaaguucuccccgaccgagaucacggcccccaccaugccccuggacugcgcgaacgccagcaacgugcaggccgugaaccgcuccgccaccaagggcgucacccuccugcugcccgagccggaguggacguacccccggcucagcugccccggguccaccuuccagaaggcccugcugaucagcccccaccgcuucggcgagaccaaggggaacuccgcgccgcucaucauccgggagcccuucaucgccugcggccccaacgagugcaagcacuucgcccugacccacuacgccgcgcagcccggcggguacuacaacggcacgcgcggggaccggaacaagcugcgccaccucaucagcgugaagcugggcaagaucccgaccguggagaacuccaucuuccacauggccgccuggagcggguccgccugccacgacggcaaggaguggaccuacaucggcgucgacgggcccgacaacaacgcccugcucaaggugaaguacggcgaggcguacaccgacacguaccacagcuacgccaacaagauccugcggacccaggaguccgccugcaacugcaucgggggcaacugcuaccugaugaucaccgacggcagcgccagcgggguguccgagugccgcuuccucaagauccgggagggccgcaucaucaaggagaucuuccccaccgggcgggucaagcacacggaggagugcacgugcggcuucgccagcaacaagaccaucgagugcgcgugccgcgacaaccgguacaccgccaagcgccccuucgugaagcugaacguggagaccgacaccgccgagauccggcugaugugcaccgacaccuaccucgacacgccgcgccccaacgacggguccaucaccggccccugcgagagcgacggcgacaagggguccggcgggaucaagggcggguucguccaccagcggaugaaguccaagaucggccgcugguacagccggaccaugagcaagaccgagcgcaugggcauggggcuguacgugaaguacgacggcgaccccugggccgacuccgacgcccugguguucagcggggucaugguguccaugaaggagccgggcugguacagcuucggguucgagaucaaggacaagaagugcgacgugcccugcaucggcaucgagaugguccacgacggcgggaaggagacguggcacuccgcggccaccgccaucuacugccucaugggcagcgggcagcugcugugggacaccgugaccggcguggacauggcccucuga

SEQ ID NO: 94292 - RNA, 1401 nt, Artificial Sequence; identical to SEQ ID NO: 94230
  derived and/or modified CDS sequence (opt1) from neuraminidase__InfluenzaB__AHM01067

SEQ ID NO: 94293 - RNA, 1401 nt, Artificial Sequence; identical to SEQ ID NO: 94199
  derived and/or modified CDS sequence (opt1) from neuraminidase__InfluenzaB__AHM01078

SEQ ID NO: 94294 - RNA, 1401 nt, Artificial Sequence
  derived and/or modified CDS sequence (opt1) from neuraminidase__InfluenzaB__AHM01089
augcugcccagcaccauccagacccucacgcuguuccugaccuccggcggggugcuccugagccuguacgucuccgccagccucuccuaccugcuguacagcgacauccuccugaaguucuccccgaccgagaucaccgcccccacgaugccccuggacugcgcgaacgccagcaacgugcaggccgugaaccgcuccgccgccaagggcgucacccuccugcugcccgagccggaguggaccuacccccggcucagcugccccggguccaccuuccagaaggcgcugcugaucagcccccaccgcuucggcgagacgaaggggaacuccgccccgcucaucauccgggagcccuucaucgccugcggccccaacgagugcaagcacuucgcccugacccacuacgcggcccagcccggcggguacuacaacggcacccgcggggaccggaacaagcugcgccaccucaucagcgugaagcugggcaagaucccgaccguggagaacuccaucuuccacauggccgccuggagcggguccgccugccacgacggcaaggaguggacguacaucggcgucgacgggcccgacaacaacgcgcugcucaaggugaaguacggcgaggccuacaccgacaccuaccacagcuacgccaacaagauccugcggacccaggaguccgccugcaacugcaucgggggcaacugcuaccugaugaucacggacggcagcgccagcgggguguccgagugccgcuuccucaagauccgggagggccgcaucaucaaggagaucuuccccaccgggcgggucaagcacaccgaggagugcacgugcggcuucgcgagcaacaagaccaucgagugcgccugccgcgacaaccgguacaccgccaagcgccccuucgugaagcugaacguggagaccgacaccgccgagauccggcugaugugcacggacaccuaccucgacaccccgcgccccaacgacggguccaucaccggccccugcgagagcgacggcgacaagggguccggcgggaucaagggcggguucguccaccagcggaugaaguccaagaucggccgcugguacagccggacgaugagcaagaccgagcgcaugggcauggggcuguacgugaaguacgacggcgaccccugggccgacuccgacgcgcuggccuucagcggggugauggucuccaugaaggagccgggcugguacagcuucggguucgagaucaaggacaagaagugcgacgugcccugcaucggcaucgagauggugcacgacggcgggaaggagaccuggcacuccgccgccaccgccaucuacugccucaugggcagcgggcagcugcugugggacacggucaccggcguggacauggcgcucuga

SEQ ID NO: 94295 - RNA, 1401 nt, Artificial Sequence; identical to SEQ ID NO: 94199
  derived and/or modified CDS sequence (opt1) from neuraminidase__InfluenzaB__AHM01100

SEQ ID NO: 94296 - RNA, 1401 nt, Artificial Sequence; identical to SEQ ID NO: 94230
  derived and/or modified CDS sequence (opt1) from neuraminidase__InfluenzaB__AHM01111

SEQ ID NO: 94297 - RNA, 1401 nt, Artificial Sequence
  derived and/or modified CDS sequence (opt1) from neuraminidase__InfluenzaB__AHM01122
augcugcccagcaccauccagacccucacgcuguuccugaccuccggcggggugcuccugagccuguacgucuccgccagccucuccuaccugcuguacagcgacauccuccugaaguucuccccgaccgagaucaccgcccccacgaugccccuggacugcgcgaacgccagcaacgugcaggccgugaaccgcuccgccaccaagggcgucaagcuccugcugcccgagccggaguggaccuacccccggcucagcugccccggguccaccuuccagaaggcccugcugaucagcccccaccgcuucggcgagacgaaggggaacuccgcgccgcucaucauccgggagcccuucaucgccugcggccccaacgagugcaagcacuucgcccugacccacuacgccgcgcagcccggcggguacuacaacggcacccgcggggaccggaacaagcugcgccaccucaucagcgugaagcugggcaagaucccgaccguggagaacuccaucuuccacauggccgccuggagcggguccgccugccacgacggcaaggaguggacguacaucggcgucgacgggcccgacaacaacgcccugcucaaggugaaguacggcgaggcguacaccgacaccuaccacagcuacgccaacaagauccugcggacccaggaguccgccugcaacugcaucgggggcaacugcuaccugaugaucacggacggcagcgccagcgggguguccgagugccgcuuccucaagauccgggagggccgcaucaucaaggagaucuuccccaccgggcgggucaagcacaccgaggagugcacgugcggcuucgccagcaacaagaccaucgagugcgcgugccgcgacaaccgguacaccgccaagcgccccuucgugaagcugaacguggagaccgacaccgccgagauccggcugaugugcacggacaccuaccucgacaccccgcgccccaacgacggguccaucaccggccccugcgagagcgacggcgacaagggguccggcgggaucaagggcggguucguccaccagcggaugaaguccaagaucggccgcugguacagccggacgaugagcaagaccgagcgcaugggcauggggcuguacgugaaguacgacggcgaccccugggccgacuccgacgcccuggcguucagcggggugauggucuccaugaaggagccgggcugguacagcuucggguucgagaucaaggacaagaagugcgacgugcccugcaucggcaucgagauggugcacgacggcgggaaggagaccuggcacuccgccgccaccgccaucuacugccucaugggcagcgggcagcugcugugggacacggucaccggcguggacauggcccucuga

SEQ ID NO: 94298 - RNA, 1401 nt, Artificial Sequence; identical to SEQ ID NO: 94230
  derived and/or modified CDS sequence (opt1) from neuraminidase__InfluenzaB__AHM01133

SEQ ID NO: 94299 - RNA, 1401 nt, Artificial Sequence
  derived and/or modified CDS sequence (opt1) from neuraminidase__InfluenzaB__AHM01144
augcugcccagcaccauccagacccucacgcuguuccugaccuccggcggggugcuccugagccuguacgucuccgccagccucuccuaccugcuguacagcgacauccuccugaaguucuccccgaccgagaucaccgcccccacgaugccccuggacugcgcgaacgccagcaacgugcaggccgugaaccgcuccgccgccaagggcgucacccuccugcugcccgagccggaguggaccuacccccggcucagcugccccggguccaccuuccagaaggcgcugcugaucagcccccaccgcuucggcgagacgaaggggaacuccgccccgcucaucauccgggagcccuucaucgccugcggccccaacgagugcaagcacuucgcccugacccacuacgcggcccagcccggcggguacuacaacggcacccgcggggaccggaacaagcugcgccaccucaucagcgugaagcugggcaagaucccgaccguggagaacuccaucuuccacauggccgccuggagcggguccgccugccacgacggcaaggaguggacguacaucggcgucgacgggcccgacaacaacgcgcugcucaaggugaaguacggcgaggccuacaccgacaccuaccacagcuacgccaacaagauccugcggacccaggaguccgccugcaacugcaucgggggcaacugcuaccugaugaucacggacggcagcgccagcgggaucuccgagugccgcuuccucaagauccgggagggccgcaucaucaaggagaucuuccccaccgggcgggugaagcacaccgaggagugcacgugcggcuucgcgagcaacaagaccaucgagugcgccugccgcgacaaccgguacaccgccaagcgccccuucgucaagcugaacguggagaccgacaccgccgagauccggcugaugugcacggacaccuaccucgacaccccgcgccccaacgacggguccaucaccggccccugcgagagcgacggcgacaagggguccggcgggaucaagggcggguucgugcaccagcggaugaaguccaagaucggccgcugguacagccggacgaugagcaagaccgagcgcaugggcauggggcuguacgucaaguacgacggcgaccccugggccgacuccgacgcgcuggccuucagcggggugaugguguccaugaaggagccgggcugguacagcuucggguucgagaucaaggacaagaagugcgacguccccugcaucggcaucgagauggugcacgacggcgggaaggagaccuggcacuccgccgccaccgccaucuacugccucaugggcagcgggcagcugcugugggacacggugaccggcgucgacauggcgcucuga

SEQ ID NO: 94300 - RNA, 1401 nt, Artificial Sequence; identical to SEQ ID NO: 94230
  derived and/or modified CDS sequence (opt1) from neuraminidase__InfluenzaB__AHM01166

SEQ ID NO: 94301 - RNA, 1401 nt, Artificial Sequence
  derived and/or modified CDS sequence (opt1) from neuraminidase__InfluenzaB__AHM01188
augcugcccagcaccauccagacccucacgcuguuccugaccuccggcggggugcuccugagccuguacgucuccgccagccucuccuaccugcuguacagcgacauccuccugaaguucuccccgaccgagaucaccgcccccacgaugccccuggacugcgcgaacgccagcaacgugcaggccgugaaccacuccgccaccaagggcgucacccuccugcugcccgagccggaguggaccuacccccgccucagcugccccggguccacguuccagaaggcccugcugaucagcccccaccgguucggcgagaccaaggggaacuccgcgccgcucaucauccgcgagcccuucaucgccugcggccccaacgagugcaagcacuucgcccugacccacuacgccgcgcagcccggcggguacuacaacggcacccgcggggaccggaacaagcugcggcaccucaucagcgugaagcugggcaagaucccgacgguggagaacuccaucuuccacauggccgccuggagcggguccgccugccacgacggcaaggaguggaccuacaucggcgucgacgggcccgacaacaacgcccugcucaaggugaaguacggcgaggcguacaccgacaccuaccacagcuacgccaacaagauccugcgcacgcaggaguccgccugcaacugcaucgggggcaacugcuaccugaugaucaccgacggcagcgccagcgggguguccgagugccgguuccucaagauccgcgagggccggaucaucaaggagaucuuccccaccgggcgcgucaagcacaccgaggagugcacgugcggcuucgccagcaacaagaccaucgagugcgcgugccgggacaaccgcuacaccgccaagcggcccuucgugaagcugaacguggagaccgacacggccgagauccgccugaugugcaccgacaccuaccucgacaccccgcggcccaacgacggguccaucacgggccccugcgagagcgacggcgacaagggguccggcgggaucaagggcggguucguccaccagcgcaugaaguccaagaucggccggugguacagccgcaccaugagcaagaccgagcggaugggcauggggcuguacgugaaguacgacggcgaccccugggccgacuccgacgcccugguguucagcggggucaugguguccaugaaggagccgggcugguacagcuucggguucgagaucaaggacaagaagugcgacgugcccugcaucggcaucgagaugguccacgacggcgggaaggagaccuggcacuccgcggccacggccaucuacugccucaugggcagcgggcagcugcugugggacaccgugaccggcguggacauggcccucuga

SEQ ID NO: 94302 - RNA, 1401 nt, Artificial Sequence; identical to SEQ ID NO: 94294
  derived and/or modified CDS sequence (opt1) from neuraminidase__InfluenzaB__AHM01199

SEQ ID NO: 94303 - RNA, 1401 nt, Artificial Sequence
  derived and/or modified CDS sequence (opt1) from neuraminidase__InfluenzaB__AHM01210
augcugcccagcaccauccagacccucacgcuguuccugaccuccggcggggugcuccugagccuguacgucuccgccagccucuccuaccugcuguacagcgacauccuccugaaguucuccccgaccgagaucaccgcccccacgaugccccuggacugcgcgaacgccagcaacgugcaggccgugaaccgcuccgccaccaagggcgucacccuccugcugcccgagccgggguggaccuacccccggcucagcugccccggcuccacguuccagaaggcccugcugaucagcccccaccgcuucggggaggcgaagggcaacuccgccccgcucaucauccgggagcccuucaucgccugcggccccaacgagugcaagcacuucgcccugacccacuacgcggcccagcccgggggcuacuacaacgggacccgcggcgaccggaacaagcugcgccaccucaucagcgugaagcuggggaagaucccgaccguggagaacuccaucuuccacauggccgccuggagcggcuccgccugccacgacggcaaggaguggacguacaucggggucgacggccccgacaacaacgcgcugcucaaggugaaguacggggaggccuacaccgacaccuaccacagcuacgccaacaagauccugcggacccaggaguccgccugcaacugcaucggcggcaacugcuaccugaugaucacggacgggagcgccagcggcguguccgagugccgcuuccucaagauccgggaggggcgcaucaucaaggagaucuuccccaccggccgggucaagcacaccgaggagugcacgugcggguucgcgagcaacaagaccaucgagugcgccugccgcgacaaccgguacaccgccaagcgccccuucgugaagcugaacguggagaccgacaccgccgagauccggcugaugugcacggacaccuaccucgacaccccgcgccccaacgacggcuccaucaccggccccugcgagagcgacggggacaagggcuccgggggcaucaagggcggguucguccaccagcggaugaaguccaagaucggccgcugguacagccggacgaugagcaagaccgagcgcauggggaugggccuguacgugaaguacgacggggaccccugggccgacuccgacgcgcuggccuucagcggcgugauggucuccaugaaggagccggggugguacagcuucggcuucgagaucaaggacaagaagugcgacgugcccugcaucggcaucgagauggugcacgacgggggcaaggagaccuggcacuccgccgccaccgccaucuacugccucauggggagcggccagcugcugugggacacggucgcgggcguggacauggcccucuga

SEQ ID NO: 94304 - RNA, 1401 nt, Artificial Sequence
  derived and/or modified CDS sequence (opt1) from neuraminidase__InfluenzaB__AHM01221
augcugcccagcaccauccagacccucacgcuguuccugaccuccggcggggugcuccugagccuguacgucuccgccagccucuccuaccugcuguacagcgacauccuccugaaguucuccccgaccgagaucaccgcccccacgaugccccuggacugcgcgaacgccagcaacuuccaggccgugaaccgcuccgccaccaagggcgugaccuuccuccugcccgagccggaguggaccuacccccggcugagcugccccggguccacguuccagaaggcccuccugaucagcccccaccgcuucggcgagaccaaggggaacuccgcgccgcugaucauccgggagcccuucaucgccugcggccccaacgagugcaagcacuucgcccucacccacuacgccgcgcagcccggcggguacuacaacggcacccgcggggaccggaacaagcugcgccaccugaucagcgucaagcucggcaagaucccgacgguggagaacuccaucuuccacauggccgccuggagcggguccgccugccacgacggcaaggaguggaccuacaucggcguggacgggcccgacaacaacgcccugcugaaggucaaguacggcgaggcguacaccgacaccuaccacagcuacgccaacaagauccuccggacgcaggaguccgccugcaacugcaucgggggcaacugcuaccugaugaucaccgacggcagcgccagcgggguguccgagugccgcuuccugaagauccgggagggccgcaucaucaaggagaucuuccccaccgggcgggugaagcacaccgaggagugcacgugcggcuucgccagcaacaagaccaucgagugcgcgugccgcgacaaccgguacaccgccaagcgccccuucgucaagcucaacguggagaccgacacggccgagauccggcugaugugcaccgacaccuaccuggacaccccgcgccccaacgacggguccaucacgggccccugcgagagcgacggcgacaagggguccggcgggaucaagggcggguucgugcaccagcggaugaaguccaagaucggccgcugguacagccggaccaugagcaagaccgagcgcaugggcauggggcucuacgucaaguacgacggcgaccccugggccgacuccgacgcccuggcguucagcggggugaugguguccaugaaggagccgggcugguacagcuucggguucgagaucaaggacaagaagugcgacguccccugcaucggcaucgagauggugcacgacggcgggaaggagaccuggcacuccgccgccacggccaucuacugccugaugggcagcgggcagcuccugugggacaccgugaccggcgucgacauggcccuguga

SEQ ID NO: 94305 - RNA, 1401 nt, Artificial Sequence; identical to SEQ ID NO: 94199
  derived and/or modified CDS sequence (opt1) from neuraminidase__InfluenzaB__AHM01232

SEQ ID NO: 94306 - RNA, 1401 nt, Artificial Sequence; identical to SEQ ID NO: 94230
  derived and/or modified CDS sequence (opt1) from neuraminidase__InfluenzaB__AHM01243

SEQ ID NO: 94307 - RNA, 1401 nt, Artificial Sequence
  derived and/or modified CDS sequence (opt1) from neuraminidase__InfluenzaB__AHM01254
augcugcccagcaccauccagacccucacgcuguuccugaccuccggcggggugcuccugagccuguacgucuccgccagccucuccuaccugcuguacagcgacauccuccugaaguucuccccgaccgagaucaccgcccccacgaugccccuggacugcgcgaacgccagcaacgugcaggccgugaaccgcuccgccaccaagggcgucacccuccugcugcccgagccggaguggaccuacccccggcucagcugccccggguccacguuccagaaggcccugcugaucagcccccaccgcuucggcgagaccaaggggaacuccgcgccgcucaucauccgggagcccuucaucgccugcggccccaacgagugcaagcacuucgcccugacccacuacgccgcgcagcccggcggguacuacaacggcacccgcggggaccggaacaagcugcgccaccucaucagcgugaagcugggcaagaucccgacgguggagaacuccaucuuccacauggccgccuggagcggguccgccugccacgacggcaaggaguggaccuacaucggcgucgacgggcccgacaacaacgcccugcucaaggugaaguacggcgaggcguacaccgacaccuaccacagcuacgccaacaagauccugcggacgcaggaguccgccugcaacugcaucgggggcaacugcuaccugaugaucaccgacggcagcgccagcgggguguccgagugccgcuuccucaagauccgggagggccgcaucaucaaggagaucuuccccaccgggcgggucaagcacaccgaggagugcacgugcggcuucgccagcaacaagaccaucgagugcgcgugccgcgacaaccgguacaccgccaagcgccccuucgugaagcugaacguggagaccgacacggccgagauccggcugaugugcaccgacaccuaccucgacaccccgcgccccaacgacggguccaucacgggccccugcgagagcgacggcgacaagggguccggcgggaucaagggcggguucguccaccagcggaugaaguccaagaucggccgcugguacagccggaccaugagcaagaccgagcgcaugggcauggggcuguacgugaaguacgacggcgaccccugggccgacuccgacgcccugguguucagcggggucaugguguccaugaaggagccgggcugguacagcuucggguucgagaucaaggacaagaagugcgacgugcccugcaucggcaucgagaugguccacgacggcgggaaggagaccuggcacuccgcggccacggccaucuacugccucaugggcagcgggcagcugcugugggacaccgugaccggcguggacauggcccucuga

SEQ ID NO: 94308 - RNA, 1401 nt, Artificial Sequence
  derived and/or modified CDS sequence (opt1) from neuraminidase__InfluenzaB__AHM01265
augcugcccagcaccauccagacccucacgcuguuccugaccuccggcggggugcuccugagccuguacgucuccgccagccucuccuaccugcuguacagcgacauccuccugaaguucuccccgaccgagaucaccgcccccacgaugccccuggacugcgcgaacgccagcaacgugcaggccgugaaccgcuccgccaccaagggcgucacccuccugcugcccgagccggaguggaccuacccccggcucagcugccccggguccacguuccagaaggcccugcugaucagcccccaccgcuucggcgagaccaaggggaacuccgcgccgcucaucauccgggagcccuucaucgccugcggccccaacgagugcaagcacuucgcccugacccacuacgccgcgcagcccggcggguacuacaacggcacccgcggggaccggaacaagcugcgccaccucaucagcgugaagcugggcaagaucccgacgguggagaacuccaucuuccacauggccgccuggagcggguccgccugccacgacggcaaggaguggaccuacaucggcgucgacgggcccgacaacaacgcccugcucaaggugaaguacggcgaggcguacaccgacaccuaccacagcuacgccaacaagauccugcggacgcaggaguccgccugcaacugcaucgggggcaacugcuaccugaugaucaccgacggcagcgccagcgggguguccgagugccgcuuccucaagauccgggagggccgcaucaucaaggagaucuuccccaccgggcgggucaagcacaccgaggagugcacgugcggcuucgccagcaacaagaccaucgagugcgcgugccgcgacaaccgguacaccgccaagcgccccuucgugaagcugaacguggagaccgacacggccgagauccggcugaugugcaccgacaccuaccucgacaccccgcgccccaacgacggguccaucacgggccccugcgagagcgacggcgacgagggguccggcgggaucaagggcggguucguccaccagcggaugaaguccaagaucggccgcugguacagccggaccaugagcaagaccgagcgcaugggcauggggcuguacgugaaguacgacggcgaccccugggccgacuccgacgcccuggcguucagcggggugauggucuccaugaaggagccgggcugguacagcuucggguucgagaucaaggacaagaagugcgacgugcccugcaucggcaucgagauggugcacgacggcgggaaggagaccuggcacuccgccgccacggccaucuacugccucaugggcagcgggcggcugcugugggacaccgucaccggcguggacauggcccucuga

SEQ ID NO: 94309 - RNA, 1401 nt, Artificial Sequence
  derived and/or modified CDS sequence (opt1) from neuraminidase__InfluenzaB__AHM01276
augcugcccagcaccauccagacccucacgcuguuccugaccuccggcggggugcuccugagccuguacgucuccgccagccucuccuaccugcuguacagcgacauccuccugaaguucucccagaccgagaucaccgccccgaucaugccccuggacugcacgaacgcgagcaacgugcaggccgugaaccgcuccgccgccaagggcgucacccuccugcugcccgagcccgaguggaccuacccgcggcucagcugccccggguccaccuuccagaaggcccugcugaucagcccccaccgcuucggcgagaucaaggggaacuccgcgccccucaucauccgggagccguucaucgccugcggccccacggagugcaagcacuucgcccugacccacuacgccgcgcagcccggcggguacuacaacggcacccgcgaggaccggaacaagcugcgccaccucaucagcgugaagcuggggaagauccccaccguggagaacuccaucuuccacauggccgccuggagcggcuccgccugccacgacgggaaggaguggacguacaucggcgucgacggcccggacagcaacgcccugcucaagaucaaguacggggaggcguacaccgacaccuaccacuccuacgccaagaacauccugcggacccaggagagcgccugcaacugcaucggcggggacugcuaccugaugaucacggacggccccgccagcggcguguccgagugccgcuuccucaagauccgggaggggcgcaucaucaaggagaucuuccccaccggccgggugaagcacaccgaggagugcacgugcggguucgccagcaacaagaccaucgagugcgcgugccgcgacaaccgguacaccgccaagcgccccuucgucaagcugaacguggagaccgacaccgccgagauccggcugaugugcacggagaccuaccucgacaccccgcgccccaacgacggcuccaucaccgggcccugcgagagcgacggcgacaagggcuccgggggcaucaagggcggguucgugcaccagcggauggccagcaagaucgggcgcugguacucccggacgaugagcaagaccaagcgcaugggcaugggccuguacgucaaguacgacggggaccccuggaccgacuccgaggcccuggcgcucagcggcgugaugguguccauggaggagccggggugguacagcuucggcuucgagaucaaggacaagaagugcgacguccccugcaucgggaucgagauggugcacgacggcggcaagaccacguggcacuccgccgccaccgccaucuacugccugauggggagcggccagcugcucugggacaccgugaccggggucgacauggcccuguga

SEQ ID NO: 94310 - RNA, 1401 nt, Artificial Sequence; identical to SEQ ID NO: 94294
  derived and/or modified CDS sequence (opt1) from neuraminidase__InfluenzaB__AHM01287

SEQ ID NO: 94311 - RNA, 1401 nt, Artificial Sequence; identical to SEQ ID NO: 94294
  derived and/or modified CDS sequence (opt1) from neuraminidase__InfluenzaB__AHM01298

SEQ ID NO: 94312 - RNA, 1401 nt, Artificial Sequence; identical to SEQ ID NO: 94309
  derived and/or modified CDS sequence (opt1) from neuraminidase__InfluenzaB__AHM01309

SEQ ID NO: 94313 - RNA, 1401 nt, Artificial Sequence; identical to SEQ ID NO: 94230
  derived and/or modified CDS sequence (opt1) from neuraminidase__InfluenzaB__AHM01320

SEQ ID NO: 94314 - RNA, 1401 nt, Artificial Sequence; identical to SEQ ID NO: 94294
  derived and/or modified CDS sequence (opt1) from neuraminidase__InfluenzaB__AHM01331

SEQ ID NO: 94315 - RNA, 1401 nt, Artificial Sequence; identical to SEQ ID NO: 94230
  derived and/or modified CDS sequence (opt1) from neuraminidase__InfluenzaB__AHM01342

SEQ ID NO: 94316 - RNA, 1401 nt, Artificial Sequence
  derived and/or modified CDS sequence (opt1) from neuraminidase__InfluenzaB__AHM01353
augcugcccagcaccauccagacccucacgcuguuccugaccuccggcggggugcuccugagccuguacgucuccgccagccucuccuaccugcuguacagcgacauccuccugaaguucuccccgaccgagaucaccgcccccacgaugccccuggacugcgcgaacgccagcaacgugcaggccgugaaccgcuccgccaccaagggcgucacccuccugcugcccgagccgggguggaccuacccccggcucagcugccccggcuccacguuccagaaggcccugcugaucagcccccaccgcuucggggagaccaagggcaacuccgcgccgcucaucauccgggagcccuucaucgccugcggccccaacgagugcaagcacuucgcccugacccacuacgccgcgcagcccgggggcuacuacaacgggacccgcggcgaccggaacaagcugcgccaccucaucagcgugaagcuggggaagaucccgacgguggagaacuccaucuuccacauggccgccuggagcggcuccgccugccacgacggcaaggaguggaccuacaucggggucgacggccccgacaacaacgcccugcucaaggugaaguacggggaggcguacaccgacaccuaccacagcuacgccaacaagauccugcggacgcaggaguccgccugcaacugcaucggcggcaacugcuaccugaugaucaccgacgggagcgccagcggcguguccgagugccgcuuccucaagauccgggaggggcgcaucaucaaggagaucuuccccaccggccgggucaagcacaccgaggagugcacgugcggguucgccagcaacaagaccaucgagugcgcgugccgcgacaaccgguacaccgccaagcgccccuucgugaagcugaacguggagaccgacacggccgagauccggcugaugugcaccgacaccuaccucgacaccccgcgccccaacgacggcuccaucacgggccccugcgagagcgacggggacaagggcuccgggggcaucaagggcggguucguccaccagcggaugaaguccaagaucggccgcugguacagccggaccaugagcaagaccgagcgcauggggaugggccuguacgugaaguacgacggggaccccugggccgacuccgacgcccuggcguucagcggcgugauggucuccaugaaggagccggggugguacagcuucggcuucgagaucaaggacaagaagugcgacgugcccugcaucggcaucgagauggugcacgacgggggcaaggagaccuggcacuccgccgccacggccaucuacugccucauggggagcggccagcugcugugggacaccgucaccggcguggacauggcccucuga

SEQ ID NO: 94317 - RNA, 1401 nt, Artificial Sequence
  derived and/or modified CDS sequence (opt1) from neuraminidase__InfluenzaB__AHM01364
augcugcccagcaccauccagacccucacgcuguuccugaccuccggcggggugcuccugagccuguacgucuccgccagccucuccuaccugcuguacagcgacauccuccugaaguucuccccgaccgagaucaccgcccccacgaugccccuggacugcgcgaacgccagcaacgugcaggccgugaaccgcuccgccaccaagggcgucacccuccugcugcccgagccggaguggaccuacccccggcucagcugccccggguccacguuccagaaggcccugcugaucagcccccaccgcuucggcgagaccaaggggaacuccgcgccgcucaucauccgggagcccuucaucgccugcggccccaacgagugcaagcacuucgcccugacccacuacgccgcgcagcccggcggguacuacaacggcacccgcggggaccggaacaagcugcgccaccucaucagcgugaagcugggcaagaucccgacgguggagaacuccaucuuccacauggccgccuggagcggguccgccugccacgacggcaaggaguggaccuacaucggcgucgacgggcccgacaacaacgcccugcucaaggugaaguacggcgaggcguacaccgacaccuaccacagcuacgccaacaagauccugcggacgcaggaguccgccugcaacugcaucgggggcaacugcuaccugaugaucaccgacggcagcgccagcgggguguccgagugccgcuuccucaagauccgggagggccgcaucaucaaggagaucuuccccaccgggcgggucaagcacaccgaggagugcacgugcggcuucgccagcaacaagaccaucgagugcgcgugccgcgacaaccgguacaccgccaagcgccccuucgugaagcugaacguggagaccgacacggccgagauccggcugaugugcaccgacaccuaccucgacaccccgcgccccaacgacggguccaucacgggccccugcgagagcgacggcgacgagggguccggcgggaucaagggcggguucguccaccagcggaugaaguccaagaucggccgcugguacagccggaccaugagcaagaccgagcgcaugggcauggggcuguacgugaaguacgacggcgaccccugggccgacuccgacgcccuggcguucagcggggugauggucuccaugaaggagccgggcugguacagcuucggguucgagaucaaggacaagaagugcgacgugcccugcaucggcaucgagauggugcacgacggcgggaaggagaccuggcacuccgccgccacggccaucuacugccucaugggcagcgggcagcugcugugggacaccgucaccggcguggacauggcccucuga

SEQ ID NO: 94318 - RNA, 1401 nt, Artificial Sequence; identical to SEQ ID NO: 94309
  derived and/or modified CDS sequence (opt1) from neuraminidase__InfluenzaB__AHM01375

SEQ ID NO: 94319 - RNA, 1401 nt, Artificial Sequence; identical to SEQ ID NO: 94309
  derived and/or modified CDS sequence (opt1) from neuraminidase__InfluenzaB__AHM01386

SEQ ID NO: 94320 - RNA, 1401 nt, Artificial Sequence; identical to SEQ ID NO: 94230
  derived and/or modified CDS sequence (opt1) from neuraminidase__InfluenzaB__AHM01397

SEQ ID NO: 94321 - RNA, 1401 nt, Artificial Sequence; identical to SEQ ID NO: 94230
  derived and/or modified CDS sequence (opt1) from neuraminidase__InfluenzaB__AHM01408

SEQ ID NO: 94322 - RNA, 1401 nt, Artificial Sequence; identical to SEQ ID NO: 94230
  derived and/or modified CDS sequence (opt1) from neuraminidase__InfluenzaB__AHM01419

SEQ ID NO: 94323 - RNA, 1401 nt, Artificial Sequence
  derived and/or modified CDS sequence (opt1) from neuraminidase__InfluenzaB__AHM01430
augcugcccagcaccauccagacccucacgcuguuccugaccuccggcggggugcuccugagccuguacgucuccgccagccucuccuaccugcuguacagcgacauccuccugaaguucuccccgaccgagaucaccgcccccacgaugccccuggacugcgcgaacgccagcaacgugcaggccgugaaccgcuccgccaccaagggcgucacccuccugcugcccgagccggaguggaccuacccccggcucagcugccccggguccacguuccagaaggcccugcugaucagcccccaccgcuucggcgagaccaaggggaacuccgcgccgcucaucauccgggagcccuucaucgccugcggccccaacgagugcaagcacuucgcccugacccacuacgccgcgcagcccggcggguacuacaacggcacccgcggggaccggaacaagcugcgccaccucaucagcgugaagcugggcaagaucccgacgguggagaacuccaucuuccacauggccgccuggagcggguccgccugccacgacggcaaggaguggaccuacaucggcgucgacgggcccgacaacaacgcccugcucaaggugaaguacggcgaggcguacaccgacaccuaccacagcuacgccaacaagauccugcggacgcaggaguccgccugcaacugcaucgggggcaacugcuaccugaugaucaccgacggcagcgccagcgggguguccgagugccgcuuccucaagauccgggagggccgcaucaucaaggagaucuuccccaccgggcgggucaagcacaccgaggagugcacgugcggcuucgccagcaacaagaccaucgagugcgcgugccgcgacaaccgguacaccgccaagcgccccuucgugaagcugaacguggagaccgacacggccgagauccggcugaugugcaccgacaccuaccucgacaccccgcgccccaacgacggguccaucacgggccccugcgagagcgacggcgacgagggguccggcgggaucaagggcggguucguccaccagcggaugaaguccaagaucggccgcugguacagccggaccaugagcaagaccgagcgcaugggcauggggcuguacgugaaguacgacggcgaccccugggccgacuccgacgcccuggcguucagcggggugauggucuccaugaaggagccgggcugguacagcuucggguucgagaucaaggacaagaagugcgacgugcccugcaucggcaucgagauggugcacgacggcgggaaggagaccuggcacuccgccgccacggccaucuacugccucaugggcagcgggcggcugcugugggacaccgccaccggcgucgacauggcgcucuga

SEQ ID NO: 94324 - RNA, 1401 nt, Artificial Sequence
  derived and/or modified CDS sequence (opt1) from neuraminidase__InfluenzaB__AHM01441
augcugcccagcaccauccagacccucacgcuguuccugaccuccggcggggugcuccugagccuguacgucuccgccagccucuccuaccugcuguacagcgacauccuccugaaguucucccagaccgagaucaccgccccgacgaugccccuggacugcgcgaacgccagcaacgugcaggccgugaaccgcuccgccgccaagggcgucacccuccugcugcccgagcccgaguggaccuacccgcggcucagcugccccggguccaccuuccagaaggcgcugcugaucagcccccaccgcuucggcgagaucaaggggaacuccgcgccccucaucauccgggagccguucaucgccugcggccccacggagugcaagcacuucgcccugacccacuacgccgcccagcccggcggguacuacaacggcacccgcgaggaccggaacaagcugcgccaccucaucagcgugaagcuggggaagauccccaccguggagaacuccaucuuccacauggccgccuggagcggcuccgccugccacgacgggaaggaguggacguacaucggcgucgacggcccggacagcaacgcgcugcucaagaucaaguacggggaggccuacaccgacaccuaccacuccuacgccaagaacauccugcggacccaggagagcgccugcaacugcaucggcggggacugcuaccugaugaucacggacggccccgccagcggcguguccgagugccgcuuccucaagauccgggaggggcgcaucaucaaggagaucuuccccaccggccgggugaagcacaccgaggagugcacgugcggguucgcgagcaacaagaccaucgagugcgccugccgcgacaaccgguacaccgccaagcgccccuucgucaagcugaacguggagaccgacaccgccgagauccggcugaugugcacggagaccuaccucgacaccccgcgccccaacgacggcuccaucaccgggcccugcgagagcgacggcgacaagggcuccgggggcaucaagggcggguucgugcaccagcggauggccagcaagaucgggcgcugguacucccggacgaugagcaagaccaagcgcaugggcaugggccuguacgucaaguacgacggggaccccuggaccgacuccgaggcgcuggcccucagcggcgugaugguguccauggaggagccggggugguacagcuucggcuucgagaucaaggacaagaagugcgacguccccugcaucgggaucgagauggugcacgacggcggcaagaccacguggcacuccgccgccaccgccaucuacugccugauggggagcggccagcugcucugggacaccgugaccggggucgacauggcgcuguga

SEQ ID NO: 94325 - RNA, 1401 nt, Artificial Sequence; identical to SEQ ID NO: 94230
  derived and/or modified CDS sequence (opt1) from neuraminidase__InfluenzaB__AHM01463

SEQ ID NO: 94326 - RNA, 1401 nt, Artificial Sequence
  derived and/or modified CDS sequence (opt1) from neuraminidase__InfluenzaB__AHM01474
augcugcccagcaccauccagacccucacgcuguuccugaccuccggcggggugcuccugagccuguacgucuccgccagccucuccuaccugcuguacagcgacauccuccugaaguucucccagaccgagaucaccgccccgaucaugccccuggacugcaucaacgcgagcaacgugcaggccgugaaccgcuccgccgccaagggcgucacgcuccugcugcccgagcccgaguggaccuacccgcggcucagcugccccggguccaccuuccagaaggcccugcugaucagcccccaccgcuucggcgagaucaaggggaacuccgcgccccucaucauccgggagccguucaucgccugcggccccaccgagugcaagcacuucgcccugacgcacuacgccgcgcagcccggcggguacuacaacggcacccgcgaggaccggaacaagcugcgccaccucaucagcgugaagcuggggaagauccccaccguggagaacuccaucuuccacauggccgccuggagcggcuccgccugccacgacgggaaggaguggaccuacaucggcgucgacggcccggacagcaacgcccugcucaagaucaaguacggggaggcguacacggacaccuaccacuccuacgccaagaacauccugcggacccaggagagcgccugcaacugcaucggcggggacugcuaccugaugaucaccgacggccccgccagcggcguguccgagugccgcuuccucaagauccgggaggggcgcaucaucaaggagaucuuccccacgggccgggugaagcacaccgaggagugcacgugcggguucgccagcaacaagaccaucgagugcgcgugccgcgacaaccgguacaccgccaagcgccccuucgucaagcugaacguggagaccgacaccgccgagauccggcugaugugcaccgagacguaccucgacaccccgcgccccaacgacggcuccaucaccgggcccugcgagagcgacggcgacaagggcuccgggggcaucaagggcggguucgugcaccagcggauggccagcaagaucgggcgcugguacucccggaccaugagcaagacgaagcgcaugggcaugggccuguacgucaaguacgacggggaccccuggaccgacuccgaggcccuggcgcucagcggcgugaugguguccauggaggagccggggugguacagcuucggcuucgagaucaaggacaagaagugcgacguccccugcaucgggaucgagauggugcacgacggcggcaagaccaccuggcacuccgccgccacggccaucuacugccugauggggagcggccagcugcucugggacaccgugaccggggucgacauggcccuguga

SEQ ID NO: 94327 - RNA, 1401 nt, Artificial Sequence
  derived and/or modified CDS sequence (opt1) from neuraminidase__InfluenzaB__AHM01485
augcugcccagcaccauccagacccucacgcuguuccugaccuccggcggggugcuccugagccuguacgucuccgccagccucuccuaccugcuguacagcgacauccuccugaaguucuccccgaccgagaucaccgcccccaucaugccccuggacugcacgaacgcgagcaacgugcaggccgugaaccgcuccgccgccaagggcgucacccuccugcugcccgagccggaguggaccuacccccggcucagcugccccggguccaccuuccagaaggcccugcugaucagcccccaccgcuucggcgagaucaaggggaacuccgcgccgcucaucauccgggagcccuucaucgccugcggccccacggagugcaagcacuucgcccugacccacuacgccgcgcagcccggcggguacuacaacggcacccgcgaggaccggaacaagcugcgccaccucaucagcgugaagcuggggaagaucccgaccguggagaacuccaucuuccacauggccgccuggagcggcuccgccugccacgacgggaaggaguggacguacaucggcgucgacggccccgacagcaacgcccugcucaagaucaaguacggggaggcguacaccgacaccuaccacuccuacgccaagaacauccugcggacccaggagagcgccugcaacugcaucggcggggacugcuaccugaugaucacggacggccccgccagcggcguguccgagugccgcuuccucaagauccgggaggggcgcaucaucaaggagaucuuccccaccggccgggugaagcacaccgaggagugcacgugcggguucgccagcaacaagaccaucgagugcgcgugccgcgacaaccgguacaccgccaagcgcccguucgucaagcugaacguggagaccgacaccgccgagauccggcugaugugcacggagaccuaccucgacacgccccgccccaacgacggcuccaucaccgggcccugcgagagcgacggcgacaagggcuccgggggcaucaagggcggguucgugcaccagcggauggccagcaagaucgggcgcugguacucccggaccaugagcaagaccaagcgcaugggcaugggccuguacgucaaguacgacggggacccguggaccgacuccgaggcccuggcgcucagcggcgugaugguguccauggaggagcccgggugguacagcuucggcuucgagaucaaggacaagaagugcgacguccccugcaucgggaucgagauggugcacgacggcggcaagaccacguggcacuccgccgccaccgccaucuacugccugauggggagcggccagcugcucugggacaccgugaccggggucgacauggcccuguga

SEQ ID NO: 94328 - RNA, 1401 nt, Artificial Sequence; identical to SEQ ID NO: 94309
  derived and/or modified CDS sequence (opt1) from neuraminidase__InfluenzaB__AHM01496

SEQ ID NO: 94329 - RNA, 1401 nt, Artificial Sequence
  derived and/or modified CDS sequence (opt1) from neuraminidase__InfluenzaB__AHM01507
augcugcccagcaccauccagacccucacgcuguuccugaccuccggcggggugcuccugagccuguacgucuccgccagccucuccuaccugcuguacagcgacauccuccugaaguucucccagaccgagaucaccgccccgaucaugccccuggacugcgcgaacgccagcaacgugcaggccgugaaccgcuccgccgccaagggcgucacgcuccugcugcccgagcccgaguggaccuacccgcggcucagcugccccggguccaccuuccagaaggcgcugcugaucagcccccaccgcuucggcgagaucaaggggaacuccgcgccccucaucgugcgggagccguucaucgccugcggccccaccgagugcaagcacuucgcccugacgcacuacgccgcccagcccggcggguacuacaacggcacccgcgaggaccggaacaagcugcgccaccucaucagcgugaagcuggggaagauccccaccgucgagaacuccaucuuccacauggccgccuggagcggcuccgccugccacgacgggaaggaguggaccuacaucggcguggacggcccggacagcaacgcgcugcucaagaucaaguacggggaggccuacacggacaccuaccacuccuacgccaagaacauccugcggacccaggagagcgccugcaacugcaucggcggggacugcuaccugaugaucaccgacggccccgccagcggcguguccgagugccgcuuccucaagauccgggaggggcgcaucaucaaggagaucuuccccacgggccgggucaagcacaccgaggagugcacgugcggguucgcgagcaacaagaccaucgagugcgccugccgcgacaaccgguacaccgccaagcgccccuucgugaagcugaacguggagaccgacaccgccgagauccggcugaugugcaccgagacguaccucgacaccccgcgccccaacgacggcuccaucaccgggcccugcgagagcgacggcgacaagggcuccgggggcaucaagggcggguucguccaccagcggauggccagcaagaucgggcgcugguacucccggaccaugagcaagacgaagcgcaugggcaugggccuguacgugaaguacgacggggaccccuggaccgacuccgaggcgcuggcccucagcggcgugauggucuccaucgaggagccggggugguacagcuucggcuucgagaucaaggacaagaagugcgacgugcccugcaucgggaucgagauggugcacgacggcggcaagaccaccuggcacuccgccgccacggccaucuacugccugauggggagcggccagcugcucugggacaccgucaccgggguggacauggcgcuguga

SEQ ID NO: 94330 - RNA, 1401 nt, Artificial Sequence; identical to SEQ ID NO: 94309
  derived and/or modified CDS sequence (opt1) from neuraminidase__InfluenzaB__AHM01518

SEQ ID NO: 94331 - RNA, 1401 nt, Artificial Sequence
  derived and/or modified CDS sequence (opt1) from neuraminidase__InfluenzaB__AHM01529
augcugcccagcaccauccagacccucacgcuguuccugaccuccggcggggugcuccugagccuguacgucuccgccagccucuccuaccugcuguacagcgacauccuccugaaguucucccagaccgagaucaccgccccgaucaugccccuggacugcacgaacgcgagcaacgugcaggccgugaaccgcuccgccgccaagggcgucacccuccugcugcccgagcccgaguggaccuacccgcggcucagcugccccggguccaccuuccagaaggcccugcugaucagcccccaccgcuucggcgagaucaaggggaacuccgcgccccucaucauccgggagccguucaucgccugcggccccacggagugcaagcacuucgcccugacccacuacgccgcgcagcccggcggguacuacaacggcacccgcgaggaccggaacaagcugcgccaccucaucagcgugaagcuggggaagauccccaccguggagaacuccaucuuccacauggccgccuggagcggcuccgccugccacgacgggaaggaguggacguacaucggcgucgacggcccggacagcaacgcccugcucaagaucaaguacggggaggcguacaccgacaccuaccacuccuacgccaagaacauccugcggacccaggagagcgccugcaacugcaucggcggggacugcuaccugaugaucacggacggccccgccagcggcguguccgagugccgcuuccucaagauccgggaggggcgcaucaucaaggagauccugcccaccggccgggugaagcacaccgaggagugcacgugcggguucgccagcaacaagaccaucgagugcgcgugccgcgacaaccgguacaccgccaagcgccccuucgucaagcugaacguggagaccgacaccgccgagauccggcucaugugcacggagaccuaccuggacaccccgcgccccaacgacggcuccaucaccgggcccugcgagagcgacggcgacaagggcuccgggggcaucaagggcggguucgugcaccagcggauggccagcaagaucgggcgcugguacucccggacgaugagcaagaccaagcgcaugggcaugggccuguacgucaaguacgacggggaccccuggaccgacuccgaggcccucgcgcugagcggcgugaugguguccauggaggagccggggugguacagcuucggcuucgagaucaaggacaagaagugcgacguccccugcaucgggaucgagauggugcacgacggcggcaagaccacguggcacuccgccgccaccgccaucuacugccugauggggagcggccagcuccugugggacaccgugaccggggucgacauggcccuguga

SEQ ID NO: 94332 - RNA, 1401 nt, Artificial Sequence; identical to SEQ ID NO: 94199
  derived and/or modified CDS sequence (opt1) from neuraminidase__InfluenzaB__AHM01540

SEQ ID NO: 94333 - RNA, 1401 nt, Artificial Sequence; identical to SEQ ID NO: 94309
  derived and/or modified CDS sequence (opt1) from neuraminidase__InfluenzaB__AHM01551

SEQ ID NO: 94334 - RNA, 1401 nt, Artificial Sequence; identical to SEQ ID NO: 94309
  derived and/or modified CDS sequence (opt1) from neuraminidase__InfluenzaB__AHM01562

SEQ ID NO: 94335 - RNA, 1401 nt, Artificial Sequence; identical to SEQ ID NO: 92816
  derived and/or modified CDS sequence (opt1) from neuraminidase__InfluenzaB__AHZ13597

SEQ ID NO: 94336 - RNA, 1404 nt, Artificial Sequence
  derived and/or modified CDS sequence (opt1) from neuraminidase__InfluenzaB__AHZ36701
augcugcccagcaccauccagaugcucacccuguuccugacguccggcggggugcuccugagccuguacgucuccgccagccucuccuaccugcuguacagcgacauccuccugaaguucuccccgaccgagaucaccgcccccaccaugccccuggacugcgcgaacgccagcaacgugcacgccgugaaccgcuccgccacgaagggcgucaccuuccuccugcugcccgagccggaguggaccuacccccggcucagcugccccggguccaccuuccagaaggcccugcugaucagcccccaccgcuucggcgagacgaaggggaacuccgcgccgcucaucauccgggagcccuucaucgccugcggccccaacgagugcaagcacuucgcccugacccacuacgccgcgcagcccggcggguacuacaacggcacccgcggggaccggaacaagcugcgccaccucaucagcgugaagcugggcaagaucccgaccguggagaacuccaucuuccacauggccgccuggagcggguccgccugccacgacggcaaggaguggacguacaucggcgucgacgggcccgacaacaacgcccugcucaagaucaaguacggcgaggcguacaccgacaccuaccacagcuacgccaacaacauccugcggacccaggaguccgccugcaacugcaucgggggcaacugcuaccugaugaucacggacggcagcgccagcgggguguccgagugccgcuuccucaagauccggaagggccgcaucaucaaggagaucuuccccaccgggcgggugaagcacaccgaggagugcacgugcggcuucgccagcaacaagaccaucgagugcgcgugccgcgacaacuccuacaccgccaagcggcccuucgucaagcugaacguggagaccgacaccgccgagauccgccugaugugcacggacaccuaccucgacaccccgcggcccgacgacgggagcaucaccggccccugcgaguccaacggcgacaaggggagcggcgggaucaagggcggguucgugcaccagcgcauggccuccaagaucggccggugguacagccgcacgauguccaagaccgagcggaugggcauggggcuguacgucaaguacgacggcgaccccuggaccgacagcgacgcccuggcguuccgcggggugaugguguccaugaaggagccgggcugguacagcuucggguucgagaucaaggacaagaagugcgacguccccugcaucggcaucgagauggugcacgacggcgggaaggagaccuggcacuccgccgccacggccaucuacugccucaugggcagcgggcagcugcugugggacaccgugaccggcgucgacauggcccucuga

SEQ ID NO: 94337 - RNA, 1404 nt, Artificial Sequence
  derived and/or modified CDS sequence (opt1) from neuraminidase__InfluenzaB__AHZ36756
augcugcccagcaccauccagaugcucacccuguuccugacguccggcggggugcuccugagccuguacgucuccgccagccucuccuaccugcuguacagcgacauccuccugaaguucuccccgaccgagaucaccgcccccaccaugccccuggacugcgcgaacgccagcaacgugcacgccgugaaccgcuccgccacgaagggcgucaccuuccuccugcugcccgagccggaguggaccuacccccggcucagcugccccggguccaccuuccagaaggcccugcugaucagcccccaccgcuucggcgagacgaaggggaacuccgcgccgcucaucauccgggagcccuucaucgccugcggccccaacgagugcaagcacuucgcccugacccacuacgccgcgcagcccggcggguacuacaacggcacccgcggggaccggaacaagcugcgccaccucaucagcgugaagcugggcaagaucccgaccguggagaacuccaucuuccacauggccgccuggagcggguccgccugccacgacggcaaggaguggacguacaucggcgucgacgggcccgacaacaacgcccugcucaagaucaaguacggcgaggcguacaccgacaccuaccacagcuacgccaacaacauccugcggacccaggaguccgccugcaacugcaucgggggcaacugcuaccugaugaucacggacggcagcgccagcgggguguccgagugccgcuuccucaagauccgggagggccgcaucaucaaggagaucuuccccaccgggcgggugaagcacaccgaggagugcacgugcggcuucgccagcaacaagaccaucgagugcgcgugccgcgacaacuccuacaccgccaagcggcccuucgucaagcugaacguggagaccgacaccgccgagauccgccugaugugcacggacaccuaccucgacaccccgcggcccgacgacgggagcaucaccggccccugcgaguccaacggcgacaaggggagcggcgggaucaagggcggguucgugcaccagcgcauggccuccaagaucggccggugguacagccgcacgauguccaagaccgagcggaugggcauggggcuguacgucaaguacgacggcgaccccuggaccgacagcgacgcccuggcguuccgcggggugaugguguccaugaaggagccgggcugguacagcuucggguucgagaucaaggacaagaagugcgacguccccugcaucggcaucgagauggugcacgacggcgggaaggagaccuggcacuccgccgccacggccaucuacugccucaugggcagcgggcagcugcugugggacaccgugaccggcgucgacauggcccucuga

SEQ ID NO: 94338 - RNA, 1401 nt, Artificial Sequence
  derived and/or modified CDS sequence (opt1) from neuraminidase__InfluenzaB__AHZ36767
augcugcccagcaccauccagacccucacgcuguuccugaccuccggcggggugcuccugagccuguacgucuccgccagccucuccuaccugcuguacagcgacauccuccugaaguucuccccgaccgagaucaccgcccccacgcgcccccuggacugcgcgaacgccagcaacgugcaggccgugaaccgguccgccaccaagggcgucacccuccugcugcccgagccggaguggaccuacccccgccucagcugccccggguccacguuccagaaggcccugcugaucagcccccaccgguucggcgagaccaaggggaacuccgcgccgcucaucauccgcgagcccuucaucgccugcggccccaacgagugcaagcacuucgcccugacccacuacgccgcgcagcccggcggguacuacaacggcacccgcggggaccggaacaagcugcggcaccucaucagcgugaagcugggcaagaucccgacgguggagaacuccaucuuccacauggccgccuggagcggguccgccugccacgacggcaaggaguggaccuacaucggcgucgacgggcccgacaacaacgcccugcucaaggugaaguacggcgaggcguacaccgacaccuaccacagcuacgccaacaagauccugcgcacgcaggaguccgccugcaacugcaucgggggcaacugcuaccugaugaucaccgacggcagcgccagcgggguguccgagugccgguuccucaagauccgcgagggccggaucaucaaggagaucuuccccaccgggcgcgucaagcacaccgaggagugcacgugcggcuucgccagcaacaagaccaucgagugcgcgugccgggacaaccgcuacaccgccaagcggcccuucgugaagcugaacguggagaccgacacggccgagauccgccugaugugcaccgacaccuaccucgacaccccgcggcccaacgacggguccaucacgggccccugcgagagcgacggcgacaagggguccggcgggaucaagggcggguucguccaccagcgcaugaaguccaagaucggccggugguacagccgcaccaugagcaagaccgagcggaugggcauggggcuguacgugaaguacgacggcgaccccugggccgacuccgacgcccuggcguucagcggggugauggucuccaugaaggagccgggcugguacagcuucggguucgagaucaaggacaagaagugcgacgugcccugcaucggcaucgagauggugcacgacggcgggaaggagaccuggcacuccgccgccacggccaucuacugccucaugggcagcgggcagcugcugugggacaccgucaccggcguggacauggcccucuga

SEQ ID NO: 94339 - RNA, 1401 nt, Artificial Sequence
  derived and/or modified CDS sequence (opt1) from neuraminidase__InfluenzaB__AHZ36778
augcugcccagcaccauccagacccucacgcuguuccugaccuccggcggggugcuccugagccuguacgucuccgccagccucuccuaccugcuguacagcgacauccuccugaaguucccguccaccgagaucaccgcccccacgaugccccuggacugcgcgaacgccagcaacgugcaggccgugaaccgcuccgccaccaagggcgucacccuccugcugcccgagccggaguggaccuacccccggcucagcugccccggguccacguuccagaaggcccugcugaucagcccccaccgcuucggcgagaccaaggggaacuccgcgccgcucaucauccgggagcccuucaucgccugcggccccaaggagugcaagcacuucgcccugacccacuacgccgcgcagcccggcggguacuacaacggcacccgcggggaccggaacaagcugcgccaccucaucagcgugaagcugggcaagaucccgacgguggagaacuccaucuuccacauggccgccuggagcggguccgccugccacgacggcaaggaguggaccuacaucggcgucgacgggcccgacaacaacgcccugcucaagaucaaguacggcgaggcguacaccgacaccuaccacagcuacgccaacaacauccugcggacgcaggaguccgccugcaacugcaucgggggcaacugcuaccugaugaucaccgacggcagcgccagcgggguguccgagugccgcuuccucaagauccgggagggccgcaucaucaaggagaucuuccccaccgggcggauccagcacaccgaggagugcacgugcggcuucgccagcaacaagaccaucgagugcgcgugccgcgacaacuccuacaccgccaagcggcccuucgugaagcugaacgucgagaccgacacggccgagauccgccugaugugcaccaagaccuaccucgacaccccgcggcccgaggacgggagcaucacgggccccugcgaguccaacggcgggaagggcagcgggggcaucaagggcggguucgugcaccagcgcauggccuccaagaucggccggugguacagccgcaccauguccaagaccgagcggaaggggaugggccuguacgugaaguacaacggggaccccugggccgacagcgacgcgcuggucuucuccggcgugaugaucagcauggaggagccggggugguacuccuucggcuucgagaucaaggacaagaagugcgacgugcccugcaucggcaucgagaugguccacgacgggggcaaggagaccuggcacagcgccgccacggccaucuacugccucaugggguccggccagcugcugugggacaccgugaccggcgugaacaugacccucuga

SEQ ID NO: 94340 - RNA, 1401 nt, Artificial Sequence
  derived and/or modified CDS sequence (opt1) from neuraminidase__InfluenzaB__AHZ36789
augcugcccagcaccauccagacccucacgcuguuccugaccuccggcggggugcuccugagccuguacgucuccgccagccucuccuaccugcuguacagcgacauccuccugaaguucuccccgaccgagaucaccgcccagacgaugccccuggacugcgcgaacgccagcaacgugcaggccgugaaccgcuccgccaccaagggcgucacccuccugccgcccgagcccgaguggaccuacccccggcugagcugccccggguccacguuccagaaggcccuccugaucagcccccaccgcuucggcgagaccaaggggaacuccgcgccgcugaucauccgggagcccuucaucgccugcggccccaacgagugcaagcacuucgcccucacccacuacgccgcgcagcccggcggguacuacaacggcacccgcggggaccggaacaagcugcgccaccugaucagcgugaagcucggcaagaucccgacgguggagaacuccaucuuccacauggccgccuggagcggguccgccugccacgacggcaaggaguggaccuacaucggcgucgacgggcccgacaacaacgcccugcugaaggugaaguacggcgaggcguacaccgacaccuaccacagcuacgccaacaagauccuccggacgcaggaguccgccugcaacugcaucgggggcaacugcuaccugaugaucaccgacggcagcgccagcgggguguccgagugccgcuuccugaagauccgggagggccgcaucaucaaggagaucuuccccaccgggcgggucaagcacaccgaggagugcacgugcggcuucgccagcaacaagaccaucgagugcgcgugccgcgacaaccgguacaccgccaagcgccccuucgugaagcucaacguggagaccgacacggccgagauccggcugaugugcaccgacaccuaccuggacaccccgcgccccaacgacggguccaucacgggccccugcgagagcgacggcgacaagggguccggcgggaucaagggcggguucguccaccagcggaugaaguccaagaucggccgcugguacagccggaccaugagcaagaccgagcgcaugggcauggggcucuacgugaaguacgacggcgaccccugggccgacuccgacgcccuggcguucagcggggugauggucuccaugaaggagccgggcugguacagcuucggguucgagaugaaggacaagaagugcgacgugcccugcaucggcaucgagauggugcacgacggcgggaaggagaccuggcacuccgccgccacggccaucuacugccugaugggcagcgggcagcuccugugggacaccgucaccggcguggacauggcccuguga

SEQ ID NO: 94341 - RNA, 1401 nt, Artificial Sequence; identical to SEQ ID NO: 94340
  derived and/or modified CDS sequence (opt1) from neuraminidase__InfluenzaB__AHZ36800

SEQ ID NO: 94342 - RNA, 1401 nt, Artificial Sequence
  derived and/or modified CDS sequence (opt1) from neuraminidase__InfluenzaB__AHZ36811
augcugcccagcaccauccagacccucacgcuguuccugaccuccggcggggugcuccugagccuguacgucuccgccagccucuccuaccugcuguacagcgacauccuccugaaguucucccagaccgagaucaccgccccgaucaugccccuggacugcacgaacgcgagcaacgugcaggccgugaaccgcuccgccgccaagggcgucacccuccugcugcccgagcccgaguggaccuacccgcggcucagcugccccggguccaccuuccagaaggcccugcugaucagcccccaccgcuucggcgagaucaaggggaacuccgcgccccucaucauccgggagccguucaucgccugcggccccacggagugcaagcacuucgcccugacccacuacgccgcgcagcccggcggguacuacaacggcacccgcgaggaccggaacaagcugcgccaccucaucagcgugaagcuggggaagauccccaccguggagaacuccaucuuccacauggccgccuggagcggcuccgccugccacgacgggaaggaguggacguacaucggcgucgacggcccggacagcaacgcccugcucaagaucaaguacggggaggcguacaccgacaccuaccacuccuacgccaagaacauccugcggacccaggagagcgccugcaacugcaucggcggggacugcuaccugaugaucacggacggccccgccagcggcguguccgagugccgcuuccucaagauccgggaggggcgcaucauccgggagaucuuccccaccggccgcgugaagcacaccgaggagugcacgugcggguucgccagcaacaagaccaucgagugcgcgugccgggacaaccgcuacaccgccaagcggcccuucgucaagcugaacguggagaccgacaccgccgagauccgccugaugugcacggagaccuaccucgacaccccgcggcccaacgacggcuccaucaccgggcccugcgagagcgacggcgacaagggcuccgggggcaucaagggcggguucgugcaccagcgcauggccagcaagaucgggcggugguacucccgcacgaugagcaagaccaagcggaugggcaugggccuguacgucaaguacgacggggaccccuggaccgacuccgaggcccuggcgcucagcggcgugaugguguccauggaggagccggggugguacagcuucggcuucgagaucaaggacaagaagugcgacguccccugcaucgggaucgagauggugcacgacggcggcaagaccacguggcacuccgccgccaccgccaucuacugccugauggggagcggccagcugcucugggacaccgugaccggggucgacauggcccuguga

SEQ ID NO: 94343 - RNA, 1404 nt, Artificial Sequence; identical to SEQ ID NO: 94337
  derived and/or modified CDS sequence (opt1) from neuraminidase__InfluenzaB__AHZ36822

SEQ ID NO: 94344 - RNA, 1401 nt, Artificial Sequence
  derived and/or modified CDS sequence (opt1) from neuraminidase__InfluenzaB__AHZ36833
augcugcccagcaccauccagacccucacgcuguuccugaccuccggcggggugcuccugagccuguacgucuccgccagccucuccuaccugcuguacagcgacauccuccugaaguucuccccgaccgagaucaccgcccccacgcgcccccuggacugcgcgaacgccagcaacgugcaggccgugaaccgguccgccaccaagggcgucacccuccugcugcccgagccggaguggaccuacccccgccucagcugccccggguccacguuccagaaggcccugcugaucagcccccaccgguucggcgagaccaaggggaacuccgcgccgcucaucauccgcgagcccuucaucgccugcggccccaacgagugcaagcacuucgcccugacccacuacgccgcgcagcccggcggguacuacaacggcacccgcggggaccggaacaagcugcggcaccucaucagcgugaagcugggcaagaucccgacgguggagaacuccaucuuccacauggccgccuggagcggguccgccugccacgacggcaaggaguggaccuacaucggcgucgacgggcccgacaacaacgcccugcucaaggugaaguacggcgaggcguacaccgacaccuaccacagcuacgccaacaagauccugcgcacgcaggaguccgccugcaacugcaucgggggcaacugcuaccugaugaucaccgacggcagcgccagcgggguguccgagugccgguuccucaagguccgcgagggccggaucaucaaggagaucuuccccaccgggcgcgugaagcacaccgaggagugcacgugcggcuucgccagcaacaagaccaucgagugcgcgugccgggacaaccgcuacaccgccaagcggcccuucgugaagcugaacgucgagaccgacacggccgagauccgccugaugugcaccgacaccuaccucgacaccccgcggcccaacgacggguccaucacgggccccugcgagagcgacggcgacaagggguccggcgggaucaagggcggguucgugcaccagcgcaugaaguccaagaucggccggugguacagccgcaccaugagcaagaccgagcggaugggcauggggcuguacgugaaguacgacggcgaccccugggccgacuccgacgcccuggcguucagcggggucaugguguccaugaaggagccgggcugguacagcuucggguucgagaucaaggacaagaagugcgacgugcccugcaucggcaucgagaugguccacgacggcgggaaggagaccuggcacuccgccgccacggccaucuacugccucaugggcagcgggcagcugcugugggacaccgugaccggcguggacauggcccucuga

SEQ ID NO: 94345 - RNA, 1401 nt, Artificial Sequence
  derived and/or modified CDS sequence (opt1) from neuraminidase__InfluenzaB__AHZ36844
augcugcccagcaccauccagacccucacgcuguuccugaccuccggcggggugcuccugagccuguacgucuccgccagccucuccuaccugcuguacagcgacauccuccugaaguucuccccgaccgagaucaccgcccccacgcgcccccuggacugcgcgaacgccagcaacgugcaggccgugaaccgguccgccaccaaggaggucacccuccugcugcccgagccggaguggaccuacccccgccucagcugccccggcuccacguuccagaaggcccugcugaucagcccccaccgguucggggagaccaagggcaacuccgcgccgcucaucauccgcgagcccuucaucgccugcgggcccaacgagugcaagcacuucgcccugacccacuacgccgcgcagcccggcggcuacuacaacgggacccggggcgaccgcaacaagcugcggcaccucaucagcgugaagcuggggaagaucccgacgguggagaacuccaucuuccacauggccgccuggagcggcuccgccugccacgacgggaaggaguggaccuacaucggcgucgacggccccgacaacaacgcccugcucaaggugaaguacggggaggcguacaccgacaccuaccacagcuacgccaacaagauccugcgcacgcaggaguccgccugcaacugcaucggcgggaacugcuaccugaugaucaccgacggcagcgccagcggcguguccgagugccgguuccucaagauccgcgaggggcggaucaucaaggagaucuuccccaccggccgcgucaagcacaccgaggagugcacgugcggguucgccagcaacaagaccaucgagugcgcgugccgggacaaccgcuacaccgccaagcggcccuucgugaagcugaacguggagaccgacacggccgagauccgccugaugugcaccgacaccuaccucgacaccccgcggcccaacgacggcuccaucacggggcccugcgagagcgacggcgacaagggcuccgggggcaucaagggcggguucguccaccagcgcaugaaguccaagaucgggcggugguacagccgcaccaugagcaagaccgagcggaugggcaugggccuguacgugaaguacgacggggaccccugggccgacuccgacgcccuggcguucagcggcgugauggucuccaugaaggagccggggugguacagcuucggcuucgagaucaaggacaagaagugcgacgugcccugcaucgggaucgagauggugcacgacggcggcaaggagaccuggcacuccgccgccacggccaucuacugccucauggggagcggccagcugcugugggacaccgucaccgggguggacauggcccucuga

SEQ ID NO: 94346 - RNA, 1401 nt, Artificial Sequence
  derived and/or modified CDS sequence (opt1) from neuraminidase__InfluenzaB__AHZ36855
augcugcccagcaccauccagacccucacgcuguuccugaccuccggcggggugcuccugagccuguacgucuccgccagccucuccuaccugcuguacagcgacauccuccugaaguucuccccgaccgagaucaccgugcagacgaugccccuggacugcgccaacgcgagcaacgugcaggccgucaaccgcuccgccaccaagggcgugacccuccugccgcccgagcccgaguggaccuacccccggcugagcugccccggguccacguuccagaaggcccuccugaucagcccccaccgcuucggcgagaccaaggggaacuccgccccgcugaucauccgggagcccuucaucgcgugcggccccaacgagugcaagcacuucgcccucacccacuacgccgcccagcccggcggguacuacaacggcacccgcggggaccggaacaagcugcgccaccugaucagcgugaagcucggcaagaucccgacggucgagaacuccaucuuccacauggcggccuggagcggguccgccugccacgacggcaaggaguggaccuacaucggcguggacgggcccgacaacaacgcccugcugaaggugaaguacggcgaggccuacaccgacaccuaccacagcuacgcgaacaagauccuccggacgcaggaguccgccugcaacugcaucgggggcaacugcuaccugaugaucaccgacggcagcgccagcggggucuccgagugccgcuuccugaagauccgggagggccgcaucaucaaggagaucuuccccaccgggcgggugaagcacaccgaggagugcacgugcggcuucgccagcaacaagaccaucgagugcgccugccgcgacaaccgguacaccgcgaagcgccccuucgugaagcucaacgucgagaccgacacggccgagauccggcugaugugcaccgacaccuaccuggacaccccgcgccccaacgacggguccaucacgggccccugcgagagcgacggcgacaagggguccggcgggaucaagggcggguucgugcaccagcggaugaaguccaagaucggccgcugguacagccggaccaugagcaagaccgagcgcaugggcauggggcucuacgugaaguacgacggcgaccccugggccgacuccgacgcccuggccuucagcggggucaugguguccaugaaggagccgggcugguacagcuucggguucgagaugaaggacaagaagugcgacgugcccugcaucggcaucgagaugguccacgacggcgggaaggagaccuggcacuccgcggccacggccaucuacugccugaugggcagcgggcagcuccugugggacaccgugaccggcguggacauggcccuguga

SEQ ID NO: 94347 - RNA, 1404 nt, Artificial Sequence; identical to SEQ ID NO: 94337
  derived and/or modified CDS sequence (opt1) from neuraminidase__InfluenzaB__AHZ36866

SEQ ID NO: 94348 - RNA, 1401 nt, Artificial Sequence
  derived and/or modified CDS sequence (opt1) from neuraminidase__InfluenzaB__AHZ36877
augcugcccagcaccauccagacccucacgcuguuccugaccuccggcggggugcuccugagccuguacgucuccgccagccucuccuaccugcuguacagcgacauccuccugaaguucuccccgcccgagaucaccgcccccaccaugccccuggacugcgcgaacgccagcaacgugcaggccgugaaccgcuccgccacgaagggcgucacccuccugcugccggagcccgaguggaccuacccccggcucagcugccccggguccaccuuccagaaggcccugcugaucagcccgcaccgcuucggcgagacgaaggggaacuccgcgccccucaucauccgggagcccuucaucgccugcggccccaacgagugcaagcacuucgcccugacccacuacgccgcgcagccgggcggguacuacaacggcacccgcggggaccggaacaagcugcgccaccucaucagcgugaagcugggcaagauccccaccguggagaacuccaucuuccacauggccgccuggagcggguccgccugccacgacggcaaggaguggacguacaucggcgucgacgggcccgacaacaacgcccugcucaaggugaaguacggcgaggcguacaccgacaccuaccacagcuacgccaacaagauccugcggacccaggaguccgccugcaacugcaucgggggcaacugcuaccugaugaucacggacggcagcgccagcgggguguccgagugccgcuuccucaagauccgggagggccgcaucaucaaggagaucuuccccaccgggcgggucaagcacaccgaggagugcacgugcggcuucgccagcaacaagaccaucgagugcgcgugccgcgacaaccgguacaccgccaagcgcccguucgugaagcugaacguggagaccgacaccgccgagauccggcugaugugcacggacaccuaccucgacacgccccgccccaacgacggguccaucaccggccccugcgagagcgacggcgacaagggguccggcgggaucaagggcggguucguccaccagcggaugaaguccaagaucggccgcugguacagccggaccaugagcaagaccgagcgcaugggcauggggcuguacgugaaguacgacggcgacccgugggccgacuccgacgcccuggcguucagcggggugauggucuccaugaaggagcccggcugguacagcuucggguucgagaucaaggacaagaagugcgacgugcccugcaucggcaucgagauggugcacgacggcgggaaggagaccuggcacuccgccgccaccgccaucuacugccucaugggcagcgggcagcugcugugggacacggucaccggcguggacauggcccucuga

SEQ ID NO: 94349 - RNA, 1404 nt, Artificial Sequence; identical to SEQ ID NO: 94337
  derived and/or modified CDS sequence (opt1) from neuraminidase__InfluenzaB__AHZ36888

SEQ ID NO: 94350 - RNA, 1404 nt, Artificial Sequence; identical to SEQ ID NO: 94337
  derived and/or modified CDS sequence (opt1) from neuraminidase__InfluenzaB__AHZ36899

SEQ ID NO: 94351 - RNA, 1404 nt, Artificial Sequence; identical to SEQ ID NO: 94337
  derived and/or modified CDS sequence (opt1) from neuraminidase__InfluenzaB__AHZ36910

SEQ ID NO: 94352 - RNA, 1401 nt, Artificial Sequence; identical to SEQ ID NO: 94339
  derived and/or modified CDS sequence (opt1) from neuraminidase__InfluenzaB__AHZ36921

SEQ ID NO: 94353 - RNA, 1401 nt, Artificial Sequence
  derived and/or modified CDS sequence (opt1) from neuraminidase__InfluenzaB__AHZ36932
augcugcccagcaccauccagacccucacgcuguuccugaccuccggcggggugcuccugagccuguacgucuccgccagccucuccuaccugcuguacagcgacauccuccugaaguucuccccgaccgagaucaccgcccagacgaugccccuggacugcgcgaacgccagcaacgugcaggccgugaaccgcuccgccaccaagggcgucacccuccugccgcccgagcccgaguggaccuacccccggcugagcugccccggguccacguuccagaaggcccuccugaucagcccccaccgcuucggcgagaccaaggggaacuccgcgccgcugaucauccgggagcccuucaucgccugcggccccaacgagugcaagcacuucgcccucacccacuacgccgcgcagcccggcggguacuacaacggcacccgcggggaccggaacaagcugcgccaccugaucagcgugaagcucggcaagaucccgacgguggagaacuccaucuuccacauggccgccuggagcggguccgccugccacgacggcaaggaguggaccuacaucggcgucgacgggcccgacaacaacgcccugcugaaggugaaguacggcgaggcguacaccgacaccuaccacagcuacgccaacaagauccuccggacgcaggaguccgccugcaacugcaucgggggcaacugcuaccugaugaucaccgacggcagcgccagcgggguguccgagugccgcuuccugaagauccgggagggccgcaucaucaaggagaucuuccccaccgggcgggucaagcacaccgaggagugcacgugcggcuucgccagcaacaagaccauggagugcgcgugccgcgacaaccgguacaccgccaagcgccccuucgugaagcucaacguggagaccgacacggccgagauccggcugaugugcaccgacaccuaccuggacaccccgcgccccaacgacggguccaucacgggccccugcgagagcgacggcgacaagggguccggcgggaucaagggcggguucguccaccagcggaugaaguccaagaucggccgcugguacagccggaccaugagcaagaccgagcgcaugggcauggggcucuacgugaaguacgacggcgaccccugggccgacuccgacgcccuggcguucagcggggugauggucuccaugaaggagccgggcugguacagcuucggguucgagaugaaggacaagaagugcgacgugcccugcaucggcaucgagauggugcacgacggcgggaaggagaccuggcacuccgccgccacggccaucuacugccugaugggcagcgggcagcuccugugggacaccgucaccggcguggacauggcccuguga

SEQ ID NO: 94354 - RNA, 1401 nt, Artificial Sequence
  derived and/or modified CDS sequence (opt1) from neuraminidase__InfluenzaB__AHZ36943
augcugcccagcaccauccagacccucacgcuguuccugaccuccggcggggugcuccugagccuguacgucuccgccagccucuccuaccugcuguacagcgacauccuccugaaguucuccccgaccgagaucaccgcccccacgaugccccuggacugcgcgaacgccagcaacgugcaggccgugaaccgcuccgccaccaagggcgucacccuccugcccccggagcccgaguggaccuacccccggcugagcugccccggguccacguuccagaaggcccuccugaucagcccgcaccgcuucggcgagaccaaggggaacuccgcgccccugaucauccgggagcccuucaucgccugcggccccaacgagugcaagcacuucgcccucacccacuacgccgcgcagccgggcggguacuacaacggcacccgcggggaccggaacaagcugcgccaccugaucagcgugaagcucggcaagauccccacgguggagaacuccaucuuccacauggccgccuggagcggguccgccugccacgacggcaaggaguggaccuacaucggcgucgacgggcccgacaacaacgcccugcugaaggugaaguacggcgaggcguacaccgacaccuaccacagcuacgccaacaagauccuccggacgcaggaguccgccugcaacugcaucgggggcaacugcuaccugaugaucaccgacggcagcgccagcgggguguccgagugccgcuuccugaagauccgggagggccgcaucaucaaggagaucuuccccaccgggcgggucaagcacaccgaggagugcacgugcggcuucgccagcaacaagaccaucgagugcgcgugccgcgacaaccgguacaccgccaagcgcccguucgugaagcucaacguggagaccgacacggccgagauccggcugaugugcaccgacaccuaccuggacacgccccgccccaacgacggguccaucaccggccccugcgagagcgacggcgacaagggguccggcgggaucaagggcggguucguccaccagcggaugaaguccaagaucggccgcugguacagccggaccaugagcaagaccgagcgcaugggcauggggcucuacgugaaguacgacggcgacccgugggccgacuccgacgcccuggcguucagcggggugauggucuccaugaaggagcccggcugguacagcuucggguucgagaugaaggaccggaagugcgacgugcccugcaucggcaucgagauggugcacgacggcgggaaggagaccuggcacuccgccgccacggccaucuacugccugaugggcagcgggcagcuccugugggacaccgucaccggcguggacauggcccuguga

SEQ ID NO: 94355 - RNA, 1404 nt, Artificial Sequence; identical to SEQ ID NO: 94337
  derived and/or modified CDS sequence (opt1) from neuraminidase__InfluenzaB__AHZ36954

SEQ ID NO: 94356 - RNA, 1401 nt, Artificial Sequence
  derived and/or modified CDS sequence (opt1) from neuraminidase__InfluenzaB__AHZ36965
augcugcccagcaccauccagacccucacgcuguuccugaccuccggcggggugcuccugagccuguacgucuccgccagccucuccuaccugcuguacagcgacauccuccugaaguucuccccgcccgagaucaacgcccccaccaugccccuggacugcgcgaacgccagcaacgugcaggccgugaaccgcuccgccaccaagggcgucacgcuccugcugccggagcccgaguggaccuacccccggcucagcugccccggguccaccuuccagaaggcccugcugaucagcccgcaccgcuucggcgagaccaaggggaacuccgcgccccucaucauccgggagcccuucaucgccugcggccccaacgagugcaagcacuucgcccugacgcacuacgccgcgcagccgggcggguacuacaacggcacccgcggggaccggaacaagcugcgccaccucaucagcgugaagcugggcaagauccccaccguggagaacuccaucuuccacauggccgccuggagcggguccgccugccacgacggcaaggaguggaccuacaucggcgucgacgggcccgacaacaacgcccugcucaaggugaaguacggcgaggcguacacggacaccuaccacagcuacgccaacaagauccugcggacccaggaguccgccugcaacugcaucgggggcaacugcuaccugaugaucaccgacggcagcgccagcgggguguccgagugccgcuuccucaagauccgggagggccgcaucaucaaggagaucuuccccacggggcgggucaagcacaccgaggagugcacgugcggcuucgccagcaacaagaccaucgagugcgcgugccgcgacaaccgguacaccgccaagcgcccguucgugaagcugaacguggagaccgacaccgccgagauccggcugaugugcaccgacacguaccucgacacgccccgccccaacgacggguccaucaccggccccugcgagagcgacggcgacaagggguccggcgggaucaagggcggguucguccaccagcggaugaaguccaagaucggccgcugguacagccggaccaugagcaagaccgagcgcaugggcauggggcuguacgugaaguacgacggcgacccgugggccgacuccgacgcccuggcguucagcggggugauggucuccaugaaggagcccggcugguacagcuucggguucgagaucaaggacaagaagugcgacgugcccugcaucggcaucgagauggugcacgacggcgggaaggagaccuggcacuccgccgccaccgccaucuacugccucaugggcagcgggcagcugcugugggacaccgucacgggcguggacauggcccucuga

SEQ ID NO: 94357 - RNA, 1404 nt, Artificial Sequence; identical to SEQ ID NO: 94337
  derived and/or modified CDS sequence (opt1) from neuraminidase__InfluenzaB__AHZ36976

SEQ ID NO: 94358 - RNA, 1404 nt, Artificial Sequence; identical to SEQ ID NO: 94337
  derived and/or modified CDS sequence (opt1) from neuraminidase__InfluenzaB__AHZ36987

SEQ ID NO: 94359 - RNA, 1401 nt, Artificial Sequence; identical to SEQ ID NO: 94340
  derived and/or modified CDS sequence (opt1) from neuraminidase__InfluenzaB__AHZ36998

SEQ ID NO: 94360 - RNA, 1401 nt, Artificial Sequence
  derived and/or modified CDS sequence (opt1) from neuraminidase__InfluenzaB__AHZ37009
augcugcccagcaccauccagacccucacgcuguuccugacccucggcggggugcugcugucccucuacgucagcgccucccugagcuaccugcucuacuccgacauccugcugaaguucagcccgaccgagaucaccgcccccacgaugccccucggcugcgcgaacgccuccaacgugcaggccgugaaccgcagcgccaccaagggggucacccugcugcuccccgagccggaguggaccuacccccggcuguccugccccggcagcacguuccagaaggcccugcucaucagcccccaccgcuucggggagaccaagggcaacuccgcgccgcugaucauccgggagcccuucaucgccugcggccccaacgagugcaagcacuucgcccugacccacuacgccgcgcagcccgggggcuacuacaacgggacccgcggcgaccggaacaagcuccgccaccugaucuccgugaagcuggggaagaucccgacgguggagaacagcaucuuccacauggccgccugguccggcagcgccugccacgacggcaaggaguggaccuacaucggggucgacggccccgacaacaacgcccuccugaaggugaaguacggggaggcguacaccgacaccuaccacuccuacgccaacaagauccugcggacgcaggagagcgccugcaacugcaucggcggcaacugcuaccucaugaucaccgacggguccgccagcggcgugagcgagugccgcuuccugaagauccgggaggggcgcaucaucaaggagaucuuccccaccggccgggucaagcacaccgaggagugcacgugcggguucgccuccaacaagaccaucgagugcgcgugccgcgacaaccgguacaccgccaagcgccccuucgugaagcugaacguggaggccgacaccgccgagauccggcucaugugcacggacaccuaccuggacaccccgcgccccaacgacggcagcaucaccggccccugcgaguccgacggggacaagggcagcgggggcaucaagggcggguucguccaccagcggaugaaguccaagaucggccgcugguacagccggacgauguccaagaccgagcgcauggggaugggccuguacgugaaguacgacggggaccccugggccgacagcgacgcgcucgccuucuccggcgugauggucagcaugaaggagccggggugguacuccuucggcuucgagaucaaggacaagaagugcgacgugcccugcaucggcaucgagauggugcacgacgggggcaaggagaccuggcacagcgccgccaccgccaucuacugccugaugggguccggccagcugcucugggacacggucaccggcguggacauggcgcuguga

SEQ ID NO: 94361 - RNA, 1401 nt, Artificial Sequence; identical to SEQ ID NO: 94338
  derived and/or modified CDS sequence (opt1) from neuraminidase__InfluenzaB__AHZ37020

SEQ ID NO: 94362 - RNA, 1401 nt, Artificial Sequence; identical to SEQ ID NO: 94340
  derived and/or modified CDS sequence (opt1) from neuraminidase__InfluenzaB__AHZ37031

SEQ ID NO: 94363 - RNA, 1401 nt, Artificial Sequence; identical to SEQ ID NO: 94338
  derived and/or modified CDS sequence (opt1) from neuraminidase__InfluenzaB__AHZ37042

SEQ ID NO: 94364 - RNA, 1401 nt, Artificial Sequence; identical to SEQ ID NO: 94340
  derived and/or modified CDS sequence (opt1) from neuraminidase__InfluenzaB__AHZ37064

SEQ ID NO: 94365 - RNA, 1401 nt, Artificial Sequence; identical to SEQ ID NO: 94338
  derived and/or modified CDS sequence (opt1) from neuraminidase__InfluenzaB__AHZ37075

SEQ ID NO: 94366 - RNA, 1401 nt, Artificial Sequence; identical to SEQ ID NO: 94338
  derived and/or modified CDS sequence (opt1) from neuraminidase__InfluenzaB__AHZ37086

SEQ ID NO: 94367 - RNA, 1401 nt, Artificial Sequence
  derived and/or modified CDS sequence (opt1) from neuraminidase__InfluenzaB__AHZ37097
augcugcccagcaccauccagacccucacgcuguuccugaccuccggcggggugcuccugagccuguacgucuccgccagccucuccuaccugcuguacagcgacauccuccugaaguucuccccgaccgagaucaccgcccccacgaugccccuggacugcgcgaacgccagcaacgugcaggccgugaaccgcuccgccaccaagggcgucacccuccugcccccggagcccgaguggaccuacccccggcugagcugccccggguccacguuccagaaggcccuccugaucagcccgcaccgcuucggcgagaccaaggggaacuccgcgccccugaucauccgggagcccuucaucgccugcggccccaacgagugcaagcacuucgcccucacccacuacgccgcgcagccgggcggguacuacaacggcacccgcggggaccggaacaagcugcgccaccugaucagcgugaagcucggcaagauccccacgguggagaacuccaucuuccacauggccgccuggagcggguccgccugccacgacggcaaggaguggaccuacaucggcgucgacgggcccgacaacaacgcccugcugaaggugaaguacggcgaggcguacaccgacaccuaccacagcuacgccaacaagauccuccggacgcaggaguccgccugcaacugcaucgggggcaacugcuaccugaugaucaccgacggcagcgccagcgggguguccgagugccgcuuccugaagauccgggagggccgcaucaucaaggagaucuuccccaccgggcgggucaagcacaccgaggagugcacgugcggcuucgccagcaacaagaccaucgagugcgcgugccgcgacaaccgguacaccgccaagcgcccguucgugaagcucaacguggagaccgacacggccgagauccggcugaugugcaccgacaccuaccuggacacgccccgccccaacgacggguccaucaccggccccugcgagagcgacggcgacaagggguccggcgggaucaagggcggguucguccaccagcggaugaaguccaagaucggccgcugguacagccggaccaugagcaagaccgagcgcaugggcauggggcucuacgugaaguacgacggcgacccgugggccgacuccgacgcccuggcguucagcggggugauggucuccaugaaggagcccggcugguacagcuucggguucgagaugaaggacaagaagugcgacgugcccugcaucggcaucgagauggugcacgacggcgggaaggagaccuggcacuccgccgccacggccaucuacugccugaugggcagcgggcagcuccugugggacaccgucaccggcguggacauggcccuguga

SEQ ID NO: 94368 - RNA, 1401 nt, Artificial Sequence; identical to SEQ ID NO: 94338
  derived and/or modified CDS sequence (opt1) from neuraminidase__InfluenzaB__AHZ37108

SEQ ID NO: 94369 - RNA, 1401 nt, Artificial Sequence
  derived and/or modified CDS sequence (opt1) from neuraminidase__InfluenzaB__AHZ41774
augcugcccagcaccauccagaugcucacccuguuccugacguccggcggggugcuccugagccuguacgucuccgccagccucuccuaccugcuguacagcgacauccuccugaaguucuccccgaccgagaucaccgcccccaccaugccccuggacugcgcgaacgccagcaacgugcacgccgugaaccgguccgccacgaagggcgucaccuuccuccugcccgagccggaguggaccuacccccggcugagcugccccggguccaccuuccagaaggcccuccugaucagcccccaccgcuucggcgagacgaaggggaacuccgcgccgcugaucauccgggagcccuucaucgccugcggcagcaacgagugccgccacuucgcccucacccacuacgccgcgcagcccggcggguacuacaacggcacccgcggggaccggaacaagcugcggcaccugaucuccgugaagcucggcaagauccccaccguggagaacagcaucuuccacauggccgccugguccgggagcgccugccacgacggcaaggaguggacguacaucggcgucgacgggccggacaacaacgcccugcugaagaucaaguacggcgaggcguacaccgacaccuaccacuccuacgccaacaacauccuccgcacccaggagagcgccugcaacugcaucgggggcaacugcuaccugaugaucacggacggcagcgccuccggggugagcgagugccgguuccugaagauccgcgagggccggaucaucaaggagaucuuccccaccgggcgcgugaagcacaccgaggagugcacgugcggcuucgccuccaacaagaccaucgagugcgcgugccgggacaacagcuacaccgccaagcgccccuucgucaagcucaacguggagaccgacaccgccgagauccggcugaugugcacggacaccuaccuggacacgccccgcccggacgacggguccaucaccggccccugcgagagcaacggcgacaagggguccggcgggaucaagggcggguucgugcaccagcggauggccagcaagaucggccgcugguacucccggaccaugagcaagaccgagcgcaagggcauggggcucuacgucaaguacgacggcgaccccuggaccgacaacgacgcccuggcguuccgcggggugaugguguccaugaaggagcccggcugguacagcuucggguucgagaucaaggacaagaagugcgacgucccgugcaucggcaucgagauggugcacgacggcgggaaggagaccuggcacuccgccgccacggccaucuacugccugaugggcagcgggcagcuccugugggacaccgugaccggcgucgacauggcccuguga

SEQ ID NO: 94370 - RNA, 1401 nt, Artificial Sequence; identical to SEQ ID NO: 92980
  derived and/or modified CDS sequence (opt1) from neuraminidase__InfluenzaB__AHZ41785

SEQ ID NO: 94371 - RNA, 1401 nt, Artificial Sequence; identical to SEQ ID NO: 92980
  derived and/or modified CDS sequence (opt1) from neuraminidase__InfluenzaB__AHZ41796

SEQ ID NO: 94372 - RNA, 1401 nt, Artificial Sequence
  derived and/or modified CDS sequence (opt1) from neuraminidase__InfluenzaB__AHZ41807
augcugcccagcaccauccagaugcucacccuguuccugacguccggcggggugcuccugagccuguacgucuccgccagccucuccuaccugcuguacagcgacauccuccugaaguucuccccgaccgagaucaccgcccccaccaugccccuggacugcgcgaacgccagcaacgugcacgccgugaaccgcuccgccacgaagggcgucaccuuccuccugcccgagccggaguggaccuacccccggcugagcugccccggguccaccuuccagaaggcccuccugaucagcccccaccgcuucggcgagacgaaggggaacuccgcgccgcugaucauccgggagcccuucaucgccugcggccccaacgagugcaagcacuucgcccucacccacuacgccgcgcagcccggcggguacuacaacggcacccgcggggaccggaacaagcugcgccaccugaucagcgugaagcucggcaagaucccgaccguggagaacuccaucuuccacauggccgccuggagcggguccgccugccacgacggcaaggaguggacguacaucggcgucgacgggcccgacaacaacgcccugcugaagaucaaguacggcgaggcguacaccgacaccuaccacagcuacgccaacaacauccuccggacccaggaguccgccugcaacugcaucgaggggaacugcuaccugaugaucacggacggcagcgccagcggcguguccgagugccgcuuccugaagauccgggaggggcgcaucaucaaggagaucuuccccaccggccgggugaagcacaccgaggagugcacgugcggguucgccagcaacaagaccaucgagugcgcgugccgcgacaacuccuacaccgccaagcggcccuucgucaagcucaacguggagaccgacaccgccgagauccgccugaugugcacggacaccuaccuggacaccccgcggcccgacgacggcagcaucaccgggcccugcgaguccaacggcgacaagggcagcgggggcaucaagggcggguucgugcaccagcgcauggccuccaagaucgggcggugguacagccgcacgauguccaagaccgagcggaagggcaugggccucuacgucaaguacgacggggaccccuggaccgacagcgacgcccuggcguuccgcggcgugaugguguccaugaaggagccggggugguacagcuucggcuucgagaucaaggacaagaagugcgacguccccugcaucgggaucgagauggugcacgacggcggcaaggagaccuggcacuccgccgccacggccaucuacugccugauggggagcggccagcuccugugggacaccgugaccggggucgacauggcccuguga

SEQ ID NO: 94373 - RNA, 1401 nt, Artificial Sequence
  derived and/or modified CDS sequence (opt1) from neuraminidase__InfluenzaB__AHZ41818
augcugcccagcaccauccagacccucacgcuguuccugaccuccggcggggugcuccugagccuguacgucuccgccagccucuccuaccugcuguacagcgacauccuccugaaguucuccccgaccgagaucaccgcccccacgaugccccuggacugcgcgaacgccagcaacgugcaggccgugaaccgcuccgccaccaagggcgucacccuccugcugcccgagccggaguggaccuacccccggcucagcugccccggguccacguuccagaaggcccugcugaucagcccccaccgcuucggcgagaccaaggggaacuccgcgccgcucaucauccgggagcccuucaucgccugcggccccaacgagugcaagcacuucgcccugacccacuacgccgcgcagcccggcggguacuacaacggcacccgcggggaccggaacaagcugcgccaccucaucagcgugaagcugggcaagaucccgacgguggagaacuccaucuuccacauggccgccuggagcggguccgccugccacgacggcaaggaguggaccuacaucggcgucgacgggcccgacaacaacgcccugcucaaggugaaguacggcgaggcguacaccgacaccuaccacagcuacgccaacaagauccugcggacgcaggaguccgccugcaacugcaucgggggcaacugcuaccugauggugaccgacggcagcgccagcggggucuccgagugccgcuuccucaagauccgggagggccgcaucaucaaggagaucuuccccaccgggcgggugaagcacaccgaggagugcacgugcggcuucgccagcaacaagaccaucgagugcgcgugccgcgacaacuccuacaccgccaagcggcccuucgugaagcugaacgucgagaccgacacggccgagauccgccugaugugcaccgacaccuaccucgacaccccgcggcccgacgacgggagcaucacgggccccugcgaguccaacggcgacaaggggagcggcgggaucaagggcggguucgugcaccagcgcauggaguccaagaucggccggugguacagccgcaccauguccaagaccgagcggaugggcauggggcuguacgugaaguacgacggcgaccccugggccgacagcgacgcccuggucuucuccggggugauggugagcaugaaggagccgggcugguacuccuucggguucgagaucaaggacaagaagugcgacguccccugcaucggcaucgagauggugcacgacggcgggaaggagaccuggcacagcgcggccacggccaucuacugccucaugggcuccgggcagcugcugugggacaccgugaccggcgucaacauggcccucuga

SEQ ID NO: 94374 - RNA, 1401 nt, Artificial Sequence; identical to SEQ ID NO: 92980
  derived and/or modified CDS sequence (opt1) from neuraminidase__InfluenzaB__AHZ41829

SEQ ID NO: 94375 - RNA, 1401 nt, Artificial Sequence
  derived and/or modified CDS sequence (opt1) from neuraminidase__InfluenzaB__AHZ41840
augcugcccagcaccauccagaugcucacccuguuccugacguccggcggggugcuccugagccuguacgucuccgccagccucuccuaccugcuguacagcgacauccuccugaaguucuccccgaccgagaucaccgcccccaccaugccccuggacugcgcgaacgccagcaacgugcacgccgugaaccgguccgccacgaagggcgucaccuuccuccugcccgagccggaguggaccuacccccggcugagcugccccggguccaccuuccagaaggcccuccugaucagcccccaccgcuucggcgagacgaaggggaacuccgcgccgcugaucauccgggagcccuucaucgccugcggccccaacgagugccgccacuucgcccucacccacuacgccgcgcagcccggcggguacuacaacggcacccgcggggaccggaacaagcugcggcaccugaucagcgugaagcucggcaagaucccgaccguggagaacuccaucuuccacauggccgccuggagcggguccgccugccacgacggcaaggaguggacguacaucggcgucgacgggcccgacaacaacgcccugcugaagaucaaguacggcgaggcguacaccgacaccuaccacagcuacgccaacaacauccuccgcacccaggaguccgccugcaacugcaucgggggcaacugcuaccugaugaucacggacggcagcgccagcgggguguccgagugccgguuccugaagauccgcgagggccggaucaucaaggagaucuuccccaccgggcgcgugaagcacaccgaggagugcacgugcggcuucgccagcaacaagaccaucgagugcgcgugccgggacaacuccuacaccgccaagcgccccuucgucaagcucaacguggagaccgacaccgccgagauccggcugaugugcacggacaccuaccuggacaccccgcgccccgacgacgggagcaucaccggccccugcgaguccaacggcgacaaggggagcggcgggaucaagggcggguucgugcaccagcggauggccuccaagaucggccgcugguacagccggacgauguccaagaccgagcgcaagggcauggggcucuacgucaaguacgacggcgaccccuggaccgacagcgacgcccuggcguuccgcggggugaugguguccaugaaggagccgggcugguacagcuucggguucgagaucaaggacaagaagugcgacguccccugcaucggcaucgagauggugcacgacggcgggaaggagaccuggcacuccgccgccacggccaucuacugccugaugggcagcgggcagcuccugugggacaccgugaccggcgucgacauggcccuguga

SEQ ID NO: 94376 - RNA, 1401 nt, Artificial Sequence; identical to SEQ ID NO: 92980
  derived and/or modified CDS sequence (opt1) from neuraminidase__InfluenzaB__AHZ41851

SEQ ID NO: 94377 - RNA, 1401 nt, Artificial Sequence; identical to SEQ ID NO: 94226
  derived and/or modified CDS sequence (opt1) from neuraminidase__InfluenzaB__AHZ41862

SEQ ID NO: 94378 - RNA, 1401 nt, Artificial Sequence
  derived and/or modified CDS sequence (opt1) from neuraminidase__InfluenzaB__AHZ41873
augcugcccagcaccauccagacccucacgcuguuccugaccuccggcggggugcuccugagccuguacgucuccgccagccucuccuaccugcuguacagcgacauccuccugaaguucuccccgaccgagaucaccgcccccacgaugccccuggacugcgcgaacgccagcaacgcccaggccgugaaccgcuccgccaccaagggcgugacccuccugcugcccgagccggaguggaccuacccccggcucagcugccccggguccacguuccagaaggcgcugcugaucagcccccaccgcuucggcgagaccaaggggaacuccgccccgcucaucauccgggagcccuucaucgccugcggccccaacgagugcaagcacuucgcccugacccacuacgcggcccagcccggcggguacuacaacggcacccgcggggaccggaacaagcugcgccaccucaucagcgucaagcugggcaagaucccgacgguggagaacuccaucuuccacauggccgccuggagcggguccgccugccacgacggcaaggaguggaccuacaucggcguggacgggcccgacaacaacgcgcugcucaaggucaaguacggcgaggccuacaccgacaccuaccacagcuacgccaacaagauccugcggacgcaggaguccgccugcaacugcaucgggggcaacugcuaccugaugaucaccgacggcagcgccagcgggguguccgagugccgcuuccucaagauccgggagggccgcaucaucaaggagaucuuccccaccgggcgggugaagcacaccgaggagugcacgugcggcuucgcgagcaacaagaccaucgagugcgccugccgcgacaaccgguacaccgccaagcgccccuucgucaagcugaacguggagaccgacacggccgagauccggcugaugugcaccgacaccuaccucgacaccccgcgccccaacgacggguccaucacgggccccugcgagagcgacggcgacaagggguccggcgggaucaagggcggguucgugcaccagcggaugaaguccaagaucggccgcugguacagccggaccaugagcaagaccgagcgcaugggcauggggcuguacgucaaguacgacggcgaccccugggccgacuccgacgcgcugaccuucagcggggugaugguguccaugaaggagccgggcugguacagcuucggguucgagaucaaggacaagaagugcgacguccccugcaucggcaucgagauggugcacgacggcgggaaggagacguggcacuccgccgccaccgccaucuacugccucaugggcagcgggcagcugcugugggacaccgugaccggcgucgacauggcccucuga

SEQ ID NO: 94379 - RNA, 1401 nt, Artificial Sequence; identical to SEQ ID NO: 92816
  derived and/or modified CDS sequence (opt1) from neuraminidase__InfluenzaB__AIL94981

SEQ ID NO: 94380 - RNA, 1401 nt, Artificial Sequence; identical to SEQ ID NO: 92816
  derived and/or modified CDS sequence (opt1) from neuraminidase__InfluenzaB__AIL94992

SEQ ID NO: 94381 - RNA, 1401 nt, Artificial Sequence; identical to SEQ ID NO: 92841
  derived and/or modified CDS sequence (opt1) from neuraminidase__InfluenzaB__AIL95003

SEQ ID NO: 94382 - RNA, 1401 nt, Artificial Sequence
  derived and/or modified CDS sequence (opt1) from neuraminidase__InfluenzaB__AIL95014
augcugcccagcaccauccagacccucacgcuguuccugaccuccggcggggugcuccugagccuguacgucuccgccagccucuccuaccugcuguacagcgacauccuccugaaguucucccagaccgagaucaccgccccgaucaugccccuggacugcgcgaacgccagcaacgugcaggccgugaaccgcuccgccgccaagggcgucacgcuccugcugcccgagcccgaguggaccuacccgcggcucagcugccccggguccaccuuccagaaggcgcugcugaucagcccccaccgcuucggcgagaccaaggggaacuccgcgccccucaucauccgggagccguucaucgccugcggccccacggagugcaagcacuucgcccugacccacuacgccgcccagcccggcggguacuacaacggcacccgcgaggaccggaacaagcugcgccaccucaucagcgugaagcuggggaagauccccaccguggagaacuccaucuuccacauggccgccuggagcggcuccgccugccacgacgggaaggaguggacguacaucggcgucgacggcccggacagcaacgcgcugcucaagaucaaguacggggaggccuacaccgacaccuaccacuccuacgccaagaacauccugcggacccaggagagcgccugcaacugcaucggcggggacugcuaccugaugaucacggacggccccgccagcggcguguccgagugccgcuuccucaagauccgggaggggcgcaucaucaaggagaucuuccccaccggccgggugaagcacaccgaggagugcacgugcggguucgcgagcaacaagaccaucgagugcgccugccgcgacaacuccuacaccgccaagcggcccuucgucaagcugaacguggagaccgacaccgccgagauccgccugaugugcacggagaccuaccucgacaccccgcggcccaacgacggcagcaucaccgggcccugcgaguccgacggcgacaagggcagcgggggcaucaagggcggguucgugcaccagcgcauggccuccaagaucgggcggugguacagccgcacgauguccaagaccaagcggaugggcaugggccuguacgucaaguacgacggggaccccuggaccgacagcgaggcgcuggcccucuccggcgugauggugagcauggaggagccggggugguacuccuucggcuucgagaucaaggacaagaagugcgacguccccugcaucgggaucgagauggugcacgacggcggcaagaccacguggcacagcgccgccaccgccaucuacugccugaugggguccggccagcugcucugggacaccgugaccggggucgacaugacgcuguga

SEQ ID NO: 94383 - RNA, 1401 nt, Artificial Sequence; identical to SEQ ID NO: 92841
  derived and/or modified CDS sequence (opt1) from neuraminidase__InfluenzaB__AIL95025

SEQ ID NO: 94384 - RNA, 1401 nt, Artificial Sequence
  derived and/or modified CDS sequence (opt1) from neuraminidase__InfluenzaB__AIL95036
augcugagcuccaccauccagacccucacgcuguuccugaccagcggcggggugcuccugucccuguacgucagcgccucccucagcuaccugcuguacuccgacauccuccugaaguucagccccaaggagaucaccgccccgaccaugccccuggacugcgcgaacgccuccaacgugcaggccgugaaccacagcgccacgaagggcgucacccuccugcugcccgagcccgaguggaccuacccgcgccucuccugccccgggagcaccuuccagaaggcccugcugaucagcccccaccgguucggcgagacgaaggggaacuccgcgccccucaucauccgcgagccguucaucgccugcggccccaacgagugcaagcacuucgcccugacccacuacgccgcgcagcccggcggguacuacaacggcacccgcggggaccggaacaagcugcggcaccucaucuccgugaagcugggcaagauccccaccguggagaacagcaucuuccacauggccgccugguccgggagcgccugccacgacggcaaggaguggacguacaucggcgucgacgggccggacaacaacgcccugcucaaggugaaguacggcgaggcguacaccgacaccuaccacuccuacgccaacaagauccugcgcacccaggagagcgccugcaacugcaucgggggcaacugcuaccugaugaucacggacggcagcgccuccggggugagcgagugccgguuccucaagauccgcgagggccggaucaucaaggagaucuuccccaccgggcgcgucaagcacaccgaggagugcacgugcggcuucgccuccaacaagaccaucgagugcgcgugccgggacaacagcuacaccgccaagcgccccuucgugaagcugaacguggagaccgacaccgccgagauccggcugaugugcacggacaccuaccucgacacgccccgcccggacgacggguccaucaccggccccugcgagagcaacggcgacaagggguccggcgggaucaagggcggguucguccaccagcggauggagagcaagaucggccgcugguacucccggaccaugagcaagaccgagcgcaugggcauggggcuguacgugaaguacgacggcgaccccugggccgacuccgacgcccuggcguucagcggggugauggucuccaugaaggagcccggcugguacagcuucggguucgagaucaaggacaagaagugcgacgugccgugcaucggcaucgagauggugcacgacggcgggaaggagaccuggcacuccgccgccaccgccaucuacugccucaugggcagcgggcagcugcugugggacacggucaccggcguggacauggcccucuga

SEQ ID NO: 94385 - RNA, 1401 nt, Artificial Sequence; identical to SEQ ID NO: 92841
  derived and/or modified CDS sequence (opt1) from neuraminidase__InfluenzaB__AIL95047

SEQ ID NO: 94386 - RNA, 1401 nt, Artificial Sequence; identical to SEQ ID NO: 92950
  derived and/or modified CDS sequence (opt1) from neuraminidase__InfluenzaB__AIL95058

SEQ ID NO: 94387 - RNA, 1401 nt, Artificial Sequence; identical to SEQ ID NO: 92899
  derived and/or modified CDS sequence (opt1) from neuraminidase__InfluenzaB__AIL95069

SEQ ID NO: 94388 - RNA, 1401 nt, Artificial Sequence
  derived and/or modified CDS sequence (opt1) from neuraminidase__InfluenzaB__AIL95080
augcugcccagcaccauccagacccucacgcuguuccugaccuccggcggggugcuccugagccuguacgucuccgccagccucuccuaccugcuguacagcgacauccuccugaaguucuccccgaaggagaucaccgcccccaccaugccccuggacugcgcgaacgccagcaacgugcaggccgugaaccacuccgccacgaagggcgucacccuccugcugcccgagccggaguggaccuacccccgccucagcugccccggguccaccuuccagaaggcccugcugaucagcccccaccgguucggcgagacgaaggggaacuccgcgccgcucaucauccgcgagcccuucaucgccugcggccccaacgagugcaagcacuucgcccugacccacuacgccgcgcagcccggcggguacuacaacggcacccgcggggaccggaacaagcugcggcaccucaucagcgugaagcugggcaagaucccgaccguggagaacuccaucuuccacauggccgccuggagcggguccgccugcaacgacggcaaggaguggacguacaucggcgucgacgggcccgacaacaacgcccugcucaaggugaaguacggcgaggcguacaccgacaccuaccacagcuacgccaacaagauccugcgcacccaggaguccgccugcaacugcaucgggggcaacugcuaccugaugaucacggacggcagcgccagcgggguguccgagugccgguuccucaagauccgcgagggccggaucaucaaggagaucuuccccaccgggcgcgucaagcacaccgaggagugcacgugcggcuucgccagcaacaagaccaucgagugcgcgugccgggacaacuccuacaccgccaagcgccccuucgugaagcugaacguggagaccgacaccgccgagauccggcugaugugcacggacaccuaccucgacaccccgcgccccgacgacgggagcaucaccggccccugcgaguccaacggcgacaaggggagcggcgggaucaagggcggguucguccaccagcggauggaguccaagaucggccgcugguacagccggacgauguccaagaccgagcgcaugggcauggggcuguacgugaaguacgacggcgaccccugggccgacagcgacgcccuggcguucuccggggugauggucagcaugaaggagccgggcugguacuccuucggguucgagaucaaggacaagaagugcgacgugcccugcaucggcaucgagauggugcacgacggcgggaaggagaccuggcacagcgccgccaccgccaucuacugccucaugggcuccgggcagcugcugugggacacggucaccggcguggacauggcccucuga

SEQ ID NO: 94389 - RNA, 1401 nt, Artificial Sequence; identical to SEQ ID NO: 92899
  derived and/or modified CDS sequence (opt1) from neuraminidase__InfluenzaB__AIL95091

SEQ ID NO: 94390 - RNA, 1401 nt, Artificial Sequence; identical to SEQ ID NO: 92841
  derived and/or modified CDS sequence (opt1) from neuraminidase__InfluenzaB__AIL95102

SEQ ID NO: 94391 - RNA, 1401 nt, Artificial Sequence
  derived and/or modified CDS sequence (opt1) from neuraminidase__InfluenzaB__AIL95113
augcugcccagcaccauccagacccucacgcuguuccugaccuccggcggggugcuccugagccuguacgucuccgccagccucuccuaccugcuguacagcgacauccuccugaaguucuccccgaccggcaucaccgcccccacgaugccccuggacugcgcgaacgccagcaacgugcaggccgugaaccgcuccgccaccaagggggucacccuccugcccccggagcccgaguggaccuacccccggcugagcugccccggcuccacguuccagaaggcccuccugaucagcccgcaccgcuucggggagaccaagggcaacuccgcgccccugaucauccgggagcccuucaucgccugcggccccaacgagugcaagcacuucgcccucacccacuacgccgcgcagcccgggggcuacuacaacgggacccgcggcgaccggaacaagcugcgccaccugaucagcgugaagcucgggaagauccccacgguggagaacuccaucuuccacauggccgccuggagcggcuccgccugccacgacggcaaggaguggaccuacaucggggucgacggccccgacaacaacgcccugcugaaggugaaguacggggaggcguacaccgacaccuaccacagcuacgccaacaagauccuccggacgcaggaguccgccugcaacugcaucggcggcaacugcuaccugaugaucaccgacgggagcgccagcggcguguccgagugccgcuuccugaagauccgggaggggcgcaucaucaaggagaucuuccccaccggccgggucaagcacaccgaggagugcacgugcggguucgccagcaacaagaccaucgagugcgcgugccgcgacaaccgguacaccgccaagcgcccguucgugaagcucaacguggagaccgacacggccgagauccggcugaugugcaccgacaccuaccuggacaccccgcgccccaacgacggcuccaucacgggccccugcgagagcgacggggacaagggcuccgggggcaucaagggcggguucguccaccagcggaugaaguccaagaucggccgcugguacagccggaccaugagcaagaccgagcgcauggggaugggccucuacgugaaguacgacggggacccgugggccgacuccgacgcccuggcguucagcggcgugauggucuccaugaaggagcccgggugguacagcuucggcuucgagaugaaggacaagaagugcgacgugcccugcaucggcaucgagauggugcacgacgggggcaaggagaccuggcacuccgccgccacggccaucuacugccugauggggagcggccagcuccugugggacaccgucaccggcguggacauggcccuguga

SEQ ID NO: 94392 - RNA, 1401 nt, Artificial Sequence; identical to SEQ ID NO: 94338
  derived and/or modified CDS sequence (opt1) from neuraminidase__InfluenzaB__AIL95124

SEQ ID NO: 94393 - RNA, 1401 nt, Artificial Sequence
  derived and/or modified CDS sequence (opt1) from neuraminidase__InfluenzaB__AKA54777
augcugcccagcaccauccagacccucacgcuguuccugaccuccggcggggugcuccugagccuguacgucuccgccagccucuccuaccugcuguacagcgacauccuccugaaguucucccgcaccgaggugaccgccccgaucaugccccuggacugcgcgaacgccagcaacgugcaggccgucaaccgguccgccacgaagggcgugacgccccuccugcccgagccggaguggaccuacccccgccugagcugccccggguccaccuuccagaaggcccuccugaucagcccccaccgguucggcgagaccaaggggaacuccgcgccgcugaucauccgcgagcccuucaucgccugcggccccaaggagugcaagcacuucgcccucacccacuacgccgcgcagcccggcggguacuacaacggcacccgggaggaccgcaacaagcugcggcaccugaucagcgugaagcucgggaagaucccgaccgucgagaacuccaucuuccacauggccgccuggagcggcuccgccugccacgacgggcgcgaguggacguacaucggcguggacggccccgacagcaacgcccugcugaagaucaaguacggggaggcguacaccgacaccuaccacuccuacgccaagaacauccuccggacccaggagagcgccugcaacugcaucggcggggacugcuaccugaugaucacggacggccccgccagcggcaucuccgagugccgcuuccugaagauccgggaggggcgcaucaucaaggagaucuuccccaccggccgggugaagcacaccgaggagugcacgugcggguucgccagcaacaagaccaucgagugcgcgugccgcgacaacuccuacaccgccaagcggccguucgucaagcucaacguggagaccgacaccgccgagauccgccugaugugcacgaagaccuaccuggacacgccccggcccaacgacggcagcaucaccgggcccugcgaguccgacggcgacgagggcagcgggggcaucaagggcggguucgugcaccagcgcauggccuccaagaccgggcggugguacagccgcaccauguccaagaccaagcggaugggcaugggccucuacgucaaguacgacggggacccguggaccgacagcgaggcccuggcgcuguccggcgugauggugagcauggaggagcccgggugguacuccuucggcuucgagaucaaggacaagaagugcgacguccccugcaucgggaucgagauggugcacgacggcggcaagacgaccuggcacagcgccgccaccgccaucuacugccucaugggguccggccagcugcugugggacaccgugacgggggucaacaugacccucuga

SEQ ID NO: 94394 - RNA, 1401 nt, Artificial Sequence
  derived and/or modified CDS sequence (opt1) from neuraminidase__InfluenzaB__AKA54781
augcugcccagcaccauccagacccucacgcuguuccugaccuccggcggggugcuccugagccuguacgucuccgccagccucuccuaccugcuguaccucgacauccugcugaaguucccgagcaccgagaucaccgcccccacgaugccccucgacugcgcgaacgccuccaacgugcaggccgugaaccgcagcgccaccaagggcgucaccuuccugcugcccgagccggaguggaccuacccccggcucuccugccccgggagcacguuccagaaggcccugcugaucagcccccaccgcuucggcgagaccaaggggaacuccgcgccgcucaucauccgggagcccuucaucgccugcggccccaaggagugcaagcacuucgcccugacccacuacgccgcgcagcccggcggguacuacaacggcacccgcggggaccggaacaagcugcgccaccucaucuccgugaagcugggcaagaucccgacgguggagaacagcaucuuccacauggccgccugguccgggagcgccugccacgacggcaaggaguggaccuacaucggcgucgacgggcccgacaacaacgcccugcucaagaucaaguacggcgaggcguacaccgacaccuaccacuccuacgccaacaacauccugcggacgcaggagagcgccugcaacugcaucgggggcaacugcuaccugaugaucaccgacggcuccgccagcggggugagcgagugccgcuuccucaagauccgggagggccgcaucaugaaggagaucuuccccaccgggcggacccagcacacggaggagugcacgugcggcuucgccuccaacaagaccaucgagugcgugugccgcgacaacagcuacaccgcgaagcggcccuucgucaagcugaacguggagaccgacaccgccgagauccgccugaugugcaccaagaccuaccucgacacgccgcggcccgacgacggguccaucaccggccccugcgagagcaacggcgggaagggcuccgggggcaucaagggcggguucgugcaccagcgcauggccagcaagaucggccggugguacucccgcaccaugagcaagaccgagcggaaggggaugggccuguacgucaaguacaacggggaccccugggccgacuccgacgcccugacguucagcggcgugaugguguccauggaggagccggggugguacagcuucggcuucgagaucaaggacaagaagugcgacguccccugcaucggcaucgagauggugcacgacgggggcaaggagaccuggcacuccgcggccaccgccaucuacugccucauggggagcggccagcugcugugggacaccgugacgggcgucaacaugacccucuga

SEQ ID NO: 94395 - RNA, 1401 nt, Artificial Sequence
  derived and/or modified CDS sequence (opt1) from neuraminidase__InfluenzaB__AKA54783
augcugcccagcaccauccagacccucacgcuguuccugaccuccggcggggugcuccugagccuguacgucuccgccagccucuccuaccugcuguacagcgacauccuccugaaguucucccgcaccgaggugaccgccccgaucaugccccuggacugcgcgaacgccagcaacgugcaggccgucaaccgguccgccacgaagggcgugacgccccucuuccccgagccggaguggaccuacccccgccugagcugccccggguccaccuuccagaaggcccugcucaucagcccccaccgguucggcgagaccaaggggaacuccgcgccgcugaucauccgcgagcccuucaucgccugcggccccaaggagugcaagcacuucgcccugacccacuacgccgcgcagcccggcggguacuacaacggcacccgggaggaccgcaacaagcuccggcaccugaucagcgugaagcuggggaagaucccgaccgucgagaacuccaucuuccacauggccgccuggagcggcuccgccugccacgacgggcgcgaguggacguacaucggcguggacggccccgacagcaacgcccuccugaagaucaaguacggggaggcguacaccgacaccuaccacuccuacgccaagaacauccugcggacccaggagagcgccugcaacugcaucggcggggacugcuaccucaugaucacggacggccccgccagcggcaucuccgagugccgcuuccugaagauccgggaggggcgcaucaucaaggagaucuuccccaccggccgggugaagcacaccgaggagugcacgugcggguucgccagcaacaagaccaucgagugcgcgugccgcgacaacuccuacaccgccaagcggccguucgucaagcugaacguggagaccgacaccgccgagauccgccucaugugcacgaagaccuaccuggacacgccccggcccaacgacggcagcaucaccgggcccugcgaguccgacggcgacgagggcagcgggggcaucaagggcggguucgugcaccagcgcauggccuccaagaucgggcggugguacagccgcaccauguccaagaccaagcggaugggcaugggccuguacgucaaguacgacggggacccguggaccgacagcgaggcccucgcgcuguccggcgugauggugagcauggaggagcccgggugguacuccuucggcuucgagaucaaggacaagaagugcgacguccccugcaucgggaucgagauggugcacgacggcggcaagaccacguggcacagcgccgccaccgccaucuacugccugaugggguccggccagcuccugugggacaccgugaccggggucaacaugacgcuguga

SEQ ID NO: 94396 - RNA, 1401 nt, Artificial Sequence
  derived and/or modified CDS sequence (opt1) from neuraminidase__InfluenzaB__AKA54785
augcugcccagcaccauccagacccucacgcuguuccugaccuccggcggggugcuccugagccuguacgucuccgccagccucuccuaccugcuguacagcgacauccuccugaaguucucccgcaccgaggugaccgccccgaucaugccccuggacugcgcgaacgccagcaacgugcaggccgucaaccgguccgccacgaagggcgugacgccccuccugcccgagccggaguggaccuacccccgccugagcugccccggguccaccuuccagaaggcccuccugaucagcccccaccgguucggcgagaccaaggggaacuccgcgccgcugaucauccgcgagcccuucaucgccugcggccccaaggagugcaagcacuucgcccucacccacuacgccgcgcagcccggcggguacuacaacggcacccgggaggaccgcaacaagcugcggcaccugaucagcgugaagcucgggaagaucccgaccgucgagaacuccaucuuccacauggccgccuggagcggcuccgccugccacgacgggcgcgaguggacguacaucggcguggacggccccgacagcaacgcccugcugaagaucaaguacggggaggcguacaccgacaccuaccacuccuacgccaagaacauccuccggacccaggagagcgccugcaacugcaucggcggggacugcuaccugaugaucacggacggccccgccagcggcaucuccgagugccgcuuccugaagauccgggaggggcgcaucaucaaggagaucuuccccaccggccgggugaagcacaccgaggagugcacgugcggguucgccagcaacaagaccaucgagugcgcgugccgcgacaacuccuacaccgccaagcggccguucgucaagcucaacguggagaccgacaccgccgagauccgccugaugugcacgaagaccuaccuggacacgccccggcccaacgacggcagcaucaccgggcccugcgaguccgacggcaacgagggcagcgggggcaucaagggcggguucgugcaccagcgcauggccuccaagaucgggcggugguacagccgcaccauguccaagaccaagcggaugggcaugggccucuacgucaaguacgacggggacccguggaccgacagcgaggcccuggcgcuguccggcgugauggugagcauggaggagcccgggugguacuccuucggcuucgagaucaaggacaagaagugcgacguccccugcaucgggaucgagauggugcacgacggcggcaagaccacguggcacagcgccgccaccgccaucuacugccucaugggguccggccagcugcugugggacaccgugaccggggucaacaugacgcucuga

SEQ ID NO: 94397 - RNA, 1401 nt, Artificial Sequence
  derived and/or modified CDS sequence (opt1) from neuraminidase__InfluenzaB__AKA54787
augcugcccagcaccauccagacccucacgcuguuccugaccuccggcggggugcuccugagccuguacgucuccgccagccucuccuaccugcuguacagcgacauccuccugaaguucucccagaccgagaucaccgccccgaucaugccccuggacugcgcgaacgccagcaacgugcaggccgugaaccacuccgccgccaagggcgucacgcuccugcugcccgagcccgaguggaccuacccgcgccucagcugccccggguccaccuuccagaaggcgcugcugaucagcccccaccgguucggcgagaucaaggggaacuccgcgccccucaucauccgcgagccguucaucgccugcggccccaccgagugcaagcacuucgcccugacgcacuacgccgcccagcccggcggguacuacaacggcacccgggaggaccgcaacaagcugcggcaccucaucagcgugaagcuggggaagauccccaccguggagaacuccaucuuccacauggccgccuggagcggcuccgccugccacgacgggaaggaguggaccuacaucggcgucgacggcccggacagcaacgcgcugcucaagaucaaguacggggaggccuacacggacaccuaccacuccuacgccaagaacauccugcgcacccaggagagcgccugcaacugcaucggcggggacugcuaccugaugaucaccgacggccccgccagcggcguguccgagugccgguuccucaagauccgcgaggggcggaucaucaaggagaucuuccccacgggccgcgugaagcacaccgaggagugcacgugcggguucgcgagcaacaagaccaucgagugcgccugccgggacaaccgcuacaccgccaagcggcccuucgucaagcugaacguggagaccgacaccgccgagauccgccugaugugcaccgagacguaccucgacaccccgcggcccaacgacggcuccaucaccgggcccugcgagagcgacggcgacaagggcuccgggggcaucaagggcggguucgugcaccagcgcauggccagcaagaucgggcggugguacucccgcaccaugagcaagacgaagcggaugggcaugggccuguacgucaaguacgacggggaccccuggaccgacuccgaggcgcuggcccucagcggcgugaugguguccauggaggagccggggugguacagcuucggcuucgagaucaaggacaagaagugcgacguccccugcaucgggaucgagauggugcacgacggcggcaagaccaccuggcacuccgccgccacggccaucuacugccugauggggagcggccagcugcucugggacaccgugaccggggucgacauggcgcuguga

SEQ ID NO: 94398 - RNA, 1401 nt, Artificial Sequence
  derived and/or modified CDS sequence (opt1) from neuraminidase__InfluenzaB__AKA54789
augcugcccagcaccauccagacccucacgcuguuccugaccuccggcggggugcuccugagccuguacgucuccgccagccucuccuaccugcuguacagcgacauccuccugaaguucucccgcaccgaggugaccgccccgaucaugccccuggacugcgcgaacgccagcaacgugcaggccgucaaccgguccgccacgaagggcgugacgccccuccugcccgagccggaguggaccuacccccgccugagcugccccggguccaccuuccagaaggcccuccugaucagcccccaccgguucggcgagaccaaggggaacuccgcgccgcugaucauccgcgagcccuucaucgccugcggccccaaggagugcaagcacuucgcccucacccacuacgccgcgcagcccggcggguacuacaacggcacccgggaggaccgcaacaagcugcggcaccugaucagcgugaagcucgggaagaucccgaccgucgagaacuccaucuuccacauggccgccuggagcggcuccgccugccacgacgggcgcgaguggacguacaucggcguggacggccccgacagcaacgcccugcugaagaucaaguacggggaggcguacaccgacaccuaccacuccuacgccaagaacauccuccggacccaggagagcgccugcaacugcaucggcggggacugcuaccugaugaucacggacggccccgccagcggcaucuccgagugccgcuuccugaagauccgggaggggcgcaucaucaaggagaucuuccccaccggccgggugaagcacaccgaggagugcacgugcggguucgccagcaacaagaccaucgagugcgcgugccgcgacaacuccuacaccgccaagcggccguucgucaagcucaacguggagaccgacaccgccgagauccgccugaugugcacgaagaccuaccuggacacgccccggcccaacgacggcagcaucaccgggcccugcgaguccgacggcgacgagggcagcgggggcaucaagggcggguucgugcaccagcgcauggccuccaagaucgggcggugguacagccgcaccauguccaagaccaagcggaugggcaugggccucuacgucaaguacgacggggacccguggaccgacagcgaggcccuggcgcuguccggcgugauggugagcauggaggagcccgggugguacuccuucggcuucgagaucaaggacaagaagugcgacguccccugcaucgggaucgagauggugcacgacggcggcaagaccacguggcacagcgccgccaccgccaucuacugccucaugggguccggccagcugcugugggacaccgugaccggggucaacaugacgcucuga

SEQ ID NO: 94399 - RNA, 1401 nt, Artificial Sequence
  derived and/or modified CDS sequence (opt1) from neuraminidase__InfluenzaB__AKA54791
augcugcccagcaccauccagacccucacgcuguuccugaccuccggcggggugcuccugagccuguacgucuccgccagccucuccuaccugcuguacagcgacauccuccugaaguucucccgcaccgaggugaccgccccgaucaugccccuggacugcgcgaacgccagcaacgcccaggccgugaaccgguccgccacgaagggcgucacgccccuccugcccgagccggaguggaccuacccccgccugagcugccccggguccaccuuccagaaggcgcuccugaucagcccccaccgguucggcgagaccaaggggaacuccgccccgcugaucauccgcgagcccuucaucgccugcggccccaaggagugcaagcacuucgcccucacccacuacgcggcccagcccggcggguacuacaacggcacccgggaggaccgcaacaagcugcggcaccugaucagcgugaagcucgggaagaucccgaccguggagaacuccaucuuccacauggccgccuggagcggcuccgccugccacgacgggcgcgaguggacguacaucggcgucgacggccccgacagcaacgcgcugcugaagaucaaguacggggaggccuacaccgacaccuaccacuccuacgccaagaacauccuccggacccaggagagcgccugcaacugcaucggcggggacugcuaccugaugaucacggacggccccgccagcggcaucuccgagugccgcuuccugaagauccgggaggggcgcaucaucaaggagaucuuccccaccggccgggugaagcacaccgaggagugcacgugcggguucgcgagcaacaagaccaucgagugcgccugccgcgacaacuccuacaccgccaagcggccguucgugaagcucaacgucgagaccgacaccgccgagauccgccugaugugcacgaagaccuaccuggacacgccccggcccaacgacggcagcaucaccgggcccugcgaguccgacggcgacgagggcagcgggggcaucaagggcggguucgugcaccagcgcauggccuccaagaucgggcggugguacagccgcaccauguccaagaccaagcggaugggcaugggccucuacgugaaguacgacggggacccguggaccgacagcgaggcgcuggcccuguccggcgucauggugagcauggaggagcccgggugguacuccuucggcuucgagaucaaggacaagaagugcgacgugcccugcaucgggaucgagaugguccacgacggcggcaagaccacguggcacagcgccgccaccgccaucuacugccucaugggguccggccagcugcugugggacaccgugaccggggugaacaucacgcucuga

SEQ ID NO: 94400 - RNA, 1401 nt, Artificial Sequence; identical to SEQ ID NO: 94397
  derived and/or modified CDS sequence (opt1) from neuraminidase__InfluenzaB__AKA54793

SEQ ID NO: 94401 - RNA, 1401 nt, Artificial Sequence; identical to SEQ ID NO: 94397
  derived and/or modified CDS sequence (opt1) from neuraminidase__InfluenzaB__AKA54795

SEQ ID NO: 94402 - RNA, 1401 nt, Artificial Sequence; identical to SEQ ID NO: 94398
  derived and/or modified CDS sequence (opt1) from neuraminidase__InfluenzaB__AKA54797

SEQ ID NO: 94403 - RNA, 1401 nt, Artificial Sequence
  derived and/or modified CDS sequence (opt1) from neuraminidase__InfluenzaB__AKA54799
augcugcccagcaccauccagacccucacgcuguuccugaccuccggcggggugcuccugagccuguacgucuccgccagccucuccuaccugcuguacagcgacauccuccugaaguucucccagaccgagaucaccgccccgaucaugccccuggacugcgcgaacgccagcaacgugcaggccgugaaccacuccgccgccaagggcgucacgcuccugcugcccgagcccgaguggaccuacccgcgccucagcugccccggguccaccuuccagaaggcgcugcugaucagcccccaccgguucggcgagaucaaggggaacuccgcgccccucaucauccgcgagccguucaucgccugcggccccaccgagugcaagcacuucgcccugacgcacuacgccgcccagcccggcggguacuacaacggcacccgggaggaccgcaacaagcugcggcaccucaucagcgugaagcuggggaagauccccaccguggagaacuccaucuuccacauggccgccuggagcggcuccgccugccacgacgggaaggaguggaccuacaucggcgucgacggcccggacagcaacgcgcugcucaagaucaaguacggggaggccuacacggacaccuaccacuccuacgagaagaacauccugcgcacccaggagagcgccugcaacugcaucggcggggacugcuaccugaugaucaccgacggccccgccagcggcguguccgagugccgguuccucaagauccgcgaggggcggaucaucaaggagaucuuccccacgggccgcgugaagcacaccgaggagugcacgugcggguucgccagcaacaagaccaucgagugcgcgugccgggacaaccgcuacaccgccaagcggcccuucgucaagcugaacguggagaccgacaccgccgagauccgccugaugugcaccgagacguaccucgacaccccgcggcccaacgacggcuccaucaccgggcccugcgagagcgacggcgacaagggcuccgggggcaucaagggcggguucgugcaccagcgcauggccagcaagaucgggcggugguacucccgcaccaugagcaagacgaagcggaugggcaugggccuguacgucaaguacgacggggaccccuggaccgacuccgaggcccuggcgcucagcggcgugaugguguccauggaggagccggggugguacagcuucggcuucgagaucaaggacaagaagugcgacguccccugcaucgggaucgagauggugcacgacggcggcaagaccaccuggcacuccgccgccacggccaucuacugccugauggggagcggccagcugcucugggacaccgugaccggggucgacauggcccuguga

SEQ ID NO: 94404 - RNA, 1401 nt, Artificial Sequence; identical to SEQ ID NO: 94398
  derived and/or modified CDS sequence (opt1) from neuraminidase__InfluenzaB__AKA54801

SEQ ID NO: 94405 - RNA, 1401 nt, Artificial Sequence
  derived and/or modified CDS sequence (opt1) from neuraminidase__InfluenzaB__AKA54803
augcugcccagcaccauccagacccucacgcuguuccugaccuccggcggggugcuccugagccuguacgucuccgccagccucuccuaccugcuguacagcgacauccuccugaaguucucccgcaccgaggugaccgccccgaucaugccccuggacugcgcgaacgccagcaacgugcaggccgucaaccgguccgccacgaacggcgugacgccccuccugcccgagccggaguggaccuacccccgccugagcugccccggguccaccuuccagaaggcccuccugaucagcccccaccgguucggcgagaccaaggggaacuccgcgccgcugaucauccgcgagcccuucaucgccugcggccccaaggagugcaagcacuucgcccucacccacuacgccgcgcagcccggcggguacuacaacggcacccgggaggaccgcaacaagcugcggcaccugaucagcgugaagcucgggaagaucccgaccgucgagaacuccaucuuccacauggccgccuggagcggcuccgccugccacgacgggcgcgaguggacguacaucggcguggacggccccgacagcaacgcccugcugaagaucaaguacggggaggcguacaccgacaccuaccacuccuacgccaagaacauccuccggacccaggagagcgccugcaacugcaucggcggggacugcuaccugaugaucacggacggccccgccagcggcaucuccgagugccgcuuccugaagauccgggaggggcgcaucaucaaggagaucuuccccaccggccgggugaagcacaccgaggagugcacgugcggguucgccagcaacaagaccaucgagugcgcgugccgcgacaacuccuacaccgccaagcggccguucgucaagcucaacguggagaccgacaccgccgagauccgccugaugugcacgaagaccuaccuggacacgccccggcccaacgacggcagcaucaccgggcccugcgaguccgacggcgacgagggcagcgggggcaucaagggcggguucgugcaccagcgcauggccuccaagaucgggcggugguacagccgcaccauguccaagaccaagcggaugggcaugggccucuacgucaaguacgacggggacccguggaccgacagcgaggcccuggcgcuguccggcgugauggugagcauggaggagcccgggugguacuccuucggcuucgagaucaaggacaagaagugcgacguccccugcaucgggaucgagauggugcacgacggcggcaagaccacguggcacagcgccgccaccgccaucuacugccucaugggguccggccagcugcugugggacaccgugaccggggucaacaugacgcucuga

SEQ ID NO: 94406 - RNA, 1401 nt, Artificial Sequence; identical to SEQ ID NO: 94398
  derived and/or modified CDS sequence (opt1) from neuraminidase__InfluenzaB__AKA54805

SEQ ID NO: 94407 - RNA, 1401 nt, Artificial Sequence
  derived and/or modified CDS sequence (opt1) from neuraminidase__InfluenzaB__AKA54807
augcugcccagcaccauccagacccucacgcuguuccugaccuccggcggggugcuccugagccuguacgucuccgccagccucuccuaccugcuguacagcgacauccuccugaaguucucccgcaccgaggugaccgccccgaucaugccccuggacugcgcgaacgccagcaacgugcaggccgucaaccgguccgccacgaagggcgugacgccccuccugcccgagccggaguggaccuacccccgccugagcugccccggguccaccuuccagaaggcccuccugaucagcccccaccgguucggcgagaccaaggggaacuccgcgccgcugaucauccgcgagcccuucaucgccugcggccccaaggagugcaagcacuucgcccucacccacuacgccgcgcagcccggcggguacuacaacggcacccgggaggaccgcaacaagcugcggcaccugaucagcgugaagcucgggaagaucccgaccgucgagaacuccaucuuccacauggccgccuggagcggcuccgccugccacgacgggcgcgaguggacguacaucggcguggacggccccgacagcaacgcccugcugaagaucaaguacggggaggcguacaccgacaccuaccacuccuacgccaagaacauccuccggacccaggagagcgccugcaacugcaucggcggggacugcuaccugaugaucacggacggccccgccagcggcaucuccgagugccgcuuccugaagauccgggaggggcgcaucaucaaggagaucuuccccaccggccgggugaagcacaccgaggagugcacgugcggguucgccagcaacaagaccaucgagugcgcgugccgcgacaacuccuacaccgccaagcggccguucgucaagcucaacguggagaccgacaccgccgagauccgccugaugugcacgaagaccuaccuggacacgccccggcccaacgacggcagcaucaccgggcccugcgaguccgacggcgacgagggcagcgggggcaucaagggcggguucgugcaccagcgcauggccuccaagaucgggcggugguacagccgcaccauguccaagaccaagcggaugggcaugggccucuacgucaaguacgacggggacccguggaccgacagcgaggcccuggcgcuguccggcgugauggugagcauggaggagcccgggugguacuccuucggcuucgagaucaaggacaagaagugcgacguccccugcaucgggaucgagauggugcacgacggcggcaagaccacguggcacagcgccgccaccgccaucuacugccucaugggguccggccagcugcugugggacaccgugaccggggucaacaucacgcucuga

SEQ ID NO: 94408 - RNA, 1401 nt, Artificial Sequence
  derived and/or modified CDS sequence (opt1) from neuraminidase__InfluenzaB__AKA54809
augcugcccagcaccauccagacccucacgcuguuccugaccuccggcggggugcuccugagccuguacgucuccgccagccucuccuaccugcuguacagcgacauccuccugaaguucucccgcaccgaggugaccgccccgaucaugccccuggacugcgcgaacgccagcaacgugcaggccgucaaccgguccgccacgaagggcgugacgccccuccugcccgagccggaguggaccuacccccgccugagcugccccggguccaccuuccagaaggcccuccugaucagcccccaccgguucggcgagaccaaggggaacuccgcgccgcugaucauccgcgagcccuucaucgccugcggccccaaggagugcaagcacuucgcccucacccacuacgccgcgcagcccggcggguacuacaacggcacccgggaggaccgcaacaagcugcggcaccugaucagcgugaagcucgggaagaucccgaccgucgagaacuccaucuuccacauggccgccuggagcggcuccgccugccacgacgggcgcgaguggacguacaucggcguggacggccccgacagcaacgcccugcugaagaucaaguacggggaggcguacaccgacaccuaccacuccuacgccaagaacauccuccggacccaggagagcgccugcaacugcaucggcggggacugcuaccugaugaucacggacggccccgccagcggcaucuccgagugccgcuuccugaagauccgggaggggcgcaucaucaaggagaucuuccccaccggccgggugaagcacaccgaggagugcacgugcggguucgccagcaacaagaccaucgagugcgcgugccgcgacaacuccuacaccgccaagcggccguucgucaagcucaacguggagaccgacaccgccgagauccgccugaugugcacgaagaccuaccuggacacgccccggcccaacgacggcagcaucaccgggcccugcgaguccgacggcgacgagggcagcgggggcaucaagggcggguucgugcaccagcgcauggccuucaagaucgggcggugguacucccgcaccaugagcaagaccaagcggaugggcaugggccucuacgucaaguacgacggggacccguggaccgacuccgaggcccuggcgcugagcggcgugaugguguccauggaggagcccgggugguacagcuucggcuucgagaucaaggacaagaagugcgacguccccugcaucgggaucgagauggugcacgacggcggcaagaccacguggcacuccgccgccaccgccaucuacugccucauggggagcggccagcugcugugggacaccgugaccggggucaacaugacgcucuga

SEQ ID NO: 94409 - RNA, 1401 nt, Artificial Sequence; identical to SEQ ID NO: 94398
  derived and/or modified CDS sequence (opt1) from neuraminidase__InfluenzaB__AKA54811

SEQ ID NO: 94410 - RNA, 1401 nt, Artificial Sequence
  derived and/or modified CDS sequence (opt1) from neuraminidase__InfluenzaB__AKA54813
augcugcccagcaccauccagacccucacgcuguuccugaccuccggcggggugcuccugagccuguacgucuccgccagccucuccuaccugcuguacagcgacauccuccugaaguucucccgcaccgaggugaccgccccgaucaugccccuggacugcgcgaacgccagcaacgugcaggccgucaaccgguccgccacgaagggcgugacgccccuccugcccgagccggaguggaccuacccccgccugagcugccccggguccaccuuccagaaggcccuccugaucagcccccaccgguucggcgagaccaaggggaacuccgcgccgcugaucauccgcgagcccuucaucgccugcggccccaaggagugcaagcacuucgcccucacccacuacgccgcgcagcccggcggguacuacaacggcacccgggaggaccgcaacaagcugcggcaccugaucagcgugaagcucgggaagaucccgaccgucgagaacuccaucuuccacauggccgccuggagcggcuccgccugccacgacgggcgcgaguggacguacaucggcguggacggccccgacagcaacgcccugcugaagaucaaguacggggaggcguacaccgacaccuaccacuccuacgccaagaacauccuccggacccaggagagcgccugcaacugcaucggcggggacugcuaccugaugaucacggacggccccgccagcggcaucuccgagugccgcuuccugaagauccgggaggggcgcaucaucaaggagaucuuccccaccggccgggugaagcacaccgaggagugcacgugcggguucgccagcaacaagaccaucgagugcgcgugccgcgacaacuccuacaccgccaagcggccguucgucaagcucaacguggagaccgacaccgccgagauccgccugaugugcacgaagaccuaccuggacacgccccggcccaacgacggcagcaucaccgggcccugcgaguccgacggcgacgagggcagcgggggcaucaagggcggguucgugcaccagcgcauggccuccaagaucgggcggugguacagccgcaccauguccaagaccaagcggaugggcaugggccucuacgucaaguacgacggggacccguggaccgacagcgaggcccuggcgcuguccggcgugauggugagcaucgaggagcccgggugguacuccuucggcuucgagaucaaggacaagaagugcgacguccccugcaucgggaucgagauggugcacgacggcggcaagaccacguggcacagcgccgccaccgccaucuacugccucaugggguccggccagcugcugugggacaccgugaccggggucaacaugacgcucuga

SEQ ID NO: 94411 - RNA, 1401 nt, Artificial Sequence; identical to SEQ ID NO: 94398
  derived and/or modified CDS sequence (opt1) from neuraminidase__InfluenzaB__AKA54815

SEQ ID NO: 94412 - RNA, 1401 nt, Artificial Sequence
  derived and/or modified CDS sequence (opt1) from neuraminidase__InfluenzaB__AKA54817
augcugcccagcaccauccagacccucacgcuguuccugaccuccggcggggugcuccugagccuguacgucuccgccagccucuccuaccugcuguacagcgacauccuccugaaguucucccgcaccgaggugaccgccccgaucaugccccuggacugcgcgaacgccagcaacgugcaggccgucaaccgguccgccacgaagggcgugacgccccuccugcccgagccggaguggaccuacccccgccugagcugccccggguccaccuuccagaaggcccuccugaucagcccccaccgguucggcgagaccaaggggaacuccgcgccgcugaucauccgcgagcccuucaucgccugcggccccaaggagugcaagcacuucgcccucacccacuacgccgcgcagcccggcggguacuacaacggcacccgggaggaccgcaacaagcugcggcaccugaucagcgugaagcucgggaagaucccgaccgucgagaacuccaucuuccacauggccgccuggagcggcuccgccugccacgacgggcgcgaguggacguacaucggcguggacggccccgacagcaacgcccugcugaagaucaaguacggggaggcguacaccgacaccuaccacuccuacgccaagaacauccuccggacccaggagagcgccugcaacugcaucggcggggacugcuaccugaugaucacggacggccccgccagcggcaucuccgagugccgcuuccugaagauccgggaggggcgcaucaucaaggagaucuuccccaccggccgggugaagcacaccgaggagugcacgugcggguucgccagcaacaagaccaucgagugcgcgugccgcgacaacuccuacaccgccaagcggccguucgucaagcucaacguggagaccgacaccgccgagauccgccugaugugcacgaagaccuaccuggacacgccccggcccaacgacggcagcaucaccgggcccugcgaguccgacggcgacgagggcagcgggggcaucaagggcggguucgugcaccagcgcauggccuccaagaucgggcggugguacagccgcaccauguccaagaccaagcggaugggcaugggccucuacgucaaguacgacggggacccguggaccgacagcgaggcccuggcgcuguccggcgugauggugagcauggaggagcccgggugguacuccuucggcuucgagaucaaggacaagaagugcgacguccccugcaucgggguggagauggugcacgacggcggcaagaccacguggcacagcgccgccaccgccaucuacugccucaugggguccggccagcugcugugggacaccgucaccggggugaacaugacgcucuga

SEQ ID NO: 94413 - RNA, 1401 nt, Artificial Sequence; identical to SEQ ID NO: 94398
  derived and/or modified CDS sequence (opt1) from neuraminidase__InfluenzaB__AKA54819

SEQ ID NO: 94414 - RNA, 1401 nt, Artificial Sequence; identical to SEQ ID NO: 94398
  derived and/or modified CDS sequence (opt1) from neuraminidase__InfluenzaB__AKA54821

SEQ ID NO: 94415 - RNA, 1401 nt, Artificial Sequence; identical to SEQ ID NO: 94398
  derived and/or modified CDS sequence (opt1) from neuraminidase__InfluenzaB__AKA54823

SEQ ID NO: 94416 - RNA, 1401 nt, Artificial Sequence; identical to SEQ ID NO: 94398
  derived and/or modified CDS sequence (opt1) from neuraminidase__InfluenzaB__AKA54825

SEQ ID NO: 94417 - RNA, 1401 nt, Artificial Sequence; identical to SEQ ID NO: 94398
  derived and/or modified CDS sequence (opt1) from neuraminidase__InfluenzaB__AKA54827

SEQ ID NO: 94418 - RNA, 1401 nt, Artificial Sequence
  derived and/or modified CDS sequence (opt1) from neuraminidase__InfluenzaB__AKA54829
augcugcccagcaccauccagacccucacgcuguuccugaccuccggcggggugcuccugagccuguacgucuccgccagccucuccuaccugcuguacagcgacauccuccugaagcugucccgcaccgaggugaccgccccgaucaugccccucgacugcgcgaacgccagcaacgugcaggccgucaaccgguccgccacgaagggcgugacgccccugcugcccgagccggaguggaccuacccccgccucagcugccccggguccaccuuccagaagacccugcugaucagcccccaccgguucggcgagaccaaggggaacuccgccccgcucaucauccgcgagcccuucaucgcgugcggccccaaggagugcaagcacuucgcccugacccacuacgccgcccagcccggcggguacuacaacggcacccgggaggaccgcaacaagcugcggcaccucaucagcgugaagcuggggaagaucccgacggucgagaacuccaucuuccacauggcggccuggagcggcuccgccugccacgacgggcgcgaguggaccuacaucggcguggacggccccgacagcaacgcccugcucaagaucaaguacggggaggccuacaccgacaccuaccacuccuacgcgaagaacauccugcggacgcaggagagcgccugcaacugcaucggcggggacugcuaccugaugaucaccgacggccccgccagcggcaucuccgagugccgcuuccucaagauccgggaggggcgcaucaucaaggagaucuuccccaccggccgggugaagcacaccgaggagugcacgugcggguucgccagcaacaagaccaucgagugcgccugccgcgacaacuccuacaccgcgaagcggccguucgucaagcugaacguggagaccgacacggccgagauccgccugaugugcaccaagaccuaccucgacacgccccggcccaacgacggcagcaucaccgggcccugcgaguccgacggcgacgagggcagcgggggcaucaagggcggguucgugcaccagcgcauggccuccaagaucgggcggugguacagccgcaccauguccaagaccaagcggaugggcaugggccuguacgucaaguacgacggggacccguggaccgacagcgaggcccuggcccucuccggcgugauggugagcauggaggagcccgggugguacuccuucggcuucgagaucaaggacaagaagugcgacguccccugcaucgggaucgagauggugcacgacggcggcaagacgaccuggcacagcgcggccaccgccaucuacugccugaugggguccggccagcugcucugggacaccgugacgggggucaacaugacccuguga

SEQ ID NO: 94419 - RNA, 1401 nt, Artificial Sequence
  derived and/or modified CDS sequence (opt1) from neuraminidase__InfluenzaB__AKA54831
augcugcccagcaccauccagacccucacgcuguuccugaccuccggcggggugcuccugagccuguacgucuccgccagccucuccuaccugcuguacagcgacauccuccugaaguucucccgcaccgaggugaccgccccgaucaugccccuggacugcgcgaacgccagcaacgugcaggccgucaaccgguccgccacgaagggcgugacgccccuccugcccgagccggaguggaccuacccccgccugagcugccccggguccaccuuccagaaggcccuccugaucagcccccaccgguucggcgagaccaaggggaacuccgcgccgcugaucauccgcgagcccuucaucgccugcggccccaaggagugcaagcacuucgcccucacccacuacgccgcgcagcccggcggguacuacaacggcacccgggaggaccgcaacaagcugcggcaccugaucagcgugaagcucgggaagaucccgaccgucgagaacuccaucuuccacauggccgccuggagcggcuccgccugccacgacgggcgcgaguggacguacaucggcguggacggccaggacagcaacgcccugcugaagaucaaguacggggaggcguacaccgacaccuaccacuccuacgccaagaacauccuccggacccaggagagcgccugcaacugcaucggcggggacugcuaccugaugaucacggacggccccgccagcggcaucuccgagugccgcuuccugaagauccgggaggggcgcaucaucaaggagaucuuccccaccggccgggugaagcacaccgaggagugcacgugcggguucgccagcaacaagaccaucgagugcgcgugccgcgacaacuccuacaccgccaagcggcccuucgucaagcucaacguggagaccgacaccgccgagauccgccugaugugcacgaagaccuaccuggacaccccgcggcccaacgacggcagcaucaccgggcccugcgaguccgacggcgacgagggcagcgggggcaucaagggcggguucgugcaccagcgcauggccuccaagaucgggcggugguacagccgcacgauguccaagaccaagcggaugggcaugggccucuacgucaaguacgacggggaccccuggaccgacagcgaggcccuggcgcuguccggcgugauggugagcauggaggagccggggugguacuccuucggcuucgagaucaaggacaagaagugcgacguccccugcaucgggaucgagauggugcacgacggcggcaagaccacguggcacagcgccgccaccgccaucuacugccucaugggguccggccagcugcugugggacaccgugaccggggucaacaugacgcucuga

SEQ ID NO: 94420 - RNA, 1401 nt, Artificial Sequence; identical to SEQ ID NO: 94398
  derived and/or modified CDS sequence (opt1) from neuraminidase__InfluenzaB__AKA54833

SEQ ID NO: 94421 - RNA, 1401 nt, Artificial Sequence
  derived and/or modified CDS sequence (opt1) from neuraminidase__InfluenzaB__AKA54837
augcugcccagcaccauccagacccucacgcuguuccugaccuccggcggggugcuccugagccuguacgucuccgccagccucuccuaccugcuguacagcgacauccuccugaaguucuccccgaccgagaucaccgcccccacgaugccccuggacugcgcgaacgccagcaacgugcaggccgugaaccgcuccgccaccaagggcgucacccuccugcugcccgagccggaguggaccuacccccggcucagcugccccggguccacguuccagaaggcccugcugaucagcccccaccgcuucggcgagaccaacgggaacuccgcgccgcucaucgugcgggagcccuucaucgccugcggccccaacgagugcaagcacuucgcccugacccacuacgccgcgcagcccggcggguacuacaacggcacccgcggggaccggaacaagcugcgccaccucaucagcgugaagcugggcaagaucccgacggucgagaacuccaucuuccacauggccgccuggagcggguccgccugccacgacggcaaggaguggaccuacaucggcguggacgggcccgacaacaacgcccugcucaaggugaaguacggcgaggcguacaccgacaccuaccacagcuacgccaacaagauccugcggacgcaggaguccgccugcaacugcaucgggggcaacugcuaccugaugaucaccgacggcagcgccagcggggucuccgagugccgcuuccucaagauccgggagggccgcaucaucaaggagaucuuccccaccgggcgggugaagcacaccgaggagugcacgugcggcuucgccagcaacaagaccaucgagugcgcgugccgcgacaaccgguacaccgccaagcgccccuucgugaagcugaacgucgagaccgacacggccgagauccggcugaugugcaccgacaccuaccucgacaccccgcgccccaacgacggguccaucacgggccccugcgagagcgacggcaacgagggguccggcgggaucaagggcggguucgugcaccagcggaugaaguccaagaucggccgcugguacagccggaccaugagcaagaccgagcgcaugggcauggggcuguacgugaaguacgacggcgaccccugggccgacuccgacgcccuggcguucagcggggucaugguguccaugaaggagccgggcugguacagcuucggguucgagaucaaggacaagaagugcgacgugcccugcaucggcaucgagaugguccacgacggcgggaaggagaccuggcacuccgccgccacggccaucuacugccucaugggcagcgggcagcugcugugggacaccgugaccggcguggacauggcccucuga

SEQ ID NO: 94422 - RNA, 1401 nt, Artificial Sequence
  derived and/or modified CDS sequence (opt1) from neuraminidase__InfluenzaB__AKA54839
augcugcccagcaccauccagacccucacgcuguuccugaccuccggcggggugcuccugagccuguacgucuccgccagccucuccuaccugcuguacagcgacauccuccugaaguucuccccgaccgagaucaccgcccccacgaugccccuggacugcgcgaacgccagcaacgugcaggccgugaaccgcuccgccaccaaggaggucacccuccugcugcccgagccggaguggaccuacccccggcucagcugccccggcuccacguuccagaaggcccugcugaucagcccccaccgcuucggggagaccaagggcaacuccgcgccgcucaucauccgggagcccuucaucgccugcgggcccaacgagugcaagcacuucgcccugacccacuacgccgcgcagcccggcggcuacuacaacgggacccgcggcgaccggaacaagcugcgccaccucaucagcgugaagcuggggaagaucccgacgguggagaacuccaucuuccacauggccgccuggagcggcuccgccugccacgacgggaaggaguggaccuacaucggcgucgacggccccgacaacaacgcccugcucaaggugaaguacggggaggcguacaccgacaccuaccacagcuacgccaacaagauccugcggacgcaggaguccgccugcaacugcaucggcgggaacugcuaccugaugaucaccgacggcagcgccagcggcguguccgagugccgcuuccucaagauccgggaggggcgcaucaucaaggagaucuuccccaccggccgggucaagcacaccgaggagugcacgugcggguucgccagcaacaagaccaucgagugcgcgugccgcgacaaccgguacaccgccaagcgccccuucgugaagcugaacguggagaccgacacggccgagauccggcugaugugcaccgacaccuaccucgacaccccgcgccccaacgacggcuccaucacggggcccugcgagagcgacggcgacaagggcuccgggggcaucaagggcggguucguccaccagcggaugaaguccaagaucgggcgcugguacagccggaccaugagcaagaccgagcgcaugggcaugggccuguacgugaaguacgacggggaccccugggccgacuccgacgcccuggcguucagcggcgugauggucuccaugaaggagccggggugguacagcuucggcuucgagaucaaggacaagaagugcgacgugcccugcaucgggaucgagauggugcacgacggcggcaaggagaccuggcacuccgccgccacggccaucuacugccucauggggagcggccagcugcugugggacaccgucaccgggguggacauggcccucuga

SEQ ID NO: 94423 - RNA, 1401 nt, Artificial Sequence
  derived and/or modified CDS sequence (opt1) from neuraminidase__InfluenzaB__AKA54841
augcugcccagcaccauccagacccucacgcuguuccugaccuccggcggggugcuccugagccuguacgucuccgccagccucuccuaccugcuguacagcgacauccuccugaaguucuccccgaccgagaucaccgcccccacgaugccccuggacugcgcgaacgccagcaacgugcaggccgugaaccgcuccgccaccaagggcgucacccuccugcugcccgagccggaguggaccuacccccggcucagcugccccggguccacguuccagaaggcccugcugaucagcccccaccgcuucggcgagaccaaggggaacuccgcgccgcucaucauccgggagcccuucaucgccugcggccccaacgagugcaagcacuucgcccugacccacuacgccgcgcagcccggcggguacuacaacggcacccgcggggaccggaacaagcugcgccaccucaucagcgugaagcugggcaagaucccgacgguggagaacuccaucuuccacauggccgccuggagcggguccgccugccacgacggcaaggaguggaccuacaucggcgucgacgggcccgacaacaacgcccugcucaaggugaaguacggcgaggcguacaccgacaccuaccacagcuacgccaacaagauccugcggacgcaggaguccgccugcaacugcaucgggggcaacugcuaccugaugaucaccgacggcagcgccagcgggguguccgagugccgcuuccucaagauccgggagggccgcaucaucaaggagaucuuccccaccgggcgggucaagcacaccgaggagugcacgugcggcuucgccagcaacaagaccaucgagugcgcgugccgcgacaaccgguacaccgccaagcgccccuucgugaagcugaacguggagaccgacacggccgagauccggcugaugugcaccgacaccuaccucgacaccccgcgccccaacgacggguccaucacgggccccugcgagagcgacggcgacgagggguccggcgggaucaagggcggguucguccaccagcggaugaaguccaagaucggccgcugguacagccggaccaugagcaagaccgagcgcaugggcauggggcuguacgugaaguacgacggcgaccccugggccgacuccgacgcccuggcguucagcggggugauggucuccgugaaggagccgggcugguacagcuucggguucgagaucaaggacaagaagugcgacgugcccugcaucggcaucgagaugguccacgacggcgggaaggagaccuggcacuccgccgccacggccaucuacugccucaugggcagcgggcagcugcugugggacaccgugaccggcguggacaucgcccucuga

SEQ ID NO: 94424 - RNA, 1401 nt, Artificial Sequence
  derived and/or modified CDS sequence (opt1) from neuraminidase__InfluenzaB__AKA54843
augcugcccagcaccauccagacccucacgcuguuccugaccuccggcggggugcuccugagccuguacgucuccgccagccucuccuaccugcuguacagcgacauccuccugaaguucuccccgaccgagaucaccgcccccacgaugccccuggacugcgcgaacgccagcaacgugcaggccgugaaccgcuccgccaccaagggcgucacccuccugcugcccgagccggaguggaccuacccccggcucagcugccccggguccacguuccagaaggcccugcugaucagcccccaccgcuucggcgagaccaaggggaacuccgcgccgcucaucauccgggagcccuucaucgccugcggccccaacgagugcaagcacuucgcccugacccacuacgccgcgcagcccggcggguacuacaacggcacccgcggggaccggaacaagcugcgccaccucaucagcgugaagcugggcaagaucccgacgguggagaacuccaucuuccacauggccgccuggagcggguccgccugccacgacggcaaggaguggaccuacaucggcgucgacgggcccgacaacaacgcccugcucaaggugaaguacggcgaggcguacaccgacaccuaccacagcuacgccaacaagauccugcggacgcaggaguccgccugcaacugcaucgggggcaacugcuaccugaugaucaccgacggcagcgccagcgggguguccgagugccgcuuccucaagauccgggagggccgcaucaucaaggagaucuuccccaccgggcgggucaagcacaccgaggagugcacgugcggcuucgccagcaacaagaccaucgagugcgcgugccgcgacaaccgguacaccgccaagcgccccuucgugaagcugaacguggagaccgacacggccgagauccggcugaugugcaccgacaccuaccucgacaccccgcgccccaacgacggguccaucacgggccccugcgagagcgacggcgacgagggguccggcgggaucaagggcggguucguccaccagcggaugaaguccaagaucggccgcugguacagccggaccaugagcaagaccgagcgcaugggcauggggcuguacgugaaguacgacggcgaccccugggccgacuccgacgcccuggcguucagcggggugauggucuccgugaaggagccgggcugguacagcuucggguucgagaucaaggacaagaagugcgacgugcccugcaucggcaucgagaugguccacgacggcgggaaggagaccuggcacuccgccgccacggccaucuacugccucaugggcagcgggcagcugcugugggacaccgugaccggcguggacauggcccucuga

SEQ ID NO: 94425 - RNA, 1401 nt, Artificial Sequence
  derived and/or modified CDS sequence (opt1) from neuraminidase__InfluenzaB__AKA54845
augcugcccagcaccauccagacccucacgcuguuccugaccuccggcggggugcuccugagccuguacgucuccgccagccucuccuaccugcuguacagcgacauccuccugaaguucuccccgaccgagaucaccgcccccacgaugccccuggacugcgcgaacgccagcaacgugcaggccgugaaccgcuccgccaccaagggcgucacccuccugcugcccgagccggaguggaccuacccccggcucagcugccccggguccacguuccagaaggcccugcugaucagcccccaccgcuucggcgagaccaacgggaacuccgcgccgcucaucauccgggagcccuucaucgccugcggccccaacgagugcaagcacuucgcccugacccacuacgccgcgcagcccggcggguacuacaacggcacccgcggggaccggaacaagcugcgccaccucaucagcgugaagcugggcaagaucccgacgguggagaacuccaucuuccacauggccgccuggagcggguccgccugccacgacggcaaggaguggaccuacaucggcgucgacgggcccgacaacaacgcccugcucaaggugaaguacggcgaggcguacaccgacaccuaccacagcuacgccaacaagauccugcggacgcaggaguccgccugcaacugcaucgggggcaacugcuaccugaugaucaccgacggcagcgccagcgggguguccgagugccgcuuccucaagauccgggagggccgcaucaucaaggagaucuuccccaccgggcgggucaagcacaccgaggagugcacgugcggcuucgccagcaacaagaccaucgagugcgcgugccgcgacaaccgguacaccgccaagcgccccuucgugaagcugaacguggagaccgacacggccgagauccggcugaugugcaccgacaccuaccucgacaccccgcgccccaacgacggguccaucacgggccccugcgagagcgacggcgacgagggguccggcgggaucaagggcggguucguccaccagcggaugaaguccaagaucggccgcugguacagccggaccaugagcaagaccgagcgcaugggcauggggcuguacgugaaguacgacggcgaccccugggccgacuccgacgcccuggcguucagcggggugauggucuccaugaaggagccgggcugguacagcuucggguucgagaucaaggacaagaagugcgacgugcccugcaucggcaucgagauggugcacgacggcgggaaggagaccuggcacuccgccgccacggccaucuacugccucaugggcagcgggcagcugcugugggacaccgucaccggcguggacauggcccucuga

SEQ ID NO: 94426 - RNA, 1401 nt, Artificial Sequence; identical to SEQ ID NO: 94230
  derived and/or modified CDS sequence (opt1) from neuraminidase__InfluenzaB__AKA54847

SEQ ID NO: 94427 - RNA, 1401 nt, Artificial Sequence
  derived and/or modified CDS sequence (opt1) from neuraminidase__InfluenzaB__AKA54849
augcugcccagcaccauccagacccucacgcuguuccugaccuccggcggggugcuccugagccuguacgucuccgccagccucuccuaccugcuguacagcgacauccuccugaaguucuccagcaccgagaucaccgccccgacgaugccccuggacugcgcgaacgccuccaacgugcaggccgugaaccgcagcgccaccaagggcgucacccuccugcugcccgagcccgaguggaccuacccgcggcucuccugccccgggagcacguuccagaaggcccugcugaucagcccccaccgcuucggcgagaccaacgggaacagcgcgccccucaucauccgggagccguucaucgccugcggccccaacgagugcaagcacuucgcccugacccacuacgccgcgcagcccggcggguacuacaacggcacccgcggggaccggaacaagcugcgccaccucaucuccgugaagcugggcaagauccccacgguggagaacagcaucuuccacauggccgccugguccgggagcgccugccacgacggcaaggaguggaccuacaucggcgucgacgggccggacaacaacgcccugcucaaggugaaguacggcgaggcguacaccgacaccuaccacuccuacgccaacaagauccugcggacgcaggagagcgccugcaacugcaucgggggcaacugcuaccugaugaucaccgacggcagcgccuccggggugagcgagugccgcuuccucaagauccgggagggccgcaucaucaaggagaucuuccccaccgggcgggucaagcacaccgaggagugcacgugcggcuucgccuccaacaagaccaucgagugcgcgugccgcgacaaccgguacaccgccaagcgccccuucgugaagcugaacguggagaccgacacggccgagauccggcugaugugcaccgacaccuaccucgacacgccccgcccgaacgacgggagcaucaccggccccugcgaguccgacggcgacgagggcggcgggggcaucaagggcggguucguccaccagcggaugaaguccaagaucgggcgcugguacucccggaccaugagcaagaccgagcgcauggggaugggccuguacgugaaguacgacggggaccccugggccgacuccgacgcccuggcguucagcggcgugauggucuccaugaaggagcccgggugguacagcuucggcuucgagaucaaggacaagaagugcgacgugccgugcaucggcaucgagauggugcacgacgggggcaaggagaccuggcacuccgccgccacggccaucuacugccucauggggagcggccagcugcugugggacaccgucaccggcguggacauggcccucuga

SEQ ID NO: 94428 - RNA, 1401 nt, Artificial Sequence
  derived and/or modified CDS sequence (opt1) from neuraminidase__InfluenzaB__AKA54851
augcugcccagcaccauccagacccucacgcuguuccugaccuccggcggggugcuccugagccuguacgucuccgccagccucuccuaccugcuguacagcgacauccuccugaaguucuccccgaccgagaucaccgcccccacgaugccccuggacugcgcgaacgccagcaacgugcaggccgugaaccgcuccgccaccaagggcgucacccuccugcugcccgagccggaguggaccuacccccggcucagcugccccggguccacguuccagaaggcccugcugaucagcccccaccgcuucggcgagaccaaggggaacuccgcgccgcucaucauccgggagcccuucaucgccugcggccccaacgagugcaagcacuucgcccugacccacuacgccgcgcagcccggcggguacuacaacggcacccgcggggaccggaacaagcugcgccaccucaucagcgugaagcugggcaagaucccgacgguggagaacuccaucuuccacauggccgccuggagcggguccgccugccacgacggcaaggaguggaccuacaucggcgucgacgggcccgacaacaacgcccugcucaaggugaaguacggcgaggcguacaucgacaccuaccacagcuacgccaacaagauccugcggacccaggaguccgccugcaacugcaucgggggcaacugcuaccugaugaucacggacggcagcgccagcgggguguccgagugccgcuuccucaagauccgggagggccgcaucaucaaggagaucuuccccaccgggcgggucaagcacaccgaggagugcacgugcggcuucgccagcaacaagaccaucgagugcgcgugccgcgacaaccgguacaccgccaagcgccccuucgugaagcugaacguggagaccgacaccgccgagauccggcugaugugcacggacaccuaccucgacaccccgcgccccaacgacggguccaucaccggccccugcgagagcgacggcgacaagggguccggcgggaucaagggcggguucguccaccagcggaugaaguccaagaucggccgcugguacagccggacgaugagcaagaccgagcgcaugggcauggggcuguacgugaaguacgacggcgaccccugggccgacuccgacgcccuggcguucagcggggugauggucuccaugaaggagccgggcugguacagcuucggguucgagaucaaggacaagaagugcgacgugcccugcaucggcaucgagauggugcacgacggcgggaaggagaccuggcacuccgccgccaccgccaucuacugccucaugggcagcgggcagcugcugugggacacggucaccggcguggacauggcccucuga

SEQ ID NO: 94429 - RNA, 1401 nt, Artificial Sequence
  derived and/or modified CDS sequence (opt1) from neuraminidase__InfluenzaB__AKA54853
augcugcccagcaccauccagacccucacgcuguuccugaccuccggcggggugcuccugagccuguacgucuccgccagccucuccuaccugcuguacagcgacauccuccugaaguucuccccgaccgagaucaccgcccccacgaugccccuggacugcgcgaacgccagcaacgugcaggccgugaaccgcuccgccaccaagggcgucacccuccugcugcccgagccggaguggaccuacccccggcucagcugccccggguccacguuccagaaggcccugcugaucagcccccaccgcuucggcgagaccaaggggaacuccgcgccgcucaucauccgggagcccuucaucgccugcggccccaacgagugcaagcacuucgcccugacccacuacgccgcgcagcccggcggguacuacaacggcacccgcggggaccggaacaagcugcgccaccucaucagcgugaagcugggcaagaucccgacgguggagaacuccaucuuccacauggccgccuggagcggguccgccugccacgacggcaaggaguggaccuacaucggcgucgacgggcccgacaacaacgcccugcucaaggugaaguacggcgaggcguacaccgacaccuaccacagcuacgccaacaagauccugcggacgcaggaguccgccugcaacugcaucgggggcaacugcuaccugaugaucaccgacggcagcgccagcgggguguccgagugccgcuuccucaagauccgggagggccgcaucaucaaggagaucuuccccaccgggcgggucaagcacaccgaggagugcacgugcggcuucgccagcaacaagaccaucgagugcgcgugccgcgacaaccgguacaccgccaagcgccccuucgugaagcugaacguggagaccgacacggccgagauccggcugaugugcaccgacaccuaccucgacaccccgcgccccaacgacggguccaucacgggccccugcgagagcgacggcgacgagggguccggcggggucaagggcggguucgugcaccagcggaugaaguccaagaucggccgcugguacagccggaccaugagcaagaccgagcgcaugggcauggggcuguacgugaaguacgacggcgaccccugggccgacuccgacgcccuggcguucagcggggucaugguguccgugaaggagccgggcugguacagcuucggguucgagaucaaggacaagaagugcgacguccccugcaucggcaucgagauggugcacgacggcgggaaggagaccuggcacuccgccgccacggccaucuacugccucaugggcagcgggcagcugcugugggacaccgugaccggcgucgacauggcccucuga

SEQ ID NO: 94430 - RNA, 1401 nt, Artificial Sequence
  derived and/or modified CDS sequence (opt1) from neuraminidase__InfluenzaB__AKA54855
augcugcccagcaccauccagacccucacgcuguuccugaccuccggcggggugcuccugagccuguacgucuccgccagccucuccuaccugcuguacagcgacauccuccugaaguucuccccgaccgagaucaccgcccccacgaugccccuggacugcgcgaacgccagcaacgugcaggccgugaaccgcuccgccaccaagggcgucacccuccugcugcccgagccggaguggaccuacccccggcucagcugccccggguccacguuccagaaggcccugcugaucagcccccaccgcuucggcgagaccaaggggaacuccgcgccgcucaucauccgggagcccuucaucgccugcggccccaacgagugcaagcacuucgcccugacccacuacgccgcgcagcccggcggguacuacaacggcacccgcggggaccggaacaagcugcgccaccucaucagcgugaagcugggcaagaucccgacgguggagaacuccaucuuccacauggccgccuggagcggguccgccugccacgacggcaaggaguggaccuacaucggcgucgacgggcccgacaacaacgcccugcucaaggugaaguacggcgaggcguacaccgacaccuaccacagcuacgccaacaagauccugcggacgcaggaguccgccugcaacugcaucgggggcaacugcuaccugaugaucaccgacggcagcgccagcgggguguccgagugccgcuuccucaagauccgggagggccgcaucaucaaggagaucuuccccaccgggcgggucaagcacaccgaggagugcacgugcggcuucgccagcaacaagaccaucgagugcgcgugccgcgacaaccgguacaccgccaagcgccccuucgugaagcuggacguggagaccgacacggccgagauccggcugaugugcaccgacaccuaccucgacaccccgcgccccaacgacggguccaucacgggccccugcgagagcgacggcgacaagggguccggcgggaucaagggcggguucguccaccagcggaugaaguccaagaucggccgcugguacagccggaccaugagcaagaccgagcgcaugggcauggggcuguacgugaaguacgacggcgaccccugggccgacuccgacgcccuggcguucagcggggugauggucuccaugaaggagccgggcugguacagcuucggguucgagaucaaggacaagaagugcgacgugcccugcaucggcaucgagauggugcacgacggcgggaaggagaccuggcacuccgccgccacggccaucuacugccucaugggcagcgggcagcugcugugggacaccgucaccggcguggacauggcccucuga

SEQ ID NO: 94431 - RNA, 1401 nt, Artificial Sequence
  derived and/or modified CDS sequence (opt1) from neuraminidase__InfluenzaB__AKT07927
augcccccgagcaccauccagacccugacccucuuccugaccuccggcggggugcugcucagccuguacgucuccgccagccuguccuaccuccuguacagcgacauccugcucaaguucucccccaccgagaucaccgcccccacgaugccccuggacugcgcgaacgccagcaacgugcaggccgugaaccgcuccgccaccaagggcgucacccugcuccugccggagcccgaguggaccuacccccggcugagcugccccggguccacguuccagaaggcccuccugaucagcccgcaccgcuucggcgagacccgggggaacuccgcgccccugaucauccgcgagcccuucaucgccugcggccccaacgagugcaagcacuucgcccucacccacuacgccgcgcagccgggcggguacuacaacggcacccgcggggaccggaacaagcugcggcaccugaucagcgugaagcucggcaagauccccacgguggagaacuccaucuuccacauggccgccuggagcggguccgccugccacgacggcaaggaguggaccuacaucggcgucgacgggcccgacaacaacgcccugcugaaggugaaguacggcgaggcguacaccgacaccuaccacagcuacgccaacaagauccuccgcacgcaggaguccgccugcaacugcaucgggggcaacugcuaccugaugaucaccgacggcagcgccagcgggguguccgagugccgguuccugaagauccgcgagggccggaucaucaaggagaucuuccccaccgggcgcgucaagcacaccgaggagugcacgugcggcuucgccagcaacaagaccaucgagugcgcgugccgggacaacuccuacaccgccaagcgcccguucgugaagcucaacguggagaccgacacggccgagauccggcugaugugcaccgacaccuaccuggacacgccccgccccaacgacgggagcaucacgggccccugcgaguccgacggcgacaaggggagcggcgggaucaagggcggguucguccaccagcggauggaguccaagaucggccgcugguacagccggaccauguccaagaccgagcgcaugggcauggggcucuacgugaaguacgacggcgacccguggaccgacagcgacgcccuggccuucgggggcgugauggucuccaugaaggagcccgggugguacagcuucggcuucgagaucaaggacaagaagugcgacgugcccugcaucggcaucgagauggugcacgacgggggcaaggagacguggcacuccgcggccaccgccaucuacugccugauggggagcggccagcuccugugggacaccgucaccggcguggacauggcccuguga

SEQ ID NO: 94432 - RNA, 1401 nt, Artificial Sequence; identical to SEQ ID NO: 93143
  derived and/or modified CDS sequence (opt1) from neuraminidase__InfluenzaB__AKT07931

SEQ ID NO: 94433 - RNA, 1401 nt, Artificial Sequence
  derived and/or modified CDS sequence (opt1) from neuraminidase__InfluenzaB__AKT07933
augcugcccagcaccauccagacccucacgcuguuccugaccuccggcggggugcuccugagccuguacgucuccgccagccucuccuaccugcuguacagcgacauccuccugaaguucuccccgaccgagaucaccgcccccgcgaugccccuggacugcgccaacgccagcaacgugcaggccgugaaccgcuccgccacgaagggcgucaccuuccuccugcccgagccggaguggaccuacccccggcugagcugccccggguccaccuuccagaaggcgcuccugaucagcccccaccgcuucggcgagacgaaggggaacuccgccccgcugaucauccgggagcccuucaucgccugcggccccaacgagugcaagcacuucgcccucacccacuacgcggcccagcccggcggguacuacaacggcacccgcggggaccggaacaagcugcgccaccugaucagcgugaagcucggcaagaucccgaccguggagaacuccaucuuccacauggccgccuggagcggguccgccugccacgacggcaaggaguggacguacaucggcgucgacgggcccgacaacaacgcgcugcugaaggugaaguacggcgaggccuacaccgacaccuaccacagcuacgccaacaagauccuccggacccaggaguccgccugcaacugcaucgggggcaacugcuaccugaugaucacggacggcagcgccagcgggguguccgagugccgcuuccugaagauccgggagggccgcaucaucaaggagaucuuccccaccgggcgggucaagcacaccgaggagugcacgugcggcuucgcgagcaacaagaccaucgagugcgccugccgcgacaacuccuacaccgccaagcggcccuucgugaagcucaacguggagaccgacaccgccgagauccgccugaugugcacggacaccuaccuggacaccccgcggcccaacgacgggagcaucaccggccccugcgaguccgacggcgacaaggggagcggcgggaucaagggcggguucguccaccagcgcauggaguccaagaucggccggugguacagccgcacgauguccaagaccgagcggaugggcauggggcucuacgugaaguacgacggcgaccccugggccgacagcgacgcgcuggccuucuccggggugauggucagcaugaaggagccgggcugguacuccuucggguucgagaucaaggacaagaagugcgacgugcccugcaucggcaucgagauggugcacgacggcgggaaggagaccuggcacagcgccgccaccgccaucuacugccugaugggcuccgggcagcuccugugggacacggucaccggcguggacauggcgcuguga

SEQ ID NO: 94434 - RNA, 1401 nt, Artificial Sequence; identical to SEQ ID NO: 93143
  derived and/or modified CDS sequence (opt1) from neuraminidase__InfluenzaB__AKT07935

SEQ ID NO: 94435 - RNA, 1401 nt, Artificial Sequence; identical to SEQ ID NO: 93143
  derived and/or modified CDS sequence (opt1) from neuraminidase__InfluenzaB__AKT07937

SEQ ID NO: 94436 - RNA, 1401 nt, Artificial Sequence; identical to SEQ ID NO: 92985
  derived and/or modified CDS sequence (opt1) from neuraminidase__InfluenzaB__AKT07939

SEQ ID NO: 94437 - RNA, 1401 nt, Artificial Sequence; identical to SEQ ID NO: 93143
  derived and/or modified CDS sequence (opt1) from neuraminidase__InfluenzaB__AKT07941

SEQ ID NO: 94438 - RNA, 1401 nt, Artificial Sequence; identical to SEQ ID NO: 93143
  derived and/or modified CDS sequence (opt1) from neuraminidase__InfluenzaB__AKT07945

SEQ ID NO: 94439 - RNA, 1401 nt, Artificial Sequence
  derived and/or modified CDS sequence (opt1) from neuraminidase__InfluenzaB__AKT07947
augcugcccagcaccauccagacccucacgcuguuccugaccuccggcggggugcuccugagccuguacgucuccgccagccucuccuaccugcuguacagcgacauccuccugaaguucuccccgaccgagaucaccgcccccgcgaugccccuggacugcgccaacgccagcaacgugcaggccgugaaccgcuccgccacgaagggcgucacccuccugcugcccgagccggaguggaccuacccccggcucagcugccccggguccaccuuccagaaggcgcugcugaucagcccccaccgcuucggcgagacgaaggggaacuccgccccgcucaucauccgggagcccuucaucgccugcggccccaacgagugcaagcacuucgcccugacccacuacgcggcccagcccggcggguacuacaacggcacccgcggggaccggaacaagcugcgccaccucaucagcgugaagcugggcaagaucccgaccguggagaacuccaucuuccacauggccgccuggagcggguccgccugccacgacggcaaggaguggacguacaucggcgucgacgggcccgacaacaacgcgcugcucaaggugaaguacggcgaggccuacaccgacaccuaccacagcuacgccaacaagauccugcggacccaggaguccgccugcaacugcaucgggggcaacugcuaccugaugaucacggacggcagcgccagcgggguguccgagugccgcuuccucaagauccgggagggccgcaucaucaaggagaucuuccccaccgggcgggucaagcacaccgaggagugcacgugcggcuucgcgagcaacaagaccaucgagugcgccugccgcgacaacuccuacaccgccaagcggcccuucgugaagcugaacguggagaccgacaccgccgagauccgccugaugugcacggacaccuaccucgacaccccgcggcccaacgacgggagcaucaccggccccugcgaguccgacggcgacaaggggagcggcgggaucaagggcggguucguccaccagcgcauggaguccaagaucggccggugguacagccgcacgauguccaagaccgagcggaugggcauggggcuguacgugaaguacgacggcgaccccugggccgacagcgacgcgcuggccuucuccggggugauggucagcaugaaggagccgggcugguacuccuucggguucgagaucaaggacaagaagugcgacgugcccugcaucggcguggacaugguccacgacugcggcaaggagaccuggcacagcgccgccaccgccaucuacugccucaugggguccggccagcugcugugggacacggugaccgggguggacauggcgcucuga

SEQ ID NO: 94440 - RNA, 1401 nt, Artificial Sequence; identical to SEQ ID NO: 94398
  derived and/or modified CDS sequence (opt1) from neuraminidase__InfluenzaB__AKU40585

SEQ ID NO: 94441 - RNA, 1401 nt, Artificial Sequence; identical to SEQ ID NO: 94398
  derived and/or modified CDS sequence (opt1) from neuraminidase__InfluenzaB__AKU40596

SEQ ID NO: 94442 - RNA, 1401 nt, Artificial Sequence
  derived and/or modified CDS sequence (opt1) from neuraminidase__InfluenzaB__AKU40607
augcugcccagcaccauccagacccucacgcuguuccugaccuccggcggggugcuccugagccuguacgucuccgccagccucuccuaccugcuguacagcgacauccuccugaaguucucccgcaccgaggugaccgccccgaucacgccccuggacugcgcgaacgccagcaacgcccaggccgugaaccgguccgccaccaagggcgucacgccccuccugcccgagccggaguggaccuacccccgccugagcugccccggguccaccuuccagaaggcgcuccugaucagcccccaccgguucggcgagaccaaggggaacuccgccccgcugaucauccgcgagcccuucaucgccugcggccccaaggagugcaagcacuucgcccucacccacuacgcggcccagcccggcggguacuacaacggcacccgggaggaccgcaacaagcugcggcaccugaucagcgugaagcucgggaagaucccgacgguggagaacuccaucuuccacauggccgccuggagcggcuccgccugccacgacgggcgcgaguggaccuacaucggcgucgacggccccgacagcaacgcgcugcugaagaucaaguacggggaggccuacaccgacaccuaccacuccuacgccaagaacauccuccggacgcaggagagcgccugcaacugcaucggcggggacugcuaccugaugaucaccgacggccccgccagcggcaucuccgagugccgcuuccugaagauccgggaggggcgcaucaucaaggagaucuuccccaccggccgggugaagcacaccgaggagugcacgugcggguucgcgagcaacaagaccaucgagugcgccugccgcgacaacuccuacaccgccaagcggccguucgugaagcucaacgucgagaccgacacggccgagauccgccugaugugcaccaagaccuaccuggacacgccccggcccaacgacggcagcaucaccgggcccugcgaguccgacggcgacgagggcagcgggggcaucaagggcggguucgugcaccagcgcauggccuccaagaucgggcggugguacagccgcaccauguccaagaccaagcggaugggcaugggccucuacgugaaguacgacggggacccguggaccgacagcgaggcgcuggcccuguccggcgucauggugagcauggaggagcccgggugguacuccuucggcuucgagaucaaggacaagaagugcgacgugcccugcaucgggaucgagaugguccacgacggcggcaagacgaccuggcacagcgccgccaccgccaucuacugccucaugggguccggccagcugcugugggacaccgugacgggggugaacaugacccucuga

SEQ ID NO: 94443 - RNA, 1401 nt, Artificial Sequence
  derived and/or modified CDS sequence (opt1) from neuraminidase__InfluenzaB__AKU40618
augcugcccagcaccauccagacccucacgcuguuccugaccuccggcggggugcuccugagccuguacgucuccgccagccucuccuaccugcuguacagcgacauccuccugaaguucucccgcaccgaggugaccgccccgaucaugccccuggacugcgcgaacgccagcaacgugcaggccgucaaccgguccgccacgaagggcgugacgccccuccugcccgagccggaguggaccuacccccgccugagcugccccggguccaccuuccagaaggcccuccugaucagcccccaccgguucggcgagaccaaggggaacuccgcgccgcugaucauccgcgagcccuucaucgccugcggccccaaggagugcaagcacuucgcccucacccacuacgccgcgcagcccggcggguacuacaacggcacccgggaggaccgcaacaagcugcggcaccugaucagcgugaagcucgggaagaucccgaccgucgagaacuccaucuuccacauggccgccuggagcggcuccgccugccacgacgggcgcgaguggacguacaucggcguggacggccccgacagcaacgcccugcugaagaucaaguacggggaggcguacaccgacaccuaccacuccuacgccaagaacauccuccggacccaggagagcgccugcaacugcaucggcggggacugcuaccugaugaucacggacggccccgccagcggcaucuccgagugccgcuuccugaagauccgggaggggcgcaucaucaaggagaucuuccccaccggccgggugaagcacaccgaggagugcacgugcggguucgccagcaacaagaccaucgagugcgcgugccgcgacaacuccuacaccgccaagcggccguucgucaagcucaacguggagaccgacaccgccgagauccgccugaugugcacgaagaccuaccuggacacgccccggcccaacgacggcagcaucaccgggcccugcgaguccgacggcgacgagggcagcgggggcaucaagggcggguucgugcaccagcgcauggccuccaagaucgggcggugguacagccgcaccauguccaagaccaagcggaugggcaugggccucuacgucaaguacgacggggacccguggaccgacagcgaggcccuggcgcuguccggcgugauggugagcauggaggagcccgggugguacuccuucggcuucgagaucaaggacaacaagugcgacguccccugcaucgggaucgagauggugcacgacggcggcaagaccacguggcacagcgccgccaccgccaucuacugccucaugggguccggccagcugcugugggacaccgugaccggggucaacaugacgcucuga

SEQ ID NO: 94444 - RNA, 1401 nt, Artificial Sequence
  derived and/or modified CDS sequence (opt1) from neuraminidase__InfluenzaB__AKU40640
augcugcccagcaccauccagacccucacgcuguuccugaccuccggcggggugcuccugagccuguacgucuccgccagccucuccuaccugcuguacagcgacauccuccugaaguucucccgcaccgagaucgccgcgccgaucaugccccuggacugcgccaacgccagcaacgugcaggccgugaaccgguccgccaccaagggcgucgcgcuccugcugcccgagcccgaguggacguacccgcgccucagcugccccggguccaccuuccagaaggcccugcugaucagcccccaccgguucggcgagaccaaggggaacuccgcgccccucaucauccgcgagccguucaucgccugcggccccaaggagugcaagcacuucgcccugacccacuacgccgcccagcccggcggguacuacaacggcacgcgggaggaccgcaacaagcugcggcaccucaucagcgugaagcuggggaagauccccaccguggagaacuccaucuuccacauggccgccuggagcggcuccgcgugccacgacgggcgcgaguggaccuacaucggcgucgacggcccggacaacaacgcccugcucaagaucaaguacggggaggccuacaccgacacguaccacagcuacgccaagaacauccugcggacccaggaguccgccugcaacugcaucggcggggacugcuaccugaugaucaccgacggccccgcgagcggcaucagcgagugccgcuuccucaagauccgggaggggcgcaucaucaaggagaucuuccccaccggccgggugaagcacacggaggagugcacgugcggguucgccuccaacaagaccaucgagugcgccugccgcgacaacagcuacaccgccaagcggcccuucgugaagcugaacgucgagaccgacaccgccgagauccgccugaugugcaccgagaccuaccucgacacgccgcggcccaacgacggcuccaucaccgggcccugcgagagcaacggcgacaagggcuccgggggcaucaagggcggguucgugcaccagcgcauggcgagcaagaucgggcggugguacucccgcaccaugagcaagaccaagcggaugggcaugggccuguacgugaaguacgacggggaccccuggacggacuccgaggcccuggcccucagcggcgucaugguguccauggaggagccggggugguacagcuucggcuucgagaucaaggacaagaagugcgacgugcccugcaucgggaucgagaugguccacgacggcggcaagaccaccuggcacuccgccgccaccgcgaucuacugccugauggggagcggccagcugcucugggacacggugaccggggugaacaugacccuguga

SEQ ID NO: 94445 - RNA, 1401 nt, Artificial Sequence; identical to SEQ ID NO: 94398
  derived and/or modified CDS sequence (opt1) from neuraminidase__InfluenzaB__AKU40662

SEQ ID NO: 94446 - RNA, 1401 nt, Artificial Sequence
  derived and/or modified CDS sequence (opt1) from neuraminidase__InfluenzaB__AKU40673
augcugcccagcaccauccagacccucacgcuguuccugaccuccggcggggugcuccugagccuguacgucuccgccagccucuccuaccugcuguacagcgacauccuccugaaguucucccgcaccgaggugaccgccccgaucaugccccuggacugcgcgaacgccagcaacgugcaggccgucaaccgguccgccacgaagggcgugacgccccuccugcccgagagcgaguggaccuacccgcgccuguccugccccgggagcaccuuccagaaggcccuccugaucagcccccaccgguucggcgagaccaaggggaacuccgcgccccugaucauccgcgagccguucaucgccugcggccccaaggagugcaagcacuucgcccucacccacuacgccgcgcagcccggcggguacuacaacggcacccgggaggaccgcaacaagcugcggcaccugaucuccgugaagcucgggaagauccccaccgucgagaacagcaucuuccacauggccgccugguccggcagcgccugccacgacgggcgcgaguggacguacaucggcguggacggcccggacuccaacgcccugcugaagaucaaguacggggaggcguacaccgacaccuaccacagcuacgccaagaacauccuccggacccaggagagcgccugcaacugcaucggcggggacugcuaccugaugaucacggacggccccgccuccggcaucagcgagugccgcuuccugaagauccgggaggggcgcaucaucaaggagaucuuccccaccggccgggugaagcacaccgaggagugcacgugcggguucgccuccaacaagaccaucgagugcgcgugccgcgacaacagcuacaccgccaagcggcccuucgucaagcucaacguggagaccgacaccgccgagauccgccugaugugcacgaagaccuaccuggacaccccgcggcccaacgacggcuccaucaccgggcccugcgagagcgacggcgacgagggcuccgggggcaucaagggcggguucgugcaccagcgcauggccagcaagaucgggcggugguacucccgcacgaugagcaagaccaagcggaugggcaugggccucuacgucaaguacgacggggaccccuggaccgacuccgaggcccuggcgcugagcggcgugaugguguccauggaggagccggggugguacagcuucggcuucgagaucaaggacaagaagugcgacguccccugcaucgggaucgagauggugcacgacggcggcaagaccacguggcacuccgccgccaccgccaucuacugccucauggggagcggccagcugcugugggacaccgugaccggggucaacaugacgcucuga

SEQ ID NO: 94447 - RNA, 1401 nt, Artificial Sequence; identical to SEQ ID NO: 94398
  derived and/or modified CDS sequence (opt1) from neuraminidase__InfluenzaB__AKU40684

SEQ ID NO: 94448 - RNA, 1401 nt, Artificial Sequence; identical to SEQ ID NO: 94398
  derived and/or modified CDS sequence (opt1) from neuraminidase__InfluenzaB__AKU40695

SEQ ID NO: 94449 - RNA, 1401 nt, Artificial Sequence; identical to SEQ ID NO: 94398
  derived and/or modified CDS sequence (opt1) from neuraminidase__InfluenzaB__AKU40706

SEQ ID NO: 94450 - RNA, 1401 nt, Artificial Sequence; identical to SEQ ID NO: 94398
  derived and/or modified CDS sequence (opt1) from neuraminidase__InfluenzaB__AKU40717

SEQ ID NO: 94451 - RNA, 1401 nt, Artificial Sequence
  derived and/or modified CDS sequence (opt1) from neuraminidase__InfluenzaB__AKU40728
augcugcccagcaccauccagacccucacgcuguuccugaccuccggcggggugcuccugagccuguacgucuccgccagccucuccuaccugcuguacagcgacauccuccugaaguucucccgcaccgaggugaccgccccgaucaugccccuggacugcgcgaacgccagcaacgcccaggccgugaaccgguccgccacgaagggcgucacgccccuccugcccgagccggaguggaccuacccccgccugagcugccccggguccaccuuccagaaggcgcuccugaucagcccccaccgguucggcgagaccaaggggaacuccgccccgcugaucauccgcgagcccuucaucgccugcggccccaaggagugcaagcacuucgcccucacccacuacgcggcccagcccggcggguacuacaacggcacccgggaggaccgcaacaagcugcggcaccugaucagcgugaagcucgggaagaucccgaccguggagaacuccaucuuccacauggccgccuggagcggcuccgccugccacgacgggcgcgaguggacguacaucggcgucgacggccccgacagcaacgcgcugcugaagaucaaguacggggaggccuacaccgacaccuaccacuccuacgccaagaacauccuccggacccaggagagcgccugcaacugcaucggcggggacugcuaccugaugaucacggacggccccgccagcggcaucuccgagugccgcuuccugaagauccgggaggggcgcaucaucaaggagaucuuccccaccggccgggugaagcacaccgaggagugcacgugcggguucgcgagcaacaagaccaucgagugcgccugccgcgacaacuccuacaccgccaagcggccguucgugaagcucaacgucgagaccgacaccgccgagauccgccugaugugcacgaagaccuaccuggacacgccccggcccaacgacggcagcaucaccgggcccugcgaguccgacggcgacgagggcagcgggggcaucaagggcggguucgugcaccagcgcauggccuccaagaucgggcggugguacagccgcaccauguccaagaccaagcggaugggcaugggccucuacgugaaguacgacggggacccguggaccgacagcgaggcgcuggcccuguccggcgucauggugagcauggaggagcccgggugguacuccuucggcuucgagaucaaggacaagaagugcgacgugcccugcaucgggaucgagaugguccacgacggcggcaagaccacguggcacagcgccgccaccgccaucuacugccucaugggguccggccagcugcugugggacaccgugaccggggugaacaugacgcucuga

SEQ ID NO: 94452 - RNA, 1401 nt, Artificial Sequence
  derived and/or modified CDS sequence (opt1) from neuraminidase__InfluenzaB__AKU40739
augcugcccagcaccauccagacccucacgcuguuccugaccuccggcggggugcuccugagccuguacgucuccgccagccucuccuaccugcuguacagcgacauccuccugaaguucucccgcaccgaggugaccgccccgaucaugccccuggacugcgcgaacgccagcaacgugcaggccgucaaccgguccgccacgaagggcgugacgccccuccugcccgagccggaguggaccuacccccgccugagcugccccggguccaccuuccagaaggcccuccugaucagcccccaccgguucggcgagaccaaggggaacuccgcgccgcugaucauccgcgagcccuucaucgccugcggccccaaggagugcaagcacuucgcccucacccacuacgccgcgcagcccggcggguacuacaacggcacccgggaggaccgcaacaagcugcggcaccugaucagcgugaagcucgggaagaucccgaccgucgagaacuccaucuuccacauggccgccuggagcggcuccgccugccacgacgggcgcgaguggacguacaucggcguggacggccccgacagcaacgcccugcugaagaucaaguacggggagaccuacaccgacaccuaccacuccuacgcgaagaacauccuccggacgcaggagagcgccugcaacugcaucggcggggacugcuaccugaugaucaccgacggccccgccagcggcaucuccgagugccgcuuccugaagauccgggaggggcgcaucaucaaggagaucuuccccaccggccgggugaagcacaccgaggagugcacgugcggguucgccagcaacaagaccaucgagugcgccugccgcgacaacuccuacaccgcgaagcggccguucgucaagcucaacguggagaccgacacggccgagauccgccugaugugcaccaagaccuaccuggacacgccccggcccaacgacggcagcaucaccgggcccugcgaguccgacggcgacgagggcagcgggggcaucaagggcggguucgugcaccagcgcauggccuccaagaucgggcggugguacagccgcaccauguccaagaccaagcggaugggcaugggccucuacgucaaguacgacggggacccguggaccgacagcgaggcccuggcccuguccggcgugauggugagcauggaggagcccgggugguacuccuucggcuucgagaucaaggacaagaagugcgacguccccugcaucgggaucgagauggugcacgacggcggcaagacgaccuggcacagcgcggccaccgccaucuacugccucaugggguccggccagcugcugugggacaccgugacgggggucaacaugacccucuga

SEQ ID NO: 94453 - RNA, 1401 nt, Artificial Sequence
  derived and/or modified CDS sequence (opt1) from neuraminidase__InfluenzaB__AKU40750
augcugcccagcaccauccagacccucacgcuguuccugaccuccggcggggugcuccugagccuguacgucuccgccagccucuccuaccugcuguacagcgacauccuccugaaguucucccgcaccgaggugaccgccccgaucaugccccuggacugcgcgaacgccagcaacgugcaggccgucaaccgguccgccacgaagggcgugaucccccuccugcccgagccggaguggaccuacccccgccugagcugccccggguccaccuuccagaaggcccuccugaucagcccccaccgguucggcgagaccaaggggaacuccgcgccgcugaucauccgcgagcccuucaucgccugcggccccaaggagugcaagcacuucgcccucacgcacuacgccgcgcagcccggcggguacuacaacggcacccgggaggaccgcaacaagcugcggcaccugaucagcgugaagcucgggaagaucccgaccgucgagaacuccaucuuccacauggccgccuggagcggcuccgccugccacgacgggcgcgaguggaccuacaucggcguggacggccccgacagcaacgcccugcugaagaucaaguacggggaggcguacacggacaccuaccacuccuacgccaagaacauccuccggacccaggagagcgccugcaacugcaucggcggggacugcuaccugaugaucaccgacggccccgccagcggcaucuccgagugccgcuuccugaagauccgggaggggcgcaucaucaaggagaucuuccccacgggccgggugaagcacaccgaggagugcacgugcggguucgccagcaacaagaccaucgagugcgcgugccgcgacaacuccuacaccgccaagcggccguucgucaagcucaacguggagaccgacaccgccgagauccgccugaugugcaccaagacguaccuggacacgccccggcccaacgacggcagcaucaccgggcccugcgaguccgacggcgacgagggcagcgggggcaucaagggcggguucgugcaccagcgcauggccuccaagaucgggcggugguacagccgcaccauguccaagaccaagcggaugggcaugggccucuacgucaaguacgacggggacccguggaccgacagcgaggcccuggcgcuguccggcgugauggugagcauggaggagcccgggugguacuccuucggcuucgagaucaaggacaagaagugcgacguccccugcaucgggaucgagauggugcacgacggcggcaagaccaccuggcacagcgccgccacggccaucuacugccucaugggguccggccagcugcugugggacaccgugaccggggucaacaugacccucuga

SEQ ID NO: 94454 - RNA, 1401 nt, Artificial Sequence; identical to SEQ ID NO: 94398
  derived and/or modified CDS sequence (opt1) from neuraminidase__InfluenzaB__AKU40761

SEQ ID NO: 94455 - RNA, 1401 nt, Artificial Sequence; identical to SEQ ID NO: 94398
  derived and/or modified CDS sequence (opt1) from neuraminidase__InfluenzaB__AKU40772

SEQ ID NO: 94456 - RNA, 1401 nt, Artificial Sequence; identical to SEQ ID NO: 94398
  derived and/or modified CDS sequence (opt1) from neuraminidase__InfluenzaB__AKU40783

SEQ ID NO: 94457 - RNA, 1401 nt, Artificial Sequence
  derived and/or modified CDS sequence (opt1) from neuraminidase__InfluenzaB__AKU40794
augcugcccagcaccauccagacccucacgcuguuccugaccuccggcggggugcuccugagccuguacgucuccgccagccucuccuaccugcuguacagcgacauccuccugaaguucucccgcaccgaggugaccgccccgaucaugccccuggacugcgcgaacacgagcaacgugcaggccgucaaccgguccgccaccaagggcgugacgccccuccugcccgagccggaguggaccuacccccgccugagcugccccggguccaccuuccagaaggcccuccugaucagcccccaccgguucggcgagaccaaggggaaguccgccccgcugaucauccgcgagcccuucaucgcgugcggccccaaggagugcaagcacuucgcccucacccacuacgccgcccagcccggcggguacuacaacggcacccgggaggaccgcaacaagcugcggcaccugaucagcgugaagcucgggaagaucccgacggucgagaacuccaucuuccacauggcggccuggagcggcuccgccugccacgacgggcgcgaguggaccuacaucggcguggacggccccgacagcaacgcccugcugaagaucaaguacggggaggccuacaccgacaccuaccacuccuacgcgaagaacauccuccggacgcaggagagcgccugcaacugcaucggcggggacugcuaccugaugaucaccgacggccccgccagcggcaucuccgagugccgcuuccugaagauccgggaggggcgcaucaucaaggagaucuuccccaccggccgggugaagcacaccgaggagugcacgugcggguucgccagcaacaagaccaucgagugcgccugccgcgacaacuccuacaccgcgaagcggccguucgucaagcucaacguggagaccgacacggccgagauccgccugaugugcaccaagaccuaccuggacacgccccggcccaacgacggcagcaucaccgggcccugcgaguccgacggcgacgagggcagcgggggcaucaagggcggguucgugcaccagcgcauggccuccaagaucgggcggugguacagccgcaccauguccaagaccaagcggaugggcaugggccucuacgucaaguacgacggggacccguggaccgacagcgaggcccuggcccuguccggcgugauggugagcauggaggagcccgggugguacuccuucggcuucgagaucaaggacaagaagugcgacguccccugcaucgggaucgagauggugcacgacggcggcaagacgaccuggcacagcgcggccaccgccaucuacugccucaugggguccggccagcugcugugggacaccgugacgggggucaacaugacccucuga

SEQ ID NO: 94458 - RNA, 1401 nt, Artificial Sequence; identical to SEQ ID NO: 94398
  derived and/or modified CDS sequence (opt1) from neuraminidase__InfluenzaB__AKU40805

SEQ ID NO: 94459 - RNA, 1401 nt, Artificial Sequence; identical to SEQ ID NO: 94398
  derived and/or modified CDS sequence (opt1) from neuraminidase__InfluenzaB__AKU40816

SEQ ID NO: 94460 - RNA, 1401 nt, Artificial Sequence; identical to SEQ ID NO: 94398
  derived and/or modified CDS sequence (opt1) from neuraminidase__InfluenzaB__AKU40827

SEQ ID NO: 94461 - RNA, 1401 nt, Artificial Sequence; identical to SEQ ID NO: 94398
  derived and/or modified CDS sequence (opt1) from neuraminidase__InfluenzaB__AKU40838

SEQ ID NO: 94462 - RNA, 1401 nt, Artificial Sequence; identical to SEQ ID NO: 94398
  derived and/or modified CDS sequence (opt1) from neuraminidase__InfluenzaB__AKU40849

SEQ ID NO: 94463 - RNA, 1401 nt, Artificial Sequence; identical to SEQ ID NO: 94398
  derived and/or modified CDS sequence (opt1) from neuraminidase__InfluenzaB__AKU40860

SEQ ID NO: 94464 - RNA, 1401 nt, Artificial Sequence
  derived and/or modified CDS sequence (opt1) from neuraminidase__InfluenzaB__AKU40871
augcugcccagcaccauccagacccucacgcuguuccugaccuccggcggggugcuccugagccuguacgucuccgccagccucuccuaccugcuguacagcgacauccuccugaaguucucccgcaccgaggugaccgccccgaucaugccccuggacugcgcgaacgccagcaacgugcaggccgucaaccgguccgccacgaagggcguggcgccccuccugcccgagccggaguggaccuacccccgccugagcugccccggguccaccuuccagaaggcccuccugaucagcccccaccgguucggcgagaccaaggggaacuccgccccgcugaucauccgcgagcccuucaucgccugcggccccaaggagugcaagcacuucgcccucacgcacuacgcggcccagcccggcggguacuacaacggcacccgggaggaccgcaacaagcugcggcaccugaucagcgugaagcucgggaagaucccgaccgucgagaacuccaucuuccacauggccgccuggagcggcuccgccugccacgacgggcgcgaguggaccuacaucggcguggacggccccgacagcaacgcgcugcugaagaucaaguacggggaggccuacacggacaccuaccacuccuacgccaagaacauccuccggacccaggagagcgccugcaacugcaucggcggggacugcuaccugaugaucaccgacggccccgccagcggcaucuccgagugccgcuuccugaagauccgggaggggcgcaucaucaaggagaucuuccccacgggccgggugaagcacaccgaggagugcacgugcggguucgcgagcaacaagaccaucgagugcgccugccgcgacaacuccuacaccgccaagcggccguucgucaagcucaacguggagaccgacaccgccgagauccgccugaugugcaccaagacguaccuggacacgccccggcccaacgacggcagcaucaccgggcccugcgaguccgacggcgacgagggcagcgggggcaucaagggcggguucgugcaccagcgcauggccuccaagaucgggcggugguacagccgcaccauguccaagaccaagcggaugggcaugggccucuacgucaaguacgacggggacccguggaccgacagcgaggcgcugacccuguccggcgugauggugagcauggaggagcccgggugguacuccuucggcuucgagaucaaggacaagaagugcgacguccccugcaucgggaucgagauggugcacgacggcggcaagaccacguggcacagcgccgccaccgccaucuacugccucaugggguccggccagcugcugugggacaccgugaccggggucaacaugacgcucuga

SEQ ID NO: 94465 - RNA, 1401 nt, Artificial Sequence; identical to SEQ ID NO: 94398
  derived and/or modified CDS sequence (opt1) from neuraminidase__InfluenzaB__AKU40882

SEQ ID NO: 94466 - RNA, 1401 nt, Artificial Sequence
  derived and/or modified CDS sequence (opt1) from neuraminidase__InfluenzaB__AKU40893
augcugcccagcaccauccagacccucacgcuguuccugaccuccggcggggugcuccugagccuguacgucuccgccagccucuccuaccugcuguacagcgacauccuccugaaguucuccccgaccgagaucaccgcccccacgaugccccuggacugcgcgaacgccagcaacgugcaggccgugaaccgcuccgccaccaagggcgucacccuccugcugcccgagccggaguggaccuacccccggcucagcugccccggguccacguuccagaaggcccugcugaucagcccccaccgcuucggcgagaccaaggggaacuccgcgccgcucaucauccgggagcccuucaucgccugcggccccaacgagugcaagcacuucgcccugacccacuacgccgcgcagcccggcggguacuacaacggcacccgcggggaccggaacaagcugcgccaccucaucagcgugaagcugggcaagaucccgacgguggagaacuccaucuuccacauggccgccuggagcggguccgccugccacgacggcaaggaguggaccuacaucggcgucgacgggcccgacaacaacgcccugcucaaggugaaguacggcgaggcguacaccgacaccuaccacagcuacgccaacaagauccugcggacgcaggaguccgccugcaacugcaucgggggcaacugcuaccugaugaucaccgacggcagcgccagcgggguguccgagugccgcuuccucaagauccgggagggccgcaucaucaaggagaucuuccccaccgggcgggucaagcacaccgaggagugcacgugcggcuucgccagcaacaagaccaucgagugcgcgugccgcgacaaccgguacaccgccaagcgccccuucgugaagcugaacguggagaccgacacggccgagauccggcugaugugcaccgacaccuaccucgacaccccgcgccccaacgacggguccaucacgggccccugcgagagcgacggcgacaagggguccggcgggaucaagggcggguucguccaccagcggaugaaguccaagaucggccgcugguacagccggaccaugagcaagaccgagcgcaugggcauggggcuguacgugaaguacgacggcgaccccugggccgacuccggggcccuggcguucagcggcgugauggucuccaugaaggagccggggugguacagcuucggcuucgagaucaaggacaagaagugcgacgugcccugcaucggcaucgagauggugcacgacgggggcaaggagaccuggcacuccgccgccacggccaucuacugccucauggggagcggccagcugcugugggacaccgucaccggcguggacauggcccucuga

SEQ ID NO: 94467 - RNA, 1401 nt, Artificial Sequence; identical to SEQ ID NO: 94398
  derived and/or modified CDS sequence (opt1) from neuraminidase__InfluenzaB__AKU40904

SEQ ID NO: 94468 - RNA, 1401 nt, Artificial Sequence
  derived and/or modified CDS sequence (opt1) from neuraminidase__InfluenzaB__AKU40915
augcugcccagcaccauccagacccucacgcuguuccugaccuccggcggggugcuccugagccuguacgucuccgccagccucuccuaccugcuguacagcgacauccuccugaaguucucccgcaccgaggugaccgccccgaucaugccccuggacugcgcgaacgccagcaacgugcaggccgucaaccgguccgccacgaagggcgugacgccccuccugcccgagccggaguggaccuacccccgccugagcugccccggguccaccuuccagaaggcccuccugaucagcccccaccgguucggcgagaccaaggggaacuccgcgccgcugaucauccgcgagcccuucaucgccugcggccccaaggagugcaagcacuucgcccucacccacuacgccgcgcagcccggcggguacuacaacggcacccgggaggaccgcaacaagcugcggcaccugaucagcgugaagcucgggaagaucccgaccgucgagaacuccaucuuccacauggccgccuggagcggcuccgccugccacgacgggcgcgaguggacguacaucggcguggacggccccgacagcaacgcccugcugaagaucaaguacggggaggcguacaccgacaccuaccacuccuacgccaagaacauccuccggacccaggagagcgccugcaacugcaucggcggggacugcuaccugaugaucacggacggccccgccagcggcaucuccgagugccgcuuccugaagauccgggaggggcgcaucaucaaggagaucuuccccaccggccgggugaagcacaccgaggagugcacgugcggguucgccagcaacaagaccaucgagugcgcgugccgcgacaacuccuacaccgccaagcggccguucgucaagcucaacguggagaccgacaccgccgagauccgccugaugugcacgaagaccuaccuggacacgccccggcccaacgacggcagcaucaccgggcccugcgaguccgacggcgacgagggcagcgggggcaucaagggcggguucgugcaccagcgcauggccuccaagaucgggcggugguacagccgcaccauguccaagaccaagcggaugggcaugggccucuacgucaaguacgacggggacccguggaccgacagcgaggcccuggcgcuguccggcgugauggugcccauggaggagcccgggugguacagcuucggcuucgagaucaaggacaagaagugcgacguccccugcaucgggaucgagauggugcacgacggcggcaagaccacguggcacuccgccgccaccgccaucuacugccucauggggagcggccagcugcugugggacaccgugaccggggucaacaugacgcucuga

SEQ ID NO: 94469 - RNA, 1401 nt, Artificial Sequence; identical to SEQ ID NO: 94398
  derived and/or modified CDS sequence (opt1) from neuraminidase__InfluenzaB__AKU40926

SEQ ID NO: 94470 - RNA, 1401 nt, Artificial Sequence; identical to SEQ ID NO: 94452
  derived and/or modified CDS sequence (opt1) from neuraminidase__InfluenzaB__AKU40937

SEQ ID NO: 94471 - RNA, 1401 nt, Artificial Sequence; identical to SEQ ID NO: 94398
  derived and/or modified CDS sequence (opt1) from neuraminidase__InfluenzaB__AKU40948

SEQ ID NO: 94472 - RNA, 1401 nt, Artificial Sequence; identical to SEQ ID NO: 94398
  derived and/or modified CDS sequence (opt1) from neuraminidase__InfluenzaB__AKU40959

SEQ ID NO: 94473 - RNA, 1401 nt, Artificial Sequence; identical to SEQ ID NO: 94398
  derived and/or modified CDS sequence (opt1) from neuraminidase__InfluenzaB__AKU40970

SEQ ID NO: 94474 - RNA, 1401 nt, Artificial Sequence; identical to SEQ ID NO: 94398
  derived and/or modified CDS sequence (opt1) from neuraminidase__InfluenzaB__AKU40981

SEQ ID NO: 94475 - RNA, 1401 nt, Artificial Sequence; identical to SEQ ID NO: 94398
  derived and/or modified CDS sequence (opt1) from neuraminidase__InfluenzaB__AKU40991

SEQ ID NO: 94476 - RNA, 1401 nt, Artificial Sequence; identical to SEQ ID NO: 94398
  derived and/or modified CDS sequence (opt1) from neuraminidase__InfluenzaB__AKU41002

SEQ ID NO: 94477 - RNA, 1401 nt, Artificial Sequence; identical to SEQ ID NO: 94398
  derived and/or modified CDS sequence (opt1) from neuraminidase__InfluenzaB__AKU41013

SEQ ID NO: 94478 - RNA, 1401 nt, Artificial Sequence; identical to SEQ ID NO: 94398
  derived and/or modified CDS sequence (opt1) from neuraminidase__InfluenzaB__AKU41024

SEQ ID NO: 94479 - RNA, 1401 nt, Artificial Sequence; identical to SEQ ID NO: 92985
  derived and/or modified CDS sequence (opt1) from neuraminidase__InfluenzaB__EPI173278

SEQ ID NO: 94480 - RNA, 1401 nt, Artificial Sequence; identical to SEQ ID NO: 92985
  derived and/or modified CDS sequence (opt1) from neuraminidase__InfluenzaB__EPI498049

SEQ ID NO: 94481 - RNA, 1401 nt, Artificial Sequence; identical to SEQ ID NO: 92985
  derived and/or modified CDS sequence (opt1) from neuraminidase__InfluenzaB__AFH57913

SEQ ID NO: 94482 - RNA, 1401 nt, Artificial Sequence; identical to SEQ ID NO: 92985
  derived and/or modified CDS sequence (opt1) from neuraminidase__InfluenzaB__EPI827074

SEQ ID NO: 94483 - RNA, 1401 nt, Artificial Sequence; identical to SEQ ID NO: 92985
  derived and/or modified CDS sequence (opt1) from neuraminidase__InfluenzaB__EPI244698

SEQ ID NO: 94484 - RNA, 1401 nt, Artificial Sequence; identical to SEQ ID NO: 92985
  derived and/or modified CDS sequence (opt1) from neuraminidase__InfluenzaB__EPI244701

SEQ ID NO: 94485 - RNA, 1401 nt, Artificial Sequence; identical to SEQ ID NO: 94398
  derived and/or modified CDS sequence (opt1) from neuraminidase__InfluenzaB__EPI540672

SEQ ID NO: 94486 - RNA, 1401 nt, Artificial Sequence; identical to SEQ ID NO: 94398
  derived and/or modified CDS sequence (opt1) from neuraminidase__InfluenzaB__EPI829465

SEQ ID NO: 94487 - RNA, 1401 nt, Artificial Sequence
  derived and/or modified CDS sequence (opt1) from neuraminidase__InfluenzaB__EPI684428
augcugcccagcaccauccagacccucacgcuguuccugaccuccggcggggugcuccugagccuguacgucuccgccagccucuccuaccugcuguacagcgacauccuccugaaguucucccgcaccgaggugaccgccccgacgaugccccuggacugcgcgaacgccagcaacgugcaggccgucaaccgguccaccaccaagggcgugacgccccucuuccccgagccggaguggaccuacccccgccugagcugccccggguccaccuuccagaaggcccugcucaucagcccccaccgguucggcgagaccaaggggaacuccgccccgcugaucauccgcgagcccuucaucgcgugcggccccaaggagugcaagcacuucgcccugacccacuacgccgcccagcccggcggguacuacaacggcacgcgggaggaccgcaacaagcuccggcaccugaucagcgugaagcuggggaagaucccgaccgucgagaacuccaucuuccacauggcggccuggagcggcuccgccugccacgacgggcgcgaguggaccuacaucggcguggacggccccgacagcaacgcccuccugaagaucaaguacggggaggccuacaccgacacguaccacuccuacgcgaagaacauccugcggacccaggagagcgccugcaacugcaucggcggggacugcuaccucaugaucaccgacggccccgccagcggcguguccgagugccgcuuccugaagauccgggaggggcgcaucaucaaggagaucuuccccaccggccgggucaagcacacggaggagugcacgugcggguucgccagcaacaagaccaucgagugcgccugccgcgacaaccgguacaccgcgaagcgcccguucgugaagcugaacguggagaccgacaccgccgagauccggcucaugugcaccaagaccuaccuggacacgccccgccccaacgacggcuccaucaccgggcccugcgagagcgacggcgacgagggcuccgggggcaucaagggcggguucguccaccagcggauggccagcaagaucgggcgcugguacucccggaccaugagcaagaccaagcgcaugggcaugggccuguacgugaaguacgacggggacccguggacggacuccgaggcccucgcccugagcggcgugauggucuccauggaggagcccgggugguacagcuucggcuucgagaucaaggacaagaagugcgacgugcccugcaucgggaucgagauggugcacgacggcggcaagaccaccuggcacuccgcggccaccgccaucuacugccugauggggagcggccagcuccugugggacacggucaccggggugaacaugacccuguga

SEQ ID NO: 94488 - RNA, 1401 nt, Artificial Sequence; identical to SEQ ID NO: 93007
  derived and/or modified CDS sequence (opt1) from neuraminidase__InfluenzaB__AFH58451

SEQ ID NO: 94489 - RNA, 1401 nt, Artificial Sequence; identical to SEQ ID NO: 92985
  derived and/or modified CDS sequence (opt1) from neuraminidase__InfluenzaB__EPI173280

SEQ ID NO: 94490 - RNA, 1401 nt, Artificial Sequence; identical to SEQ ID NO: 92985
  derived and/or modified CDS sequence (opt1) from neuraminidase__InfluenzaB__EPI186302

SEQ ID NO: 94491 - RNA, 1401 nt, Artificial Sequence
  derived and/or modified CDS sequence (opt1) from neuraminidase__InfluenzaB__EPI636339
augcugcccagcaccauccagacccucacgcuguuccugaccuccggcggggugcuccugagccuguacgucuccgccagccucuccuaccugcuguacagcgacauccuccugaaguucuccccgaccgagaucaccgcccccacgaugccccuggacugcgcgaacgccagcaacgugcaggccgugaaccgcuccgccaccaagggcgucacccuccugcugcccgagccggaguggaccuacccccggcucagcugccccggguccacguuccagaaggcccugcugaucagcccccaccgcuucggcgagaccaaggggaacuccgcgccgcucaucauccgggagcccuucguggccugcggccccaacgagugcaagcacuucgcccugacccacuacgccgcgcagcccggcggguacuacaacggcacccgcggggaccggaacaagcugcgccaccucaucagcgugaagcugggcaagaucccgacggucgagaacuccaucuuccacauggccgccuggagcggguccgccugccacgacggcaaggaguggaccuacaucggcguggacgggcccgacaacaacgcccugcucaaggugaaguacggcgaggcguacaccgacaccuaccacagcuacgccaacaacauccugcggacgcaggaguccgccugcaacugcaucgggggcaacugcuaccugaugaucaccgacggcagcgccagcggggucuccgagugccgcuuccucaagauccgggagggccgcaucaucaaggagaucuuccccaccgggcgggugaagcacaccgaggagugcacgugcggcuucgccagcaacaagaccaucgagugcgcgugccgcgacaaccgguacaccgccaagcgccccuucgugaagcugaacgucgagaccgacacggccgagauccggcugaugugcaccgacaccuaccucgacaccccgcgccccaacgacggguccaucacgggccccugcgagagcgacggcgacaagggguccggcgggaucaagggcggguucgugcaccagcggaugaaguccaagaucggccgcugguacagccggaccaugagcaagaccgagcgcaugggcauggggcuguacgugaaguacggcggggaccccugggccgacuccgacgcccuggcguucagcggcgucaugguguccaugaaggagccggggugguacagcuucggcuucgagaucaaggacaagaagugcgacgugcccugcaucggcaucgagaugguccacgacgggggcaaggagaccuggcacuccgccgccacggccaucuacugccucauggggagcggccagcugcugugggacaccgugaccggcguggacauggcccucuga

SEQ ID NO: 94492 - RNA, 1401 nt, Artificial Sequence; identical to SEQ ID NO: 94491
  derived and/or modified CDS sequence (opt1) from neuraminidase__InfluenzaB__EPI645996

SEQ ID NO: 94493 - RNA, 1401 nt, Artificial Sequence
  derived and/or modified CDS sequence (opt1) from neuraminidase__InfluenzaB__EPI539770
augcugcccagcaccauccagacccucacgcuguuccugaccuccggcggggugcuccugagccuguacgucuccgccagccucuccuaccugcuguacagcgacauccuccugaaguucucccgcaccgaggugaccgccccgaucaugccccuggacugcgcgaacgccagcaacgcccaggccgugaaccgguccgccacgaagggcgucacgccccuccugcccgagccggaguggaccuacccccgccugagcugccccggguccaccuuccagaaggcgcuccugaucagcccccaccgguucggcgagaccaaggggaacuccgccccgcugaucauccgcgagcccuucaucgccugcggccccaaggagugcaagcacuucgcccucacccacuacgcggcccagcccggcggguacuacaacggcacccgggaggaccgcaacaagcugcggcaccugaucagcgugaagcucgggaagaucccgaccguggagaacuccaucuuccacauggccgccuggagcggcuccgccugccacgacgggcgcgaguggacguacaucggcgucgacggccccgacagcaacgcgcugcugaagaucaaguacggggaggccuacaccgacaccuaccacuccuacgccaagaacauccuccggacccaggagagcgccugcaacugcaucggcggggacugcuaccugaugaucacggacggccccgccagcggcaucuccgagugccgcuuccugaagauccgggaggggcgcaucaucaaggagaucuuccccaccggccgggugaagcacaccgaggagugcacgugcggguucgcgagcaacaagaccaucgagugcgccugccgcgacaacuccuacaccgccaagcggccguucgugaagcucaacgucgagaccgacaccgccgagauccgccugaugugcacgaagaccuaccuggacacgccccggcccaacgacggcagcaucaccgggcccugcgaguccgacggcgacgagggcagcgggggcaucaagggcggguucgugcaccagcgcauggccuccaagaucgggcggugguacagccgcaccauguccaagaccaagcggaugggcaugggccucuacgugaaguacgacggggacccguggaccgacagcgaggcgcuggcccuguccggcgucauggugagcauggaggagcccgggugguacuccuucggcuucgagaucaaggacaagaagugcgacgugcccugcaucgggaucgagaugguccacgacggcggcaagaccacguggcacagcgccgccaccaccaucuacugccucaugggguccggccagcugcugugggacaccgugacgggggugaacaucacccucuga

SEQ ID NO: 94494 - RNA, 1401 nt, Artificial Sequence; identical to SEQ ID NO: 94493
  derived and/or modified CDS sequence (opt1) from neuraminidase__InfluenzaB__EPI551248

SEQ ID NO: 94495 - RNA, 1401 nt, Artificial Sequence; identical to SEQ ID NO: 94493
  derived and/or modified CDS sequence (opt1) from neuraminidase__InfluenzaB__EPI544258

SEQ ID NO: 94496 - RNA, 1401 nt, Artificial Sequence; identical to SEQ ID NO: 94398
  derived and/or modified CDS sequence (opt1) from neuraminidase__InfluenzaB__EPI592698

SEQ ID NO: 94497 - RNA, 1401 nt, Artificial Sequence; identical to SEQ ID NO: 94398
  derived and/or modified CDS sequence (opt1) from neuraminidase__InfluenzaB__EPI592706

SEQ ID NO: 94498 - RNA, 1401 nt, Artificial Sequence
  derived and/or modified CDS sequence (opt1) from neuraminidase__InfluenzaB__EPI693093
augcugcccagcaccauccagacccucacgcuguuccugaccuccggcggggugcuccugagccuguacgucuccgccagccucuccuaccugcuguacagcgacauccuccugaaguucucccgcaccgaggugaccgccccgaucaugccccuggacugcgcgaacgccagcaacgugcaggccgucaaccgguccgccacgaagggcgugacgccccuccugcccgagccggaguggaccuacccccgccugagcugccccggguccaccuuccagaaggcccuccugaucagcccccaccgguucggcgagaccaaggggaacuccgcgccgcugaucauccgcgagcccuucaucgccugcggccccaaggagugcaagcacuucgcccucacccacuacgccgcgcagcccggcggguacuacaacggcacccgggaggaccgcaacaagcugcggcaccugaucagcgugaagcucgggaagaucccgaccgucgagaacuccaucuuccacauggccgccuggagcggcuccgccugccacgacgggcgcgaguggacguacaucggcguggacggccccgacagcaacgcccugcugaagaucaaguacggggaggcguacaccgacaccuaccacuccuacgccaagaacauccuccggacccaggagagcgccugcaacugcaucggcggggacugcuaccugaugaucacggacggccccgccagcggcaucuccgagugccgcuuccugaagauccgggaggggcgcaucaucaaggagaucuuccccaccggccgggugaagcacaccgaggagugcacgugcggguucgccagcaacaagaccaucgagugcgcgugccgcgacaacuccuacaccgccaagcggccguucgucaagcucaacguggagaccgacaccgccgagauccgccugaugugcacgaagaccuaccuggacacgccccggcccaacgacggcagcaucaccgggcccugcgaguccgacggcgacgagggcagcgggggcaucaagggcggguucgugcaccagcgcauggaguccaagaucgggcggugguacagccgcaccauguccaagaccaagcggaugggcaugggccucuacgucaaguacgacggggacccguggaccgacagcgaggcccuggcccuguccggcgugauggugagcauggaggagcccgggugguacuccuucggcuucgagaucaaggacaagaagugcgacguccccugcaucgggaucgagauggugcacgacggcggcaagaccacguggcacagcgcggccaccgccaucuacugccucaugggguccggccagcugcugugggacaccgugaccggggucaacaugacgcucuga

SEQ ID NO: 94499 - RNA, 1401 nt, Artificial Sequence
  derived and/or modified CDS sequence (opt1) from neuraminidase__InfluenzaB__EPI678795
augcugcccagcaccauccagacccucacgcuguuccugaccuccggcggggugcuccugagccuguacgucuccgccagccucuccuaccugcuguacagcgacauccuccugaaguucuccccgaccgagaucaccgcccccacgaugccccuggacugcgcgaacgccagcaacgugcaggccgugaaccgcuccgccaccaagggcgucaccuuccuccugcccgagccggaguggaccuacccccggcugagcugccccggguccacguuccagaaggcccuccugaucagcccccaccgcuucggcgagaccaaggggaacuccgcgccgcugaucauccgggagcccuucguggccugcggccccaacgagugcaagcacuucgcccucacccacuacgccgcgcagcccggcggguacuacaacggcacccgcggggaccggaacaagcugcgccaccugaucagcgugaagcucggcaagaucccgacggucgagaacuccaucuuccacauggccgccuggagcggguccgccugccacgacggcaaggaguggaccuacaucggcguggacgggcccgacaacaacgcccugcugaaggugaaguacggcgaggcguacaccgacaccuaccacagcuacgccaacaacauccuccggacgcaggaguccgccugcaacugcaucgggggcaacugcuaccugaugaucaccgacggcagcgccagcggggucuccgagugccgcuuccugaagauccgggagggccgcaucaucaaggagaucuuccccaccgggcgggugaagcacaccgaggagugcacgugcggcuucgccagcaacaagaccaucgagugcgcgugccgcgacaaccgguacaccgccaagcgccccuucgugaagcucaacgucgagaccgacacggccgagauccggcugaugugcaccgacaccuaccuggacaccccgcgccccaacgacggguccaucacgggccccugcgagagcgacggcgacaagggguccggcgggaucaagggcggguucgugcaccagcggaugaaguccaagaucggccgcugguacagccggaccaugagcaagaccgagcgcaugggcauggggcucuacgugaaguacggcgggaaccccugggccgacuccgacgcccugaccuucagcggcgucaugguguccaugaaggagccggggugguacagcuucggcuucgagaucaaggacaagaagugcgacgugcccugcaucggcaucgagaugguccacgacgggggcaaggagacguggcacuccgcggccaccgccaucuacugccugauggggagcggccagcuccugugggacaccgugaccggcguggacauggcccuguga

SEQ ID NO: 94500 - RNA, 1401 nt, Artificial Sequence; identical to SEQ ID NO: 94499
  derived and/or modified CDS sequence (opt1) from neuraminidase__InfluenzaB__EPI721063

SEQ ID NO: 94501 - RNA, 1401 nt, Artificial Sequence; identical to SEQ ID NO: 92919
  derived and/or modified CDS sequence (opt1) from neuraminidase__InfluenzaB__EPI328903

SEQ ID NO: 94502 - RNA, 1401 nt, Artificial Sequence
  derived and/or modified CDS sequence (opt1) from neuraminidase__InfluenzaB__EPI543192
augcugcccagcaccauccagacccucacgcuguuccugaccuccggcggggugcuccugagccuguacgucuccgccagccucuccuaccugcuguaccucgacauccugcugaaguucccgagcaccgagaucaccgcccccacgaugccccucgacugcgcgaacgccuccaacgugcaggccgugaaccgcagcgccaccaagggcgucacccugcugcuccccgagccggaguggaccuacccccggcuguccugccccgggagcacguuccagaaggcccugcucaucagcccccaccgcuucggcgagaccaaggggaacuccgcgccgcugaucauccgggagcccuucaucgccugcggccccaaggagugcaagcacuucgcccugacccacuacgccgcgcagcccggcggguacuacaacggcacccgcggggaccggaacaagcuccgccaccugaucuccgugaagcugggcaagaucccgacgguggagaacagcaucuuccacauggccgccugguccgggagcgccugccacgacggcaaggaguggaccuacaucggcgucgacgggcccgacaacaacgcccuccugaagaucaaguacggcgaggcguacaccgacaccuaccacuccuacgccaacaacauccugcggacgcaggagagcgccugcaacugcaucgggggcaacugcuaccucaugaucaccgacggcuccgccagcggggugagcgagugccgcuuccugaagauccgggagggccgcaucaugaaggagaucuuccccaccgggcggacccagcacacggaggagugcacgugcggcuucgccuccaacaagaccaucgagugcgcgugccgcgacaacagcuacaccgccaagcggcccuucgugaagcugaacgucgagaccgacaccgccgagauccgccucaugugcaccaagaccuaccuggacacgccgcggcccgacgacggguccaucaccggccccugcgagagcaacggcgggaagggcuccgggggcaucaagggcggguucgugcaccagcgcauggccagcaagaucggccggugguacucccgcaccaugagcaagaccgagcggaaggggaugggccuguacaucaaguacaacggggaccccugggccgacuccgacgcgcucacguucagcggcgugauggucuccauggaggagccggggugguacagcuucggcuucgagaucaaggacaagaagugcgacgugcccugcaucggcaucgagauggugcacgacgggggcaaggagaccuggcacuccgccgccaccgccaucuacugccugauggggagcggccagcugcucugggacaccgucacgggcgugaacaugacccuguga

SEQ ID NO: 94503 - RNA, 1401 nt, Artificial Sequence; identical to SEQ ID NO: 94502
  derived and/or modified CDS sequence (opt1) from neuraminidase__InfluenzaB__EPI500360

SEQ ID NO: 94504 - RNA, 1401 nt, Artificial Sequence
  derived and/or modified CDS sequence (opt1) from neuraminidase__InfluenzaB__EPI543186
augcugcccagcaccauccagacccucacgcuguuccugaccuccggcggggugcuccugagccuguacgucuccgccagccucuccuaccugcuguacagcgacauccuccugaaguucucccgcaccgaggugaccgccccgaucaugccccuggacugcgcgaacgccagcaacgugcaggccgucaaccgguccgccacgaagggcgugacgccccuccugcccgagccggaguggaccuacccccgccugagcugccccggguccaccuuccagaaggcccuccugaucagcccccaccgguucggcgagaccaaggggaacuccgcgccgcugaucauccgcgagcccuucaucgccugcggccccaaggagugcaagcacuucgcccucacccacuacgccgcgcagcccggcggguacuacaacggcacccgggaggaccgcaacaagcugcggcaccugaucagcgugaagcucgggaagaucccgaccgucgagaacuccaucuuccacauggccgccuggagcggcuccgccugccacgacgggcgcgaguggacguacaucggcguggacggccccgacagcaacgcccugcugaagaucaaguacggggaggcguacaccgacaccuaccacuccuacgccaagaacauccuccggacccaggagagcgccugcaacugcaucggcggggacugcuaccugaugaucacggacggccccgccagcggcaucuccgagugccgcuuccugaagauccgggaggggcgcaucaucaaggagaucuuccccaccggccgggugaagcacaccgaggagugcacgugcggguucgccagcaacaagaccaucgagugcgcgugccgcgacaacuccuacaccgccaagcggccguucgucaagcucaacguggagaccgacaccgccgagauccgccugaugugcacgaagaccuaccuggacacgccccggcccaacgacggcagcaucaccgggcccugcgaguccgacggcgacgagggcagcgggggcaucaagggcggguucgugcaccagcgcauggccuccaagaucgggcggugguacagccgcaccauguccaagaccaagcggaugggcaugggccucuacgucaaguacgacggggacccguggaccgacagcgaggcccuggcgcuguccggcgugauggugagcauggaggagcccgggugguacuccuucggcuucgagaucaaggacaagaagugcgacguccccugcaucgggaucgagauggugcacgacggcggcaagaccacguggcacagcgccgccaccgugaucuacugccucaugggguccggccagcugcugugggacaccgucaccggggugaacaugacgcucuga

SEQ ID NO: 94505 - RNA, 1401 nt, Artificial Sequence; identical to SEQ ID NO: 94504
  derived and/or modified CDS sequence (opt1) from neuraminidase__InfluenzaB__EPI536448

SEQ ID NO: 94506 - RNA, 1401 nt, Artificial Sequence
  derived and/or modified CDS sequence (opt1) from neuraminidase__InfluenzaB__NP_056663
augcugcccagcaccgugcagacccucacgcugcugcucaccuccggcgggguccugcugagccucuacguguccgccagccuguccuaccugcucuacagcgacgugcugcugaaguucuccagcaccaagaccacggccccgaccaugucccucgagugcaccaacgcgagcaacgcccagaccgucaaccacuccgccacgaaggagaugaccuucccgccgcccgagcccgaguggaccuacccccgccugagcugccagggcuccaccuuccagaaggcccugcucaucagcccccaccgguucggggagaucaagggcaacuccgcgccccugaucauccgcgagcccuucguggccugcgggcccaaggagugccggcacuucgcccugacgcacuacgccgcccagcccggcggcuacuacaacgggacccgcaaggaccggaacaagcuccgccaccuggugagcgucaagcugggcaagauccccaccguggagaacuccaucuuccacauggcggccuggagcggguccgccugccacgacggccgggaguggaccuacaucgggguggacggcccggacaacgacgcccucgucaagaucaaguacggcgaggccuacacggacaccuaccacagcuacgcgcacaacauccugcgcacccaggagagcgccugcaacugcaucgggggcgacugcuaccugaugaucaccgacggguccgccagcggcaucuccaagugccgguuccucaagauccgcgagggccggaucaucaaggagauccugcccacggggcgcguggagcacaccgaggagugcacgugcggcuucgccagcaacaagaccaucgagugcgccugccgggacaacuccuacaccgcgaagcgccccuucgugaagcugaacgucgagaccgacaccgccgagauccggcucaugugcaccaagacguaccuggacacgccccgcccggacgacgggagcaucgccggccccugcgaguccaacggggacaaguggcugggcggcaucaagggcggguucgugcaccagcggauggccagcaagaucgggcgcugguacucccggaccaugagcaagaccaaccgcaugggcauggagcucuacgugaaguacgacggggaccccuggaccgacuccgacgcccugacccugagcggcgucaugguguccaucgaggagcccggcugguacagcuucggguucgagaucaaggacaagaagugcgacgugccgugcaucggcaucgagaugguccacgacgggggcaaggacaccuggcacuccgcggccaccgccaucuacugccucauggggagcggccagcugcugugggacacggugaccggcguggacauggcccucuga

SEQ ID NO: 94507 - RNA, 1401 nt, Artificial Sequence
  derived and/or modified CDS sequence (opt1) from neuraminidase__InfluenzaB__ABG85180
augcugcccagcaccgugcagacccucacgcugcugcucaccuccggcgggguccugcugagccucuacguguccgccagccuguccuaccugcucuacagcgacgugcugcugaaguucuccagcaccaagaccacggccccgaccaugucccucgagugcaccaacgcgagcaacgcccagaccgucaacuacuccgccacgaaggagaugaccuucccgccgcccgagcccgaguggaccuacccccgccugagcugccagggcuccaccuuccagaaggcccugcucaucagcccccaccgguucggggagaucaagggcaacuccgcgccccugaucauccgcgagcccuucguggccugcgggcccaaggagugccggcacuucgcccugacgcacuacgccgcccagcccggcggcuacuaccacgggacccgcaaggaccggaacaagcuccgccaccuggugagcgucaagcugggcaagauccccaccguggagaacuccaucuuccacauggcggccuggagcggguccgccugccacgacggccgggaguggaccuacaucgggguggacggcccggacaacgacgcccucgucaagaucaaguacggcgaggccuacacggacaccuaccacagcuacgcgcacaacauccugcgcacccaggagagcgccugcaacugcaucgggggcgacugcuaccugaugaucaccgacggguccgccagcggcaucuccaagugccgguuccucaagauccgcgagggccggaucaucaaggagauccugcccacggggcgcguggagcacaccgaggagugcacgugcggcuucgccagcaacaagaccaucgagugcgccugccgggacaacuccuacaccgcgaagcgccccuucgugaagcugaacgucgagaccgacaccgccgagauccggcucaugugcaccaagacguaccuggacacgccccgcccggacgacgggagcaucgccggccccugcgaguccaacggggacaagggccugggcgggaucaagggcggguucgugcaccagcggauggccuucaagaucggccgcugguacagccggaccauguccaagaccaaccgcauggggauggagcucuacgugaaguacgacggcgaccccuggaccgacagcgacgcccugacccuguccggcgucauggugagcaucgaggagcccgggugguacuccuucggcuucgagaucaaggacaagaagugcgacgugccgugcaucgggaucgagaugguccacgacggcggggaggacaccuggcacagcgcggccaccgccaucuacugccucaugggcuccggccagcugcugugggacacggugaccgggaucgacauggcccucuga

SEQ ID NO: 94508 - RNA, 1401 nt, Artificial Sequence; identical to SEQ ID NO: 94397
  derived and/or modified CDS sequence (opt1) from neuraminidase__InfluenzaB__EPI376345

SEQ ID NO: 94509 - RNA, 1401 nt, Artificial Sequence; identical to SEQ ID NO: 94397
  derived and/or modified CDS sequence (opt1) from neuraminidase__InfluenzaB__EPI368424

SEQ ID NO: 94510 - RNA, 1401 nt, Artificial Sequence
  derived and/or modified CDS sequence (opt1) from neuraminidase__InfluenzaB__EPI331150
augcugcccagcaccauccagacccucacgcuguuccugaccuccggcggggugcuccugagccuguacgucuccgccagccucuccuaccugcuguacagcgacauccuccugaaguucuccccgaccgagaucaccgcccccacgaugccccuggacugcgcgaacgccagcaacgugcaggccaugaaccgcuccgccaccaagggcgugacccuccugcugcccgagccggaguggaccuacccccggcucagcugccccggguccacguuccagaaggcccugcugaucagcccccaccgcuucggcgagaccaaggggaacuccgcgccgcucaucauccgggagcccuucaucgccugcggccccaacgagugcaagcacuucgcccugacccacuacgccgcgcagcccggcggguacuacaacggcacccgcggggaccggaacaagcugcgccaccucaucagcgucaagcugggcaagaucccgacgguggagaacuccaucuuccacauggccgccuggagcggguccgccugccacgacggcaaggaguggaccuacaucggcguggacgggcccgacaacaacgcccugcucaaggucaaguacggcgaggcguacaccgacaccuaccacagcuacgccaacaagauccugcggacgcaggaguccgccugcaacugcaucgggggcaacugcuaccugaugaucaccgacggcagcgccagcgggguguccgagugccgcuuccucaagauccgggagggccgcaucaucaaggagaucuuccccaccgggcgggugaagcacaccgaggagugcacgugcggcuucgccagcaacaagaccaucgagugcgcgugccgcgacaacuccuacaccgccaagcggcccuucgucaagcugaacguggagaccgacacggccgagauccgccugaugugcaccgacaccuaccucgacaccccgcggcccaacgacgggagcaucacgggccccugcgaguccgacggcgacaaggggagcggcgggaucaagggcggguucgugcaccagcgcauggaguccaagaucggccggugguacagccgcaccauguccaagaccgagcggaugggcauggggcuguacgucaaguacgacggcgaccccugggccgacagcgacgcccuggcguucuccggggugauggugagcaugaaggagccgggcugguacuccuucggguucgagaucaaggacaagaagugcgacguccccugcaucggcaucgagauggugcacgacggcgggaaggagaccuggcacagcgccgccacggccaucuacugccucaugggcuccgggcagcugcugugggacaccgugaccggcgucgacauggcccucuga

SEQ ID NO: 94511 - RNA, 1401 nt, Artificial Sequence; identical to SEQ ID NO: 94510
  derived and/or modified CDS sequence (opt1) from neuraminidase__InfluenzaB__EPI358089

SEQ ID NO: 94512 - RNA, 1401 nt, Artificial Sequence; identical to SEQ ID NO: 92656
  derived and/or modified CDS sequence (opt1) from neuraminidase__InfluenzaB__ABL76698

SEQ ID NO: 94513 - RNA, 1401 nt, Artificial Sequence
  derived and/or modified CDS sequence (opt1) from neuraminidase__InfluenzaB__AAD42328
augcugcccagcaccauccagacccucacgcuguuccugaccuccggcggggugcuccugagccuguacgucuccgccagccucuccuaccugcuguacagcgacauccuccugaaguucuccccgaccgagaucaccgcccccacgaugccccuggacugcgcgaacgccagcaacgugcaggccgugaaccgcuccgccaccaagggcaugacccuccugcugcccgagccggaguggaccuacccccggcucagcugccccggguccacguuccagaaggcccugcugaucagcccccaccgcuucggcgagacccgggggaacuccgcgccgcucaccauccgcgagcccuucaucgccugcggccccaaggagugcaagcacuucgcccugacccacuacgccgcgcagcccggcggguacuacaacggcacgcgggaggaccgcaacaagcugcggcaccucaucagcgucaagcuggggaagaucccgaccguggagaacuccaucuuccacauggccgccuggagcggcuccgccugccacgacgggcgcgaguggaccuacaucggcguggacggccccgacagcaacgcccugaucaagaucaaguacggggaggcguacaccgacacguaccacuccuacgccaacaacauccuccggacccaggagagcgccugcaacugcaucggcggggacugcuaccugaugaucaccgacggcagcgccuccggcaucagcaagugccgcuuccugaagauccgggaggggcgcaucaucaaggagaucuuccccaccggccgggucgagcacacggaggagugcacgugcggguucgccuccaacaagaccaucgagugcgcgugccgcgacaacagcuacaccgccaagcggcccuucgugaagcucaacguggagaccgacaccgccgagauccgccugaugugcaccgagaccuaccuggacacgccgcggcccgacgacggcuccaucaccgggcccugcgagagcaacggcgacaagggccgcgggggcaucaagggcggguucguccaccagcggauggccuccaagaucgggcgcugguacagccggaccauguccaagaccaagcgcaugggcauggagcucuacgugaaguacgacggcgaccccuggaucgacagcgacgcccuggcgccguccggggugauggucagcauggaggagcccggcugguacuccuucggguucgagaucaaggacaagaagugcgacgugcccugcaucggcaucgagauggugcacgacgggggcaagaagacguggcacagcgccgccaccgccaucuacugccugaugggcuccgggcagcuccugugggacaccgucaccggcguggaccgcagcguguga

SEQ ID NO: 94514 - RNA, 1401 nt, Artificial Sequence; identical to SEQ ID NO: 94199
  derived and/or modified CDS sequence (opt1) from neuraminidase__InfluenzaB__EPI541349

SEQ ID NO: 94515 - RNA, 1401 nt, Artificial Sequence; identical to SEQ ID NO: 94398
  derived and/or modified CDS sequence (opt1) from neuraminidase__InfluenzaB__EPI541759

SEQ ID NO: 94516 - RNA, 1401 nt, Artificial Sequence; identical to SEQ ID NO: 94491
  derived and/or modified CDS sequence (opt1) from neuraminidase__InfluenzaB__EPI826201

SEQ ID NO: 94517 - RNA, 1401 nt, Artificial Sequence; identical to SEQ ID NO: 94230
  derived and/or modified CDS sequence (opt1) from neuraminidase__InfluenzaB__EPI477398

SEQ ID NO: 94518 - RNA, 1401 nt, Artificial Sequence; identical to SEQ ID NO: 94230
  derived and/or modified CDS sequence (opt1) from neuraminidase__InfluenzaB__EPI492570

SEQ ID NO: 94519 - RNA, 1401 nt, Artificial Sequence; identical to SEQ ID NO: 94230
  derived and/or modified CDS sequence (opt1) from neuraminidase__InfluenzaB__EPI498339

SEQ ID NO: 94520 - RNA, 1401 nt, Artificial Sequence; identical to SEQ ID NO: 94451
  derived and/or modified CDS sequence (opt1) from neuraminidase__InfluenzaB__EPI538118

SEQ ID NO: 94521 - RNA, 1401 nt, Artificial Sequence; identical to SEQ ID NO: 94451
  derived and/or modified CDS sequence (opt1) from neuraminidase__InfluenzaB__EPI538124

SEQ ID NO: 94522 - RNA, 1401 nt, Artificial Sequence; identical to SEQ ID NO: 94451
  derived and/or modified CDS sequence (opt1) from neuraminidase__InfluenzaB__EPI556421

SEQ ID NO: 94523 - RNA, 1401 nt, Artificial Sequence; identical to SEQ ID NO: 94451
  derived and/or modified CDS sequence (opt1) from neuraminidase__InfluenzaB__EPI614609

SEQ ID NO: 94524 - RNA, 1401 nt, Artificial Sequence; identical to SEQ ID NO: 92695
  derived and/or modified CDS sequence (opt1) from neuraminidase__InfluenzaB__BAB32609

SEQ ID NO: 94525 - RNA, 1401 nt, Artificial Sequence; identical to SEQ ID NO: 92841
  derived and/or modified CDS sequence (opt1) from neuraminidase__InfluenzaB__EPI271544

SEQ ID NO: 94526 - RNA, 1401 nt, Artificial Sequence; identical to SEQ ID NO: 92841
  derived and/or modified CDS sequence (opt1) from neuraminidase__InfluenzaB__AFH57957

SEQ ID NO: 94527 - RNA, 1401 nt, Artificial Sequence; identical to SEQ ID NO: 92841
  derived and/or modified CDS sequence (opt1) from neuraminidase__InfluenzaB__EPI294881

SEQ ID NO: 94528 - RNA, 1401 nt, Artificial Sequence; identical to SEQ ID NO: 92696
  derived and/or modified CDS sequence (opt1) from neuraminidase__InfluenzaB__ABL77259

SEQ ID NO: 94529 - RNA, 1575 nt, Artificial Sequence
  derived and/or modified CDS sequence (opt1) from glycoprotein__RABV__AB009663.2
auggugccccaggcccugcuccuggucccgauccugggcuucagccucugcuucgggaaguuccccaucuacaccauccccgacacccugggccccugguccccgaucgacauccaccaccugagcugccccaacaaccucgugguggaggacgaggggugcacgaaccuguccggcuucagcuacauggagcugaaggucggguacaccuccgccaucaaggugaacggcuucacgugcaccggcguggucaccgaggcggagaccuacaccaacuucgugggguacgugaccacgaccuucaagcgcaagcacuuccggcccacccccgacgccugccgcgccgccuacaacuggaagauggccggcgacccgcgguacgaggagagccuccacucccccuaccccgacuaccacuggcugcgcaccgucaagacgaccaaggagagccuggugaucaucucccccagcguggcggaccucgacccguacgacaacucccugcacagccgggucuuccccuccgggaagugcagcggcaucacccgcuccagcguguacugcuccaccaaccacgacuacacgguguggaugcccgagauccugcggcucgggaccagcugcgacaucuucaccaacucccgcggcaagcgggucagcaagggcagcaccacgugcggguucaucgacgagcgcggccuguacaagucccugaagggggccugcaagcucaagcugugcggcgugcugggccuccggcugauggacgggaccugggugagcaugcagaccuccaacgagaccaaguggugcccgcccaaccagcuggucaaccuccacgaccugcgcagcgacgagcuggagcaccucgugaucgaggagcuggugaagaagcgggaggagugccuggacgcccucgaguccaucaucacgaccaagagcgucuccuuccgccggcugagccaccuccgcaagcuggugcccggcuucgggaaggccuacaccaucuucaacaagacccugauggaggcggaggcccacuacaaguccgugcggacguggaacgagaucauccccagcaagggcugccugcgcgucgggggccggugccacccccacgugaacggcgucuucuucaacgggaucauccucggcccggacgggcacgugcugauccccgagaugcaguccagccugcuccagcagcacaucgagcugcuggaguccagcgugaucccccucaugcacccccuggccgacccguucaccgucuucaaggacggcgacgagaccgaggacuucaucgaggugcaccuccccgacgugcacgagcaggucuccgggguggaccugggccugcccaacuggggcaaguacgugcugcucagcgccgggacccugaucgcccugguccugaucaucuuccucaugacgugcugccgcaagguggaccggcccgaguccacccagcgcagccugcgcggcaccgggcggaacguguccgucaccagccagagcggcaaguucaucaacuccugggagagcuacaaguccgggggcgagacgggccuguga

SEQ ID NO: 94530 - RNA, 1575 nt, Artificial Sequence
  derived and/or modified CDS sequence (opt1) from glycoprotein__RABV__AB044824.1
auggugccccaggcccugcuccuggucccgauccugggcuucagcuccugcuucgggaaguuccccaucuacaccauccccgacacccucggccccuggagcccgaucgacauccaccaccuguccugccccaacaaccuggugguggaggacgaggggugcacgaaccucagcggcuucuccuacauggagcugaaggucggguacaucagcgccaucaaggugaacggcuucacgugcaccggcguggucaccgaggcggagaccuacaccaacuucgugggguacgugaccaccacguucaagcgcaagcacuuccggcccacccccgacgccugccgcgccgccuacaacuggaagauggccggcgacccgcgguacgaggagucccugcacagccccuaccccgacuaccacuggcuccgcaccgucaagaccacgaaggagucccuggugaucaucagccccuccguggcggaccuggacccguacgacaacagccuccacucccgggucuuccccagcgggaagugcuccggcaucaccgugagcuccguguacugcagcaccaaccacgacuacaccgucuggaugcccgagucccugcgccuggggacgagcugcgacaucuucaccaacagccggggcaagcgcgccuccaagggcagcaagaccugcggguucguggacgagcggggccucuacaagucccugaagggggccugcaagcugaagcucugcggcgugcugggccugcgccucauggacgggaccugggucgccaugcagacgagcaacgagaccaaguggugcccgcccgaccagcuggugaaccugcacgaccuccgguccgacgagaucgagcaccuggugaucgaggagcuggucaagaagcgcgaggagugccucgacgcgcuggagagcaucaucaccaccaaguccgugagcuuccggcgccuguccuaccuccggaagcuggugcccggcuucgggaaggccuacacgaucuucaacaagacccugauggaggccgaggcccacuacaagagcguccgcaccuggaacgagaucauccccuccaagggcugccuccgggucgggggccgcugccacccccacgugaacggcguguucuucaacgggaucauccugggcccggacgggcacgugcugauccccgagaugcagagcucccuccugcagcagcacaucgagcugcucgagagcuccgucaucccccugaugcacccccuggccgacccguucaccguguucaaggacggcgacgagacggaggacuucaucgaggugcaccuccccgacguccacgagcaggucagcgggguggaccugggccugcccaacuggggcgaguacgugcuccuguccgcggggacccugaucgcccucaugcugaucaucuuccugaugaccugcugccggaagguggaccgccccgagagcacccagcggucccugcgcggcacggggcgcaacgugagcgucaccagccaguccggcaaguucaucccgagcugggaguccuacaagagcgggggcgagaccggccucuga

SEQ ID NO: 94531 - RNA, 1575 nt, Artificial Sequence
  derived and/or modified CDS sequence (opt1) from glycoprotein__RABV__AB052666.1
augaucccccaggcccugcuguucgugccgcugcuggucuucagccucugcuucggcaaguuccccaucuacaccauccccgacaagcuggggcccugguccccgaucgacauccaccaccugagcugccccaacaaccucgugguggaggacgagggcugcaccaaccuguccggguucagcuacauggagcugaaggucggcuacaucuccgccaucaaggugaacggguucacgugcaccggcguggucaccgaggcggagaccuacacgaacuucgugggcuacgugaccaccaccuucaagcgcaagcacuuccggcccacgcccgacgccugccgcgccgccuacaacuggaagauggccggggacccgcgguacgaggagagccuccacaaccccuaccccgacuaccacuggcugcgcaccgucaagaccaccaaggagucccuggugaucaucagccccuccgugagcgaccucgacccguacgacaagucccugcacagccgggucuuccccuccggcaagugcagcgggaucacgguguccagcaccuacugccccaccaaccacgacuacaccaucuggaugcccgagaacccgcgccugggcacguccugcgacaucuucaccaacagccgggggaagcgcgcguccaagggcagcaagaccugcggcuucguggacgagcgggggcucuacaagagccugaagggcgccugcaagcugaagcucugcgggguccugggccugcgccucauggacggcaccugggccgccauccagacguccgacgaggugaaguggugcccgcccgaccagcuggugaacauccacgacuuccggagcgacgagaucgagcaccuggucguggaggagcucgugaagaagcgcgaggagugccuggacgcgcuggaguccaucaugaccaccaagagcgucuccuuccggcgccucagccaccuccggaagcuggugcccggguucggcaaggccuacaccaucuucaacaagacgcucauggaggccgacgcccacuacaaguccgugcgcaccuggaacgagaucauccccagcaaggggugccugcgggucggcgggcgcugccacccccacgugaacggcgucuucuucaacggcaucauccuggggcccgacggccacgugcucauccccgagaugcaguccagccugcugcagcagcacauggagcuccuggaguccagcgugaucccgcugaugcacccccucgccgaccccuccaccgucuucaaggacggggacgaggcggaggacuucguggaggugcaccuccccgacguccacaagcaggucagcggcguggaccuggggcugccguccuggggcaaguacgugcugaugagcgugggcgccaugaucgcccugaugcucaugaucuuccugaugaccugcugccggaaggccaacggggccgaguccauccagcaccgccugggcgagacggggcggaaggugagcgucaccucccagagcggccgcgugaucagcuccugggagagcuacaaguccgggggcgagaccaagcucuga

SEQ ID NO: 94532 - RNA, 1575 nt, Artificial Sequence
  derived and/or modified CDS sequence (opt1) from glycoprotein__RABV__AB085828.1
auggugccccagguccugcuguucgccccgcugcuggugagcccccucugcuucggcaaguuccccaucuacaccauccccgacaagcuggggccguggucccccaucgaccugcaccaccucagcugccccaacaaccugguggucgaggacgagggcugcaccaaccuguccggguucagcuacauggagcucaaggugggcuacaucuccgccaucaaggugaacggguucacgugcaccggcgucgugaccgaggcggagaccuacacgaacuucgugggcuacgucaccaccaccuucaagcgcaagcacuuccggcccacgccggacgccugccgcgccgccuacaacuggaagauggccggggacccccgguacgaggagagccugcacaaccccuaccccgacuaccacuggcugcgcaccgugaagaccaccaaggagucccucgugaucaucagcccguccgucacggaccuggaccccuacgacaagagccugcacucccggguguuccccggcgggaacugcagcggcaucaccguguccagcaccuacugcuccaccaaccacgacuacacgaucuggaugcccgagaaccuccgccuggggaccagcugcgacaucuucacccacucccggggcaagcgcgcgagcaagggcgacaagaccugcggguucgucgacgagcggggccuguacaagucccucaagggggccugcaagcugaagcugugcggcgugcucggccugcgccugauggacgggacguggguggccaugcagaccagcgacgagaccaaguggugcccgcccggccagcucgucaaccugcacgacuuccggagcgacgagaucgagcaccugguggaggaggagcucgugaagaagcgcgaggagugccuggacgcccuggaguccaucaugaccaccaagagcgucuccuuccggcgccucagccaccuccggaagcuggugcccggguucggcaaggcguacacgaucuucaacaagacccucauggaggccgacgcccacuacaaguccgugcagaccuggaacgagaucauccccagcaaggggugccugcgcgucggcgagcggugccacccgcacgugaacggcgucuucuucaacgggaucauccugggcuccgacgggcacgugcucauccccgagaugcagagcucccugcugcagcagcacauggagcuccuggagagcuccgugaucccccugaugcacccccucgccgacccgagcacggucuucaaggacggcgacgagguggaggacuucguggagguccaccuccccgacgugcacaagcaggucuccgggguggaccugggccugcccaaguggggcaaguacgugcugaugaucgccggggcgcugaucgcccucaugcugaucaucuuccugaugaccugcugccgccgggugaaccgccccgagagcacccaguccaaccugggcgggaccggccggaacgucagcgugccgucccagagcgggaaggugaucuccagcugggagagcuacaaguccggcggcgagacgcgccucuga

SEQ ID NO: 94533 - RNA, 1575 nt, Artificial Sequence
  derived and/or modified CDS sequence (opt1) from glycoprotein__RABV__AB110656.1
auggugccccaggcccuccuguucgucccgcugcuggccuucagcuucugcuucggcaaguuccccaucuacaccauccccgacaagcucgggcccugguccccgaucgacauccaccaccugagcugccccaacaaccuggugguggaggacgagggcugcaccaaccucuccggguucagcuacauggagcugaaggucggcuacaucuccgcgaucaaggugaacggguucacgugcaccggcguggucaccgaggccgagaccuacacgaacuucgugggcuacgugaccaccaccuucaagcgcaagcacuuccggcccacgcccgacgccugccgcagcgccuacaacuggaagauggccggggacccgcgguacgaggagucccugcacaaccccuaccccgacuaccacuggcuccgcaccgucaagaccaccaaggagagccuggugaucaucucccccagcguggcggaccuggacccguacgacaagucccuccacagccgggucuuccccaacggcaagugcuccgggaucacggugagcuccaccuacugcagcaccaaccacgacuacaccaucuggcugcccgagaacccccgccugggcacguccugcgacaucuucaccaacagccgggggaagcgcgccuccaagggcggcaagaccugcggguucguggacgagcggggccucuacaagagccugaagggggccugcaagcugaagcucugcggcguccugggccugcgccucauggacgggaccuggguggccaugcugacgagcgacgagaccaaguggugcccgcccgaccagcuggugaaccuccacgacuuccgguccgacgagaucgagcaccuggucguggaggagcuggugaagaagcgcgaggagugccucgacgcgcuggagagcaucaugaccaccaaguccgucagcuuccggcgccugucccaccuccggaagcuggugcccggcuucgggaaggccuacacgaucuucaacaagacccugauggaggccgacgcccacuacaagagcauccgcaccuggaacgagaucauccccuccaagggcugccuccgggucgggggccgcugccacccgcacgugaacggcguguucuucaacgggaucauccugggccccgacgggcacguccugauccccgagaugcagagcucccuccugcagcagcacauggagcugcucgagagcuccgugaucccccugaugcacccgcuggccgaccccagcaccguguucaaggacggcgacgaggcggaggacuucgucgaggugcaccuccccgacgugcacaagcaggucuccgggguggaccugggccugcccaacuggggcaaguacgugcucaugagcgccgggguccugaucgcccugaugcucacgaucuuccugaugaccugcugccggcgcgugaaccggccggacuccacccagcgcagccugggcaugaccgggcgcaagguguccgucacgagccaguccggcaaggugaucagcagcugggaguccuacaagagcgggggcgagacccggcuguga

SEQ ID NO: 94534 - RNA, 1575 nt, Artificial Sequence
  derived and/or modified CDS sequence (opt1) from glycoprotein__RABV__AB110657.1
auggugccccaggcccugcuguucgucccgcugcuggccuucagcuucugcuucggcaaguuccccaucuacaccauccccgacaagcucgggcccugguccccgaucgacauccaccaccugagcugccccaacaaccuggugguggaggacgagggcugcaccaaccucuccggguucagcuacauggagcugaaggucggcuacaucuccgcgaucaaggugaacggguucacgugcaccggcguggucaccgaggccgagaccuacacgaacuucgugggcuacgugaccaccaccuucaagcgcaagcacuuccggcccacgcccgacgccugccgcagcgccuacaacuggaagauggccggggacccgcgguacgaggagucccugcacaaccccuaccccgacuaccacuggcuccgcaccgucaagaccaccaaggagagccuggugaucaucucccccagcguggcggaccuggacccguacgacaagucccuccacagccgggucuuccccaacggcaagugcuccgggaucacggugagcuccaccuacugcagcaccaaccacgacuacaccaucuggcugcccgagaacccccgccugggcacguccugcgacaucuucaccaacagccgggggaagcgcgccuccaagggcggcaagaccugcggguucguggacgagcggggccucuacaagagccugaagggggccugcaagcugaagcucugcggcguccugggccugcgccucauggacgggaccuggguggccaugcagacgagcgacgagaccaaguggugcccgcccgaccagcuggugaaccugcacgacuuccgguccgacgagaucgagcaccucgucguggaggagcuggugaagaagcgcgaggagugccuggacgcgcucgagagcaucaugaccaccaaguccgucagcuuccggcgccugucccaccuccggaagcucgugcccggcuucgggaaggccuacacgaucuucaacaagacccugauggaggccgacgcccacuacaagagcauccgcaccuggaacgagaucauccccuccaagggcugccugcgggucgggggccgcugccacccgcacgugaacggcguguucuucaacgggaucauccucggccccgacgggcacguccugauccccgagaugcagagcucccugcuccagcagcacauggagcugcuggagagcuccgugaucccccucaugcacccgcuggccgaccccagcaccguguucaaggacggcgacgaggcggaggacuucgucgaggugcaccuccccgacgugcacaagcaggucuccgggguggaccugggccugcccaacuggggcaaguacgugcugaugagcgccgggguccucaucgcccugaugcugacgaucuuccucaugaccugcugccggcgcgugaaccggccggacuccacccagcgcagccugggcaugaccgggcgcaagguguccgucacgagccaguccggcaaggugaucagcagcugggaguccuacaagagcgggggcgagacccggcuguga

SEQ ID NO: 94535 - RNA, 1575 nt, Artificial Sequence
  derived and/or modified CDS sequence (opt1) from glycoprotein__RABV__AB110658.1
auggugccccaggcccugcuguucgucccgcugcuggccuucagcuucugcuucggcaaguuccccaucuacaccauccccgacaagcucgggcccugguccccgaucgacauccaccaccugagcugccccaacaaccuggugguggaggacgagggcugcaccaaccucuccggguucagcuacauggagcugaaggucggcuacaucuccgcgaucaaggugaacggguucacgugcaccggcguggucaccgaggccgagaccuacacgaacuucgugggcuacgugaccaccaccuucaagcgcaagcacuuccggcccacgcccgacgccugccgcagcgccuacaacuggaagauggccggggacccgcgguacgaggagucccugcacaaccccuaccccgacuaccacuggcuccgcaccgucaagaccaccaaggagagccuggugaucaucucccccagcguggcggaccuggacccguacgacaagucccuccacagccgggucuuccccaacggcaagugcuccgggaucacggugagcuccaccuacugcagcaccaaccacgacuacaccaucuggcugcccgagaacccccgccugggcacguccugcgacaucuucaccaacagccgggggaagcgcgccuccaagggcagcaagaccugcggcuucguggacgagcgggggcucuacaagagccugaagggcgccugcaagcugaagcucugcgggguccugggccugcgccucauggacggcaccuggguggccaugcagacguccgacgagaccaaguggugcagcccggaccagcuggugaaccugcacgacuuccgguccgacgagaucgagcaccucgucguggaggagcuggugaagaagcgcgaggagugccuggacgcgcucgagagcaucaugaccaccaaguccgucagcuuccggcgccugucccaccuccggaagcucgugcccggguucggcaaggccuacacgaucuucaacaagacccugauggaggccgacgcccacuacaagagcauccgcaccuggaacgagaucauccccuccaaggggugccugcgggugggcgggcgcugccacccccacgucaacggcguguucuucaacggcaucauccucgggccggacggccacguccugauccccgagaugcagagcucccugcuccagcagcacauggagcugcuggagagcuccgugaucccccucaugcacccccuggccgacccgagcaccguguucaaggacggggacgaggcggaggacuucgucgaggugcaccuccccgacgugcacaagcaggucuccggcguggaccuggggcugcccaacuggggcaaguacgugcugaugagcgccggcguccucaucgcccugaugcugacgaucuuccucaugaccugcugccggcgcgugaaccggcccgacuccacccagcgcagccuggggaugaccggccgcaagguguccgucacgagccagagcgggaaggugaucuccagcugggaguccuacaagagcggcggggagacccggcuguga

SEQ ID NO: 94536 - RNA, 1575 nt, Artificial Sequence
  derived and/or modified CDS sequence (opt1) from glycoprotein__RABV__AB110659.1
auggugccccaggcccugcuguucgucccgcugcuggccuucagcuucugcuucggcaaguuccccaucuacaccauccccgacaagcucgggcccugguccccgaucgacauccaccaccugagcugccccaacaaccuggugguggaggacgagggcugcaccaaccucuccggguucagcuacauggagcugaaggucggcuacaucuccgcgaucaaggugaacggguucacgugcaccggcguggucaccgaggccgagaccuacacgaacuucgugggcuacgugaccaccaccuucaagcgcaagcacuuccggcccacgcccgacgccugccgcagcgccuacaacuggaagauggccggggacccgcgguacgaggagucccugcacaaccccuaccccgacuaccacuggcuccgcaccgucaagaccaccaaggagagccuggugaucaucucccccagcguggcggaccuggacccguacgacaagucccuccacagccgggucuuccccaacggcaagugcuccgggaucacggugagcuccaccuacugcagcaccaaccacgacuacaccaucuggcugcccgagaacccccgccugggcacguccugcgacaucuucaccaacagccgggggaagcgcgccuccaagggcagcaagaccugcggcuucguggacgagcgggggcucuacaagagccugaagggcgccugcaagcugaagcucugcgggguccugggccugcgccucauggacggcaccuggguggccaugcagacguccgacgagaccaaguggugcccgcccgaccagcuggugaaccugcacgacuuccggagcgacgagaucgagcaccucgucguggaggagcuggugaagaagcgcgaggagugccuggacgcgcucgaguccaucaugaccaccaagagcgucuccuuccggcgccugagccaccuccggaagcucgugcccggguucggcaaggccuacacgaucuucaacaagacccugauggaggccgacgcccacuacaaguccauccgcaccuggaacgagaucauccccagcaaggggugccugcgggugggcgggcgcugccacccgcacgucaacggcguguucuucuacggcaucauccucgggcccgacggccacguccugauccccgagaugcaguccagccugcuccagcagcacauggagcugcuggaguccagcgugaucccccucaugcacccgcuggccgaccccuccaccguguucaaggacggggacgaggcggaggacuucgucgaggugcaccuccccgacgugcacaagcaggucagcggcguggaccuggggcugcccaacuggggcaaguacgugcugauguccgccggcguccucaucgcccugaugcugacgaucuuccucaugaccugcugccggcgcgugaaccggccggacagcacccagcgcucccuggggaugaccggccgcaaggugagcgucacgucccagagcgggaaggugaucagcuccugggagagcuacaaguccggcggggagacccggcuguga

SEQ ID NO: 94537 - RNA, 1575 nt, Artificial Sequence
  derived and/or modified CDS sequence (opt1) from glycoprotein__RABV__AB110660.1
auggugccccaggcccugcuguucgucccgcugcuggccuucagcuucugcuucggcaaguuccccaucuacaccauccccgacaagcucgggcccugguccccgaucgacauccaccaccugagcugccccaacaaccuggugguggaggacgagggcugcgcgaaccucuccggguucagcuacauggagcugaaggucggcuacaucuccgccaucaaggugaacggguucacgugcaccggcguggucaccgaggccgagaccuacaccaacuucgugggcuacgugacgaccaccuucaagcgcaagcacuuccggcccacccccgacgccugccgcagcgccuacaacuggaagauggcgggggacccgcgguacgaggagucccugcacaaccccuaccccgacuaccacuggcuccgcacggucaagaccaccaaggagagccuggugaucaucucccccagcguggccgaccuggacccguacgacaagucccuccacagccgggucuuccccaacggcaagugcuccgggaucaccgugagcuccacguacugcagcaccaaccacgacuacaccaucuggcugcccgagaacccccgccugggcaccuccugcgacaucuucacgaacagccgggggaagcgcgccuccaagggcggcaagaccugcggguucguggacgagcggggccucuacaagagccugaagggggccugcaagcugaagcucugcggcguccugggccugcgccucauggacgggaccuggguggcgaugcagaccagcgacgagacgaaguggugcccgcccgaccagcuggugaaccugcacgacuuccgguccgacgagaucgagcaccucgucguggaggagcuggugaagaagcgcgaggagugccuggacgcccucgagagcaucaugaccaccaaguccgucagcuuccggggccugucccaccuccgcaagcucgugcccggguucggcaaggccuacaccaucuucaacaagacgcugauggaggccgacgcccacuacaagagcauccggaccuggaacgagaucauccccuccaaggggugccugaccgugggcggccgcugccacccgcacgucaacgggguguucuucaacggcaucauccucgggcccgacggccacguccugauccccgagaugcagagcucccugcuccagcagcacauggagcugcuggagagcuccgugaucccccucaugcacccgcuggcggaccccagcaccguguucaaggacggggacgaggccgaggacuucgucgaggugcaccuccccgacgugcacaagcaggucuccggcguggaccugggccugcccaacugggggaaguacgugcugaugagcgccggcguccucaucgcccugaugcugacgaucuuccucaugaccugcugccggcgcgugaacgggccggacuccacccagcggagccugggcaugaccgggcgcaagguguccgucacgagccaguccggcaaggugaucagcagcugggaguccuacaagagcggcggggagacccggcuguga

SEQ ID NO: 94538 - RNA, 1575 nt, Artificial Sequence
  derived and/or modified CDS sequence (opt1) from glycoprotein__RABV__AB110661.1
auggugccccaggcccugcuguucgucccgcugcuggccuucagcuucugcuucggcaaguuccccaucuacaccauccccgacaagcucgggcccugguccccgaucgacauccaccaccugagcugccccaacaaccuggugguggaggacgagggcugcaccaaccucuccggguucagcuacauggagcugaaggucggcuacaucuccgcgaucaaggugaacggguucacgugcaccggcguggucaccgaggccgagaccuacacgaacuucgugggcuacgugaccaccaccuucaagcgcaagcacuuccggcccacgcccgacgccugccgcagcgccuacaacuggaagauggccggggacccgcgguacgaggagucccugcacaaccccuaccccgacuaccacuggcuccgcaccgucaagaccaccaaggagagccuggugaucaucucccccagcguggcggaccuggacccguacgacaagucccuccacagccgggucuuccccaacggcaagugcuccgggaucacggugagcuccaccuacugcagcaccaaccacgacuacaccaucuggcugcccgagaacccccgccugggcacguccugcgacaucuucaccaacagccgggggaagcgcgccuccaagggcggcaagaccugcggguucguggacgagcggggccucuacaagagccugaagggggccugcaagcugaagcucugcggcguccugggccugacccucauggacgggacguggguggccaugcagaccagcgacgagaccaaguggugcccgcccgaccagcuggugaaccugcacgacuuccgcuccgacgagaucgagcaccucgucguggaggagcuggugaagaagcgggaggagugccuggacgcgcucgagagcaucaugaccacgaaguccgucagcuuccgccggcugucccaccuccgcaagcucgugcccggcuucgggaaggccuacaccaucuucaacaagacccugauggaggccgacgcccacuacaagagcauccggaccuggaacgagaucauccccuccaagggcugccugcgcgucgggggccggugccacccgcacgugaacggcguguucuuccacgggaucauccucggccccgacgggcacguccugauccccgagaugcagagcucccugcuccagcagcacauggagcugcuggagagcuccgugaucccccucaugcacccgcuggccgaccccagcacgguguucaaggacggcgacgaggcggaggacuucgucgaggugcaccuccccgacgugcacaagcaggucuccgggguggaccugggccugcccaacuggggcaaguacgugcugaugagcgccgggguccucaucgcccugaugcugaccaucuuccucaugaccugcugccgccgggugaaccgcccggacuccacccagcggagccugggcaugacggggcgcaagguguccgucaccagccaguccggcaaggugaucagcagcugggaguccuacaagagcgggggcgagacccgccuguga

SEQ ID NO: 94539 - RNA, 1575 nt, Artificial Sequence
  derived and/or modified CDS sequence (opt1) from glycoprotein__RABV__AB110662.1
augauccugcaggcccuccuguucgugccccugcucaucagcucccugugccugggcaaguucccgaucuacaccauccccgacaagcucgggcccuggagccccaucgacauccaccaccuguccugcccgaacaaccuggucguggaggacgagggcugcaccaaccucagcggguucuccuacauggagcugaaggugggcuacaucagcgccaucaaggucaacggguucacgugcaccggcguggugaccgaggcggagaccuacacgaacuucgucggcuacgugaccaccaccuucaagcgcaagcacuuccggcccauccccgacgccugccgcgccgccuacaacuggaagauggccggggacccccgguacgaggagucccugcagaacccguaccccgacuaccacuggcuccgcacggugaagaccaccaaggagagccugaucaucaucucccccagcgucgcggaccuggaccccuacgacaagucccuccacagccggguguucccgggcgggaagugccugggcaucaccguguccagcacguacugcuccaccaaccacgacuacaccaucuggaugcccgaggagccccgccuggggaccagcugcgacaucuucacguccagcaagggcaagaaggccuccaagggcgggaagaccugcggcuucgucgacgagcgggggcucuacaagagccugaagggcgccugcaagcugaagcucugcggcgugcuggggcugcgccucauggacggcaccugggugagcauccccaccuccgacgacacgaaguggugcccgcccgaccagcuggucaaccugcacgacuuccacagcgacgagaucgagcaccucgugguggaggagcuggucaagaagcgggaggagugccuggacgcccucgaguccaucaugaccaccaagagcguguccuuccgccggcugagcuaccugcgcaagcucgugcccggguucggcaaggcguacaccaucuucaacaagacgcugauggaggccgacgcccacuacaaguccguccggaccuggaacgagaucauccccagcaaggggugccugaaggugcgcgagcggugccacccgcccguggacggcgucuucuucaacggcaucauccucgggcccgacggcaacgugcugauccccgagaugcaguccagccugcuccagcagcacauggagcugcuggaguccagcgucaucccgcucaugcacccccuggccgaccccuccaccguguucaaggagggggacgaggccgaggacuucguggagguccaccuccccgacgugcacaagcagaucagcggcguggaccuggggcugccguccuggggcaaguaccugcucaugaucgcgggcgggcuggccacccugguccugaucaucugcagcauggccugcugccgccggacgaagcgcaccgagucccggcgccggggcagccgcgaguccgagaagaaggugaccgccacgccccagacccgcaagguggucagcagcugggagcucuacaaguccgagggggacgcccggcuguga

SEQ ID NO: 94540 - RNA, 1575 nt, Artificial Sequence
  derived and/or modified CDS sequence (opt1) from glycoprotein__RABV__AB110663.1
augauccugcaggcccuccuguucgugccccugcucaucagcucccugugccugggcaaguucccgaucuacaccauccccgacaagcucgggcccuggagccccaucgacauccaccaccuguccugcccgaacaaccuggucguggaggacgagggcugcaccaaccucagcggguucuccuacauggagcugaaggugggcuacaucagcgccaucaaggucaacggguucacgugcaccggcguggugaccgaggcggagaccuacacgaacuucgucggcuacgugaccaccaccuucaagcgcaagcacuuccggcccauccccgacgccugccgcgccgccuacaacuggaagauggccggggacccccgguacgaggagucccugcagaacccguaccccgacuaccacuggcuccgcacggugaagaccaccaaggagagccugaucaucaucucccccagcgucgcggaccuggaccccuacgacaagucccuccacagccggguguucccgggcgggaagugccugggcaucaccguguccagcacguacugcuccaccaaccacgacuacaccaucuggaugcccgaggagccccgccuggggaccagcugcgacaucuucacguccagcaagggcaagaaggccuccaagggcgggaagaccugcggcuucgucgacgagcgggggcucuacaagagccugaagggcgccugcaagcugaagcucugcggcgugcuggggcugcgccucauggacggcaccugggugagcauccagaccuccgacgacacgaaguggugcccgcccgaccagcuggucaaccugcacgacuuccacagcgacgagaucgagcaccucgugguggaggagcuggucaagaagcgggaggagugccuggacgcccucgaguccaucaugaccaccaagagcguguccuuccgccggcugagcuaccugcgcaagcucgugcccggguucggcaaggcguacaccaucuucaacaagacgcugauggaggccgacgcccacuacaaguccguccggaccuggaacgagaucauccccagcaaggggugccugaaggugcgcgagcggugccacccgcccguggacggcgucuucuucaacggcaucauccucgggcccgacggcaacgugcugauccccgagaugcaguccagccugcuccagcagcacauggagcugcuggaguccagcgucaucccccucaugcacccgcuggccgaccccuccaccguguucaaggagggggacgaggccgaggacuucguggagguccaccuccccgacgugcacaagcagaucagcggcguggaccuggggcugcccuccuggggcaaguaccugcucaugaucgcgggcgggcuggccgcccugguccugaucaucugcagcauggccugcugccgccggaccaagcgcacggagucccggcgccggggcagcggggaguccgagaagaaggugaccgccaccccgcagacccgcaagguggucagcagcugggagcucuacaaguccgagggcgacgcgcgccuguga

SEQ ID NO: 94541 - RNA, 1575 nt, Artificial Sequence
  derived and/or modified CDS sequence (opt1) from glycoprotein__RABV__AB110664.1
augauccugcaggcccuccuguucgugccccugcucaucagcucccugugccugggcaaguucccgaucuacaccauccccgacaagcucgggcccuggagccccaucgacauccaccaccuguccugcccgaacaaccuggucguggaggacgagggcugcaccaaccucagcggguucuccuacauggagcugaaggugggcuacaucagcgccaucaaggucaacggguucacgugcaccggcguggugaccgaggcggagaccuacacgaacuucgucggcuacgugaccaccaccuucaagcgcaagcacuuccggcccauccccgacgccugccgcgccgccuacaacuggaagauggccggggacccccgguacgaggagucccugcagaacccguaccccgacuaccacuggcuccgcacggugaagaccaccaaggagagccugaucaucaucucccccagcgucgcggaccuggaccccuacgacaagucccuccacagccggguguucccgggcgggaagugccugggcaucaccguguccagcacguacugcuccaccaaccacgacuacaccaucuggaugcccgaggagccccgccuggggaccagcugcgacaucuucacguccagcaagggcaagaaggccuccaagggcgggcggaccugcggcuucgucgacgagcgcgggcucuacaagagccugaagggcgccugcaagcugaagcucugcggcgugcuggggcugcggcucauggacggcaccugggugagcauccagaccuccgacgacacgaaguggugcccgcccgaccagcuggucaaccugcacgacuuccacagcgacgagaucgagcaccucgugguggaggagcuggucaagaagcgcgaggagugccuggacgcccucgaguccaucaugaccaccaagagcguguccuuccggcgccugagcuaccugcggaagcucgugcccggguucggcaaggcguacaccaucuucaacaagacgcugauggaggccgacgcccacuacaaguccguccgcaccuggaacgagaucauccccagcaaguggugccugaaggugcgggagcgcugccacccgcccguggacggggucuucuucaacggcaucauccucggccccgacgggaacgugcugauccccgagaugcaguccagccugcuccagcagcacauggagcugcuggaguccagcgucaucccccucaugcacccgcuggccgaccccuccaccguguucaaggagggcgacgaggccgaggacuucguggagguccaccuccccgacgugcacaagcagaucagcgggguggaccugggccugcccuccugggggaaguaccugcucaugaucgcgggcggccuggccacccugguccugaucaucugcagcauggccugcugccggcgcacgaagcggaccgagucccgccggcgcgggagcggcgaguccgagaagaaggugaccgccaccccgcagacgcgcaagguggucagcagcugggagcucuacaaguccgagggggacgcccggcuguga

SEQ ID NO: 94542 - RNA, 1575 nt, Artificial Sequence
  derived and/or modified CDS sequence (opt1) from glycoprotein__RABV__AB110665.1
augauccugcaggcccuccuguucgugccccugcucaucagcucccugugccugggcaaguucccgaucuacaccauccccgacaagcucgggcccuggagccccaucgacauccaccaccuguccugcccgaacaaccuggucguggaggacgagggcugcaccaaccucagcggguucuccuacauggagcugaaggugggcuacaucagcgccaucaaggucuccggguucacgugcaccggcguggugaccgaggcggagaccuacacgaacuucgucggcuacgugaccaccaccuucaagcgcaagcacuuccggcccauccccgacgccugccgcgccgccuacaacuggaagauggccggggacccccgguacgaggagagccugcacaacccguaccccgacuaccacuggcuccgcacggugaagaccaccaaggagucccugaucaucaucagccccuccgucgcggaccuggaccccuacgacaagagccuccacucccggguguucccgggcgggaagugccugggcaucaccgugagcuccacguacugcagcaccaaccacgacuacaccaucuggaugcccgaggagccccgccuggggaccuccugcgacaucuucacgagcuccaagggcaagaaggccagcaagggcgggaagaccugcggcuucgucgacgagcgggggcucuacaagagccugaagggcgccugcaagcugaagcucugcggcgugcuggggcugcgccucauggacggcaccuggguguccauccagaccagcgacaacacgaaguggugcccgcccgaccagcuggucaaccugcacgacuuccacuccgacgagaucgagcaccucgugguggaggagcuggucaagaagcgggaggagugccuggacgcccucgagagcaucaugaccaccaaguccgugagcuuccgccggcuguccuaccugcgcaagcucgugcccggguucggcaaggcguacaccaucuucaacaagacgcugauggaggccgacgcccacuacaagagcguccggaccuggaacgagaucauccccuccaaggggugccugaaggugcgcgagcggugccacccgcccguggacggcgucuucuucaacggcaucauccucgggcccgacggcaacgugcugauccccgagaugcagagcucccugcuccagcagcacauggagcugcuggagagcuccgucaucccccucaugcacccgcuggccgaccccagcaccguguucaaggagggggacgaggccgaggacuucguggagguccaccuccccgacgugcacaagcagaucuccggcguggaccuggggcugcccagcuggggcaaguaccugcucaugaucgcgggcgggcuggccacccugguccugaucaucugcuccauggccugcugccgccggacgaagcgcaccgagagccggcgccggggcuccggggagagcgagaagaaggugaccgugaccccgcagacgggcaaggucgugagcuccugggagcucuacaagagcgagggggacgcccgccuguga

SEQ ID NO: 94543 - RNA, 1575 nt, Artificial Sequence
  derived and/or modified CDS sequence (opt1) from glycoprotein__RABV__AB110666.1
augauccugcaggcccuccuguucgugcccuuccugaucagcucccucugccugggcaaguucccgaucuacaccauccccgacaagcuggggcccuggagccccaucgacauccaccaccucuccugcccgaacaaccuggucguggaggacgagggcugcaccaaccugagcggguucuccuacauggagcucaaggugggcuacaucagcgccaucaaggucaacggguucacgugcaccggcguggugaccgaggcggagaccuacacgaacuucgucggcuacgugaccaccaccuucaagcgcaagcacuuccggcccauccccgacgccugccgcgccgccuacaacuggaagauggccggggacccccgguacgaggagucccugcagaacccguaccccgacuaccacuggcugcgcacggugaagaccaccaaggagagccucaucaucaucucccccagcgucgcggaccuggaccccuacgacaagucccugcacagccggguguucccgggcgggaagugccucggcaucaccguguccagcacguacugcuccaccaaccacgacuacaccaucuggaugcccgaggagccccgccuggggaccagcugcgacaucuucacguccagcaagggcaagaaggccuccaagggcgggaagaccugcggcuucgucgacgagcgggggcuguacaagagccucaagggcgccugcaagcugaagcugugcggcgugcucgggcugcgccugauggacggcaccugggugagcauccccaccuccgacgacacgaaguggugcccgcccgaccagcucgucaaccugcacgacuuccacagcgacgagaucgagcaccuggugguggaggagcucgucaagaagcgggaggagugccuggacgcccuggaguccaucaugaccaccaagagcguguccuuccgccggcucagcuaccugcgcaagcuggugcccggguucggcaaggcguacaccaucuucaacaagacgcucauggaggccgacgcccacuacaaguccguccggaccuggaacgagaucauccccagcaaggggugccugaaggugcgcgagcggugccacccgcccguggacggcgucuucuucaacggcaucauccuggggcccgacggcaacgugcucauccccgagaugcaguccagccugcugcagcagcacauggagcuccuggaguccagcgucaucccgcugaugcacccccucgccgaccccuccaccguguucaaggagggggacgaggccgaggacuucguggagguccaccuccccgacgugcacaagcagaucagcggcguggaccuggggcugccguccuggggcaaguaccugcugaugaucgcgggcgggcucgccacccugguccugaucaucugcagcauggccugcugccgccggacgaagcgcaccgagucccggcgccggggcagcggggaguccggcgagaaggugaccaccacgccccagacccgcaagguggucagcagcugggagcuguacaaguccgagggggacgcccgccucuga

SEQ ID NO: 94544 - RNA, 1575 nt, Artificial Sequence
  derived and/or modified CDS sequence (opt1) from glycoprotein__RABV__AB110667.1
augauccugcaggcccuccuguucgugccccugcucaucagcuccagcugccugggcaaguucccgaucuacaccauccccgacaagcuggggcccuggucccccaucgacauccaccaccucagcugcccgaacaaccuggucguggaggacgagggcugcaccaaccuguccggguucagcuacauggagcucaaggugggcuacaucuccgccaucaaggucaacggguucacgugcaccggcguggugaccgaggcggagaccuacacgaacuucgucggcuacgugaccaccaccuucaagcgcaagcacuuccaccccauccccgacgccugccgggccgccuacaacuggaagauggccggggacccccgcuacgaggagagccugcagaacccguaccccgacuaccacuggcugcggacggugaagaccaccaaggagucccucaucaucaucagccccuccgucgcggaccuggaccccuacgacaagagccugcacucccgcguguucccgggcgggaagugccucggcaucaccgugagcuccacguacugcagcaccaaccacgacuacaccaucuggaugcccgaggagccccggcuggggaccuccugcgacaucuucacgagcuccaagggcaagaaggccagcaagggcgggaagaccugcggcuucgucgacgagcgcgggcuguacaagagccucaagggcgccugcaagcugaagcugugcggcgugcucgggcugcggcugauggacggcaccuggguguccauccagaccagcgacgacacgaaguggugcccgcccgaccagcucgucaaccugcacgacuuccacuccgacgagaucgagcaccuggugguggaggagcucgucaagaagcgcgaggagugccuggacgcccuggagagcaucaugaccaccaaguccgugagcuuccggcgccucuccuaccugcggaagcuggugcccggguucggcaaggcguacaccaucuucaacaagacgcucauggaggccgacgcccacuacaagagcguccgcaccuggaacgagaucauccccuccaaggggugccugaaggugcgggagcgcugccacccgcccguggacggcgucuucuucaacggcaucauccuggggcccgacggcaacgugcucauccccgagaugcagagcucccugcugcagcagcacauggagcuccuggagagcuccgucaucccccugaugcacccgcucgccgaccccagcaccguguucaaggagggggacgaggccgaggacuucguggagguccaccuccccgacgugcacaagcagaucuccggcguggaccuggggcugcccagcuggggcaaguaccugcugaugaucgcgggcgggcucgccacccugguccugaucaucugcuccauggccugcugccggcgcacgaagcggaccgagagccgccggcgcggcuccggggagagcggcaagaaggccaccgccaccccgcagacgcggaagguggugagcuccugggagcuguacaagagcgagggggacgcgcgccucuga

SEQ ID NO: 94545 - RNA, 1575 nt, Artificial Sequence
  derived and/or modified CDS sequence (opt1) from glycoprotein__RABV__AB110668.1
augauccugcaggcccuccuguucgugccccugcucaucagcucccugugccugggcaaguucccgaucuacaccauccccgacaagcucgggcccuggagccccaucgacauccaccaccuguccugcccgaacaaccuggucguggaggacgagggcugcaccaaccucagcggguucuccuacauggagcugaaggugggcuacaucagcgccaucaaggucaacggguucacgugcaccggcguggugaccgaggcggagaccuacacgaacuucgucggcuacgugaccaccaccuucaagcgcaagcacuuccggcccauccccgacgccugccgcgccgccuacaacuggaagauggccggggacccccgguacgaggagucccugcagaacccguaccccgacuaccacuggcuccgcacggugaagaccaccaaggagagccugaucaucaucucccccagcgucgcggaccuggaccccuacgacaagucccuccacagccggguguucccgggcgggaagugccugggcaucaccguguccagcacguacugcuccaccaaccacgacuacaccaucuggaugcccgaggagccccgccuggggaccagcugcgacaucuucacguccagcaagggcaagaaggccuccaagggcgggaagaccugcggcuucgucgacgagcgggggcucuacaagagccugaagggcgccugcaagcugaagcucugcggcgugcuggggcugcgccucauggacggcaccugggugagcauccagaccuccgacgacacgaaguggugcccgcccgaccagcuggucaaccugcacgacuuccacagcgacgagaucgagcaccucgugguggaggagcuggucaagaagcgggaggagugccuggacgcccucgaguccaucaugaccaccaagagcguguccuuccgccggcugagcuaccugcgcaagcucgugcccggguucggcaaggcguacaccaucuucaacaagacgcugauggaggccgacgcccacuacaaguccguccggaccuggaacgagaucauccccagcaaggggugccugaaggugcgcgagcggugccacccgcccguggacggcgucuucuucaacggcaucauccucgggcccgacggcaacgugcugauccccgagaugcaguccagccugcuccagcagcacauggagcugcuggaguccagcgucaucccccucaugcacccgcuggccgaccccuccaccguguucaaggagggggacgaggccgaggacuucguggagguccaccuccccgacgugcacaagcagaucagcggcguggaccuggggcugcccuccuggggcaaguaccugcucaugaucgcgggcgggcuggccgcccugguccugaucaucugcagcauggccugcugccgccggaccaagcgcacgggcucccggcgccgggggagcggcgaguccgagaagaaggugaccgccaccccgcagacccgcaagguggucagcagcugggagcucuacaaguccgagggggacgcgcgccuguga

SEQ ID NO: 94546 - RNA, 1575 nt, Artificial Sequence
  derived and/or modified CDS sequence (opt1) from glycoprotein__RABV__AB110669.1
augauccugcaggcccuccuguucgugccccugcucaucagcucccugugccugggcaaguucccgaucuacaccauccccgacaagcucgggcccuggagccccaucgacauccaccaccuguccugcccgaacaaccuggucguggaggacgagggcugcaccaaccucagcggguucuccuacauggagcugaaggugggcuacaucagcgccaucaaggucaacggguucacgugcaccggcguggugaccgaggcggagaccuacacgaacuucgucggcuacgugaccaccaccuucaagcgcaagcacuuccggcccauccccgacgccugccgcgccgccuacaacuggaagauggccggggacccccgguacgaggagucccugcagaacccguaccccgacuaccacuggcuccgcacggugaagaccaccaaggagagccugaucaucaucucccccagcgucgcggaccuggaccccuacgacaagucccuccacagccggguguucccgggcgggaagugccugggcaucaccguguccagcacguacugcuccaccaaccacgacuacaccaucuggaugcccgaggagccccgccuggggaccagcugcgacaucuucacguccagcaagggcaagaaggccuccaagggcgggaagaccugcggcuucgucgacgagcgggggcucuacaagagccugaagggcgccugcaagcugaagcucugcggcgugcuggggcugcgccucauggacggcaccugggugagcauccagcaccccgacgacaccaaguggugcccgcccgaccagcuggucaaccugcccgacuuccccuccgacgagaucgagcaccucgugcuggaggagcuggugaagaagcgggaggagugccucgacgcccuggagagcaucaugacgaccaaguccgucagcuuccgccggcuguccuaccuccgcaagcuggugccgggguucggcaaggcguacaccaucuucaacaagacccugauggaggccgacgcccacuacaagagcgugcggacguggaacgagaucauccccuccaaggggugccucaagguccgcgagcggugccacccgcccguggacgagguguucuucaacggcaucauccugggccccgacgggaacguccugauccccgagaugcagagcucccuccugcagcagcacauggagcugcucgagagcuccgugaucccccugaugcacccccuggccgacccgagcaccgucuucaaggagggcgacgaggccgaggacuucguggaggugcaccuccccgacguccacaagcagaucuccgggguggaccugggccugcccagcugggggaaguaccuccugaugaucgcgggcggccuggccgcccuggugcucaucaucugcuccauggccugcugccgccggaccaagcgcaccgagagccggcgccggggguccggcgagagcgagaagaaggucacggccaccccgcagaaccgcaaggugguguccagcugggagcuguacaagagcgagggggacgcgcgccuguga

SEQ ID NO: 94547 - RNA, 1575 nt, Artificial Sequence
  derived and/or modified CDS sequence (opt1) from glycoprotein__RABV__AB128149.1
auggugccccaggcccugcuccuggucccgauccugggcuucagcuccugcuucgggaaguuccccaucuacaccauccccgacacccucggccccuggagcccgaucgacauccaccaccuguccugccccaacaaccuggugguggaggacgaggggugcacgaaccucagcggcuucuccuacauggagcugaaggucgggcgcaucagcgccaucaaggugaacggcuucacgugcaccggcguggucaccgaggcggagaccuacaccaacuucgugggguacgugaccaccacguucaagcggaagcacuuccgccccacccccgacgccugccgggccgccuacaacuggaagauggccggcgacccgcgcuacgaggagucccugcacagccccuaccccgacuaccacuggcuccggaccgucaagaccacgaaggagucccuggugaucaucagccccuccguggcggaccuggacccguacgacaacagccuccacucccgcgucuuccccagcgggaagugcuccggcaucaccgugagcuccguguacugcagcaccaaccacgacuacaccgucuggaugcccgagauccugcggcuggggacguccugcgacaucuucaccaacagccgcggcaagcgggccagcaagggcuccaagaccugcggguucguggacgagcgcggccucuacaagagccugaagggggccugcaagcugaagcucugcggcgugcugggccugcggcucauggacgggaccugggucgccaugcagacguccaacgagaccaaguggugcccgcccgaccagcuggugaaccugcacgaccuccgcagcgacgagaucgagcaccuggugaucgaggagcuggucaagaagcgggaggagugccucgacgcgcuggaguccaucaucaccaccaagagcguguccuuccgccggcugagcuaccuccgcaagcuggugcccggcuucgggaaggccuacacgaucuucaacaagacccugauggaggccgaggcccacuacaaguccguccggaccuggaacgagaucauccccagcaagggcugccuccgcgucgggggccggugccacccccacgugaacggcguguucuucaacgggaucauccugggcccggacgggcacgugcugauccccgagaugcaguccagccuccugcagcagcacaucgagcugcucgaguccagcgucaucccccugaugcacccccuggccgacccguucaccguguucaaggacggcgacgagacggaggacuucaucgaggugcaccuccccgacguccacgagcaggucuccgggguggaccugggccugcccaacuggggcgaguacgugcuccugagcgcggggacccugaucgcccucaugcugaucaucuuccugaugaccugcugccgcaagguggaccggcccgaguccacccagcgcagccugcgcggcacggggcggaacguguccgucaccagccagagcggcaaguucaucccguccugggagagcuacaaguccgggggcgagaccggccucuga

SEQ ID NO: 94548 - RNA, 1575 nt, Artificial Sequence
  derived and/or modified CDS sequence (opt1) from glycoprotein__RABV__AB285215.1
auggugccccaggcccugcuguucgccccgcugcuggucuucagccucugcuucggcaaguuccccaucuacaccauccccgacaagcuggggcccugguccccgaucgacauccaccaccugagcugccccaacaaccucgugguggaggacgagggcugcaccaaccuguccggguucagcuacauggagcugaaggucggcuacaucuccgcgaucaaggugaacggguucacgugcaccggcguggucaccgaggccgagaccuacacgaacuucgugggcuacgugaccaccaccuucaagcgcaagcacuuccggcccauccccgacgccugccgcgccgccuacaacuggaagauggcgggggacccgcgguacgaggagagccuccacaaccccuaccccgacuaccacuggcugcgcacggucaagaccaccaaggagucccuggugaucaucagccccuccguggccgaccucgacccguacgacaagagccugcacucccgggucuuccccagcggcaagugcuccgggaucaccgugagcuccacguacugcagcaccaaccacgacuacaccaucuggaugcccgagaacccccgccugggcaccuccugcgacaucuucacgaacagccgggggaagcgcgccuccaagggcggcaagaccugcggguucguggacgagcggggccucuacaagagccugaagggggccugcaagcugaagcucugcggcguccugggccugcgccucauggacgggaccuggguggcgaugcagaccagcgacgagacgaaguggugcccgcccgaccagcuggugaacaugcacgacuuccgguccgacgagaucgagcaccuggucguggaggagcucgugaagaagcgcgaggagugccuggacgcccuggagagcaucaugaccaccaaguccgucagcuuccggcgccucucccaccuccggaagcuggugcccggcuucgggaaggccuacaccaucuucaacaagacgcucauggaggccgacgcccacuacaagagcgugcgcaccuggaacgagaucauccccuccaagggcugccugcgggucgggggccgcugccacccgcacgugaacggcgucuucuucaacgggaucauccugggccccgacgggcacgugcucauccccgagaugcagagcucccugcugcagcagcacauggagcuccuggagagcuccgugaucccccugaugcacccgcucgcggaccccagcaccgucuucaaggacggcgacgaggccgaggacuucguggaggugcaccuccccgacguccacaagcaggucuccgggguggaccugggccugcccaacuggggcaaguacgugcugcugagcgccgggacccucaucgcccugaugcugaucaucuuccucaugacgugcugccggcgcgugaaccggccggaguccacccagcgcagccugggcgggaccggccgcaagguguccgucaccagccaguccgggaaggugaucagcagcugggaguccuacaagagcggcggcgagacgcggcuguga

SEQ ID NO: 94549 - RNA, 1575 nt, Artificial Sequence
  derived and/or modified CDS sequence (opt1) from glycoprotein__RABV__AB362483.1
auggugccccaggcccugcuguucgucccgcugcugguguucagccucugcuucggcaaguuccccaucuacaccauccccgacaagcuggggcccugguccccgaucgacauccaccaccugagcugccccaacaaccucguggucgaggacgagggcugcaccaaccuguccggguucagcuacauggagcugaaggugggcuacaucuccgccaucaaggugaacggguucacgugcaccggcgucgugaccgaggcggagaccuacacgaacuucgugggcuacgucaccaccaccuucaagcgcaagcacuuccggcccacgcccgacgccugccgcgccgccuacaacuggaagauggccggggacccgcgguacgaggagagccuccacaaccccuaccccgacuaccacuggcugcgcaccgugaagaccaccaaggagucccuggugaucaucagccccuccgucgcggaccucgacccguacgacaagagccugcacucccggguguuccccagcggcaagugcuccgggaucacggugagcuccaccuacugcagcaccaaccacgacuacaccaucuggaugcccgagaacccccgccugggcacguccugcgacaucuucaccaacagccgggggaagcgcgccuccaagggcagcaagaccugcggcuucgucgacgagcgggggcucuacaagagccugaagggcgccugcaagcugaagcucugcggggugcugggccugcgccucguggacggcaccuggaucgccaugcagacguccgacgagaucaaguggugcccgcccgaccagcuggucaaccugcacgacuuccggagcgacgagaucgagcaccucgugguggaggagcuggucaagaagcgcgaggagugccuggacgcgcucgaguccaucgugaccaccaagagcguguccuuccggcgccugagccaccuccggaagcucguccccggguucggcaaggccuacaccaucuucaacaagacgcugauggaggccgacgcccacuacaaguccauccgcaccuggaacgagaucauccccagcaaggggugccugcgggugggcgggcgcugccacccgcacgucaacggcguguucuucaacggcaucauccucgggcccgacggccacgugcugauccccgagaugcaguccagccugcuccagcagcacauggagcugcuggaguccagcgucgugccccucaugcacccgcuggccgaccccuccaccguguucaaggacggggacgaggcggaggacuucaucgagguccaccuccccgacgugcacaagcaggucagcggcguggaccuggggcugcccgacuggggcaaguacgugcugauguccgccggcgugcucaucgcccugaugcugaucaucagccucaugaccugcugccgcgggguccaccggccgaacuccauccagcaccggcugggcgggacgggccgcaaggugagcgugaccucccagagcgggaaggucaucagcuccugggagagcuacaaguccggcggcgagacccgccuguga

SEQ ID NO: 94550 - RNA, 1575 nt, Artificial Sequence
  derived and/or modified CDS sequence (opt1) from glycoprotein__RABV__AB458799.1
auggugccccagguccugcuguucgugccgcugcugguguucagcuccugcuucggcaaguuccccaucuacaccauccccgacaagcucgggcccuggagcccgaucgacauccaccaccuguccugccccaacaaccuggucguggaggacgagggcugcaccaaccucagcggguucuccuacauggagcugaaggugggcuacaucagcgccaucaaggucaacggguucacgugcaccggcguggugaccgaggccgagaccuacacgaacuucgucggcuacgugaccaccaccuucaagcgcaagcacuuccggcccaugcccgacgcgugccgcgccgccuacaacuggaagauggccggggacccgcgguacgaggagucccugcacaaccccuaccccgacuaccacuggcuccgcacggugaagaccaccaaggagagccuggucaucaucucccccagcguggccgaccuggacccguacgacaagucccuccacagccggguguuccccggcgggaagugcuccggcaucaccgucagcuccacgugcugcagcaccaaccacgacuacaccaucuggaugcccgagaacccccgccuggggaccuccugcgacaucuucacgaacagccggggcaagcgcgcguccaagggcgggaagaccugcggcuucguggacgagcgggggcuguacaagagccucaagggcgccugcaagcugaagcugugcggcgugcucgggcugcgccugauggacggcaccugggucgccauccagaccagcgacgagaucaaguggugcuccccggaccagcucgugaaccugcacgacuuccacagcgacgagaucgagcaccugguggucgaggagcucgugaagaagcgggaggagugccuggacgcccuggagacgaucaugaccaccaaguccgugagcuuccgccggcucucccaccuccgcaagcugguccccggguucggcaaggcguacaccaucuucaacaagacgcucauggaggccgacgcccacuacaagagcauccggaccuggaacgagaucauccccuccaaggggugccugcgcgugggcggccggugccacccccacgucaacgggguguucuucaacggcaucauccuggggccggacggccacgugcucauccccgagaugcagagcucccugcugcaccagcacauggagcuccuggagagcuccgucaucccccugaugcacccccucgccgacccgagcaccguguucaaggacggggacgaggccgaggacuucguggagguccaccuccccgacgugcacaagcagaucuccggcguggaccugggccugcccaacugggggaaguacguccugaucagcgcgggcgcccugaccgcccucaugcugaugaucuuccugaugacgugcugccgcaaggccaaccgggccgaguccauccagcacaaccccggggagaccggccgcaaggugagcgugaccucccacaacgggcgggucaucagcuccugggagagcuacaagagcggcggcgagaccaagcucuga

SEQ ID NO: 94551 - RNA, 1575 nt, Artificial Sequence
  derived and/or modified CDS sequence (opt1) from glycoprotein__RABV__AB458800.1
auggugccccaggcccugcuguucgucccgcugcuggccaucccccucugcuucggcaaguuccccaucuacaccauccccgacaagcuggggccguggagccccaucgacauccaccaccuguccugccccaacaaccucgugguggaggacgagggcugcaccaaccugagcggguucuccuacauggagcugaaggucggcuacaucagcgcgaucaaggugaacggguucacgugcaccggcguggucaccgaggccgagaccuacacgaacuucgugggcuacgugaccaccaccuucaagcgcaagcacuuccggcccacgccggacgccugccgcuccgccuacaacuggaagauggccggggacccccgguacgaggagagccuccacaaccccuaccccgacuaccacuggcugcgcaccgucaagaccaccaaggaguccuucgugaucaucagcccguccguggcggaccuggaccccuacgacaagagccuccacucccgggucuucccccgcggcaagugcagcgggaucacgguguccagcaccuacugcuccaccaaccacgacuacaccaucuggaugcccgagaacccgcggcugggcacgagcugcgacaucuucaccaacucccgcgggaagcgggccagcaagggcuccaagaccugcggcuucguggacgagcgcgggcuguacaagagccucaagggcgccugcaagcugaagcugugcgggguccucggccugcggcugauggacggcaccuggguggccauccagacgagcgacgagaccaaguggugcccgcccgaccagcucgugaaccugcacgacuuccacuccgacgagaucgagcaccuggucguggaggagcucgugaagaagcgcgaggagugccuggacgcgcuggagagcaucaugaccaccaaguccgucagcuuccggcgccucucccaccuccggaagcuggugcccggguucggcaaggccuacacgaucuucaacaagacccucauggaggccgacgcccacuacaagagcgugcgcaccuggaacgagaucauccccuccaaggggugccugcgggucggcgggcgcugccacccccacgugaacggcgucuucuucaacggcaucauccuggggcccgacggccacgugcucauccccgagaugcagagcucccugcugcagcagcacauggagcuccuggagagcuccgugaucccgcugaugcacccccucgccgaccccagcaccgucuucaaggacggggacgaggcggaggacuucguggaggugcaccuccccgacguccacaagcaggucuccggcguggaccuggggcugccgagcuggggcaaguacgugcugauguccgccggcauccugacggcccucaugcugaugaucuuccugaugaccugcugccggcgcaccaaccgggccgagagcauccagcacucccucggggagaccggccgcaaggugagcgugacgucccagagcgggcgcgucaucagcuccugggagagcuacaaguccggcggggagaccaagcuguga

SEQ ID NO: 94552 - RNA, 1575 nt, Artificial Sequence; identical to SEQ ID NO: 94551
  derived and/or modified CDS sequence (opt1) from glycoprotein__RABV__AB458801.1

SEQ ID NO: 94553 - RNA, 1575 nt, Artificial Sequence; identical to SEQ ID NO: 94551
  derived and/or modified CDS sequence (opt1) from glycoprotein__RABV__AB458802.1

SEQ ID NO: 94554 - RNA, 1575 nt, Artificial Sequence; identical to SEQ ID NO: 94550
  derived and/or modified CDS sequence (opt1) from glycoprotein__RABV__AB458803.1

SEQ ID NO: 94555 - RNA, 1575 nt, Artificial Sequence
  derived and/or modified CDS sequence (opt1) from glycoprotein__RABV__AB458804.1
augaucccccaggugcugcuguucgucccgcugcugguguucagcuccugcuucggcaaguuccccaucuacaccauccccgacaagcucgggcccuggagcccgaucgacauccaccaccuguccugccccaacaaccugguggucgaggacgagggcugcaccaaccucagcggguucuccuacauggagcugaaggugggcuacaucagcgccaucaaggugaacggguucacgugcaccggcgucgugaccgaggccgagaccuacacgaacuucgugggcuacgucaccaccaccuucaagcgcaagcacuuccggcccaugcccgacgcgugccgcgccgccuacaacuggaagauggccggggacccgcgguacgaggagucccugcacaaccccuaccccgacuaccacuggcuccgcacggugaagaccaccaaggagagccuggugaucaucucccccagcgucgccgaccuggacccguacgacaagucccuccacagccggguguuccccggcgggaagugcuccggcaucaccgugagcuccacgugcugcagcaccaaccacgacuacaccaucuggaugcccgagaacccccgccuggggaccuccugcgacaucuucacgaacagccggggcaagcgcgcguccaagggcgggaagaccugcggcuucgucgacgagcgggggcuguacaagagccucaagggcgccugcaagcugaagcugugcggcgugcucgggcugcgccugauggacggcaccuggguggccauccagaccagcgacgagaucaaguggugcuccccggaccagcucgucaaccugcacgacuuccacagcgacgagaucgagcaccuggugguggaggagcucgucaagaagcgggaggagugccuggacgcccuggagacgaucaugaccaccaaguccgugagcuuccgccggcucucccaccuccgcaagcuggugcccggguucggcaaggcguacaccaucuucaacaagacgcucauggaggccgacgcccacuacaagagcauccggaccuggaacgagaucauccccuccaaggggugccugcgcgucggcggccggugccacccccacgugaacggggucuucuucaacggcaucauccuggggccggacggccacgugcucauccccgagaugcagagcucccugcugcaccagcacauggagcuccuggagagcuccgugaucccccugaugcacccccucgccgacccgagcaccgucuucaaggacggggacgaggccgaggacuucguggaggugcaccuccccgacguccacaagcagaucuccggcguggaccugggccugcccaacugggggaaguacgugcugaccagcgcgggcgcccugacggcccucaugcugaugaucuuccugaugaccugcugccgcaagaccaaccgggccgaguccauccagcgcagccccggggagaccgagcggaaggucuccgugacgagccacaacggccgcgugaucuccagcugggagagcuacaaguccgggggcgagaccaagcucuga

SEQ ID NO: 94556 - RNA, 1575 nt, Artificial Sequence
  derived and/or modified CDS sequence (opt1) from glycoprotein__RABV__AB458805.1
auggugccccagguccugcuguucgugccgcugcugguguucagcuccugcuucggcaaguuccccaucuacaccauccccgacaagcucgggcccuggagcccgaucgacauccaccaccuguccugccccaacaaccuggucguggaggacgagggcugcaccaaccucagcggguucuccuacauggagcugaaggugggcuacaucagcgccaucaaggucaacggguucacgugcaccggcguggugaccgaggccgagaccuacacgaacuucgucggcuacgugaccaccaccuucaagcgcaagcacuuccggcccacgcccgacgcgugccgcgccgccuacaacuggaagauggccggggacccgcgguacgaggagucccugcacaaccccuaccccgacuaccacuggcuccgcaccgugaagaccaccaaggagagccuggucaucaucucccccagcguggccgaccuggacccguacgacaagucccuccacagccggguguuccccggcgggaagugcuccggcaucacggucagcuccacgugcugcagcaccaaccacgacuacaccaucuggaugcccgagaacccccgccuggggaccuccugcgacaucuucaccaacagccggggcaagcgcgcguccaagggcgggaagaccugcggcuucguggacgagcgggggcuguacaagagccucaagggcgccugcaagcugaagcugugcggcgugcucgggcugcgccugauggacggcaccugggucgccauccagacgagcgacgagaucaaguggugcuccccggaccagcucgugaaccugcacgacuuccacagcgacgagaucgagcaccugguggucgaggagcucgugaagaagcgggaggagugccuggacgcccuggagaccaucaugaccaccaaguccgugagcuuccgccggcucucccaccuccgcaagcugguccccggguucggcaaggcguacacgaucuucaacaagacccucauggaggccgacgcccacuacaagagcauccggaccuggaacgagaucauccccuccaaggggugccugcgcgugggcggccggugccacccccacgucaacgggguguucuucaacggcaucauccuggggccggacggccacgugcucauccccgagaugcagagcucccugcugcaccagcacauggagcuccuggagagcuccgucaucccccugaugcacccccucgccgacccgagcaccguguucaaggacggggacgaggccgaggacuucguggagguccaccuccccgacgugcacaagcagaucuccggcguggaccugggccugcccaacugggggaaguacguccugaucagcgcgggcgcccugacggcccucaugcugaugaucuuccugaugaccuucugccgcaaggccaaccgggccgaguccauccagcacaaccccggggagaccggccgcaaggugagcgugaccucccacaacgggcgggucaucagcuccugggagagcuacaagagcggcggcgagacgaagcucuga

SEQ ID NO: 94557 - RNA, 1575 nt, Artificial Sequence; identical to SEQ ID NO: 94551
  derived and/or modified CDS sequence (opt1) from glycoprotein__RABV__AB458806.1

SEQ ID NO: 94558 - RNA, 1575 nt, Artificial Sequence
  derived and/or modified CDS sequence (opt1) from glycoprotein__RABV__AB496676.1
augauccugcaggcccuccuguucgugccccugcucaucagcucccugugccugggcaaguucccgaucuacaccauccccgacaagcucgggcccuggagccccaucgacauccaccaccuguccugcccgaacaaccuggucguggaggacgagggcugcaccaaccucagcggguucuccuacauggagcugaaggugggcuacaucagcgccaucaaggucaacggguucacgugcaccggcguggugaccgaggcggagaccuacacgaacuucgucggcuacgugaccaccaccuucaagcgcaagcacuuccggcccgugcccgacgccugccgcgccgccuacaacuggaagauggccggggacccccgguacgaggagucccugcagaacccguaccccgacuaccacuggcuccgcacggucaagaccaccaaggagagccugaucaucaucucccccagcguggcggaccuggaccccuacgacaagucccuccacagccggguguucccgggcgggaagugccugggcaucaccgucuccagcacguacugcuccaccaaccacgacuacaccaucuggaugcccgaggagccccgccuggggaccagcugcgacaucuucacguccagcaagggcaagaaggccuccaagggcgggaagaccugcggcuucguggacgagcgggggcucuacaagagccugaagggcgccugcaagcugaagcucugcggcgugcuggggcugcgccucauggacggcaccugggucagcauccagaccuccgacgacacgaaguggugcccgcccgaccagcuggugaaccugcacgacuuccacagcgacgagaucgagcaccucguggucgaggagcuggugaagaagcgggaggagugccuggacgcccucgaguccaucaugaccaccaagagcguguccuuccgccggcugagcuaccugcgcaagcucguccccggguucggcaaggcguacaccaucuucaacaagacgcugauggaggccgacgcccacuacaaguccgugcggaccuggaacgagaucauccccagcaaggggugccugaaggugcgcgagcggugccacccgcccgucgacggcguguucuucaacggcaucauccucgggcccgacggcaacguccugauccccgagaugcaguccagccugcuccagcagcacauggagcugcuggaguccagcgugaucccccucaugcacccgcuggccgaccccuccaccguguucaaggagggggacgaggccgaggacuucgucgaggugcaccuccccgacgugcacaagcagaucagcggcgucgaccuggggcugcccuccuggggcaaguaccugcucaugaucgcgggcgggcuggccgcccuggugcugaucaucugcagcauggccugcugccgccggaccaagcgcacggagucccggcgccggggcagcggggaguccgagaagaagguggccgcgaccccgcagacccgcaaggucaucagcagcugggagcucuacaaguccgagggcgacgcccgccuguga

SEQ ID NO: 94559 - RNA, 1575 nt, Artificial Sequence
  derived and/or modified CDS sequence (opt1) from glycoprotein__RABV__AB496677.1
augauccugcaggcccuccuguucgugccccugcucaucagcucccugugccugggcaaguucccgaucuacaccauccccgacaagcucgggcccuggagccccaucgacauccaccaccuguccugcccgaacaaccuggucguggaggacgagggcugcaccaaccucagcggguucuccuacauggagcugaaggugggcuacaucagcgccaucaaggucaacggguucacgugcaccggcguggugaccgaggcggagaccuacacgaacuucgucggcuacgugaccaccaccuucaagcgcaagcacuuccggcccgugcccgacgccugccgcgccgccuacaacuggaagaucacgggggacccccgguacgaggagucccugcagaacccguaccccgacuaccacuggcuccgcaccgucaagaccaccaaggagagccugaucaucaucucccccagcguggccgaccuggaccccuacgacaagucccuccacagccggguguucccgggcgggaagugccugggcaucacggucuccagcaccuacugcuccaccaaccacgacuacaccaucuggaugcccgaggagccccgccuggggacgagcugcgacaucuucaccuccagcaagggcaagaaggcguccaagggcgggaagaccugcggcuucguggacgagcgggggcucuacaagagccugaagggcgccugcaagcugaagcucugcggcgugcuggggcugcgccucauggacggcaccugggucagcauccagacguccgacgacaccaaguggugcccgcccgaccagcuggugaaccugcacgacuuccacagcgacgagaucgagcaccucguggucgaggagcuggugaagaagcgggaggagugccuggacgcccucgaguccaucaugaccaccaagagcguguccuuccgccggcugagcuaccugcgcaagcucguccccggguucggcaaggccuacacgaucuucaacaagacccugauggaggcggacgcccacuacaaguccgugcggaccuggaacgagaucauccccagcaaggggugccugaaggugcgcgagcggugccacccgcccgucgacggcguguucuucaacggcaucauccucgggcccgacggcaacguccugauccccgagaugcaguccagccugcuccagcagcacauggagcugcuggaguccagcgugaucccccucaugcacccgcuggccgaccccuccaccguguucaaggagggggacgaggccgaggacuucgucgaggugcaccuccccgacgugcacaagcagaucagcggcgucgaccuggggcugcccuccuggggcaaguaccugcucaugaucgccggcgggcuggcggcccuggugcugaucaucugcagcauggccugcugccgccggacgaagcgcaccgagucccggcgccggggcagcggggaguccgagaagaaggugaccgccaccccgcagacgcgcaaggucgugagcagcugggagcucuacaaguccgagggcgacgcccgccuguga

SEQ ID NO: 94560 - RNA, 1575 nt, Artificial Sequence
  derived and/or modified CDS sequence (opt1) from glycoprotein__RABV__AB496678.1
augauccugcaggcccuccuguucgugccccugcucaucagcucccugugccugggcaaguucccgaucuacaccauccccgacaagcucgggcccuggagccccaucgacauccaccaccuguccugcccgaacaaccuggucguggaggacgagggcugcaccaaccucagcggguucuccuacauggagcugaaggugggcuacaucagcgccaucaaggucaacggguucacgugcaccggcguggugaccgaggcggagaccuacacgaacuucgucggcuacgugaccaccaccuucaagcgcaagcacuuccggcccaugcccgacgccugccgcgccgccuacaacuggaagaugacgggggacccccgguacgaggagucccugcagaacccguaccccgacuaccacuggcuccgcaccgugaagaccaccaaggagagccugaucaucaucucccccagcgucgccgaccuggaccccuacgacaagucccuccacagccggguguucccgggcgggaagugccugggcaucacgguguccagcaccuacugcuccaccaaccacgacuacaccaucuggaugcccgaggagccccgccuggggacgagcugcgacaucuucaccuccagcaagggcaagaaggcguccaagggcgggaagaccugcggcuucgucgacgagcgggggcucuacaagagccugaagggcgccugcaagcugaagcucugcggcgugcuggggcugcgccucauggacggcaccugggugagcauccagacguccgacgacaccaaguggugcccgcccgaccagcuggucaaccugcacgacuuccacagcgacgagaucgagcaccucgugguggaggagcuggucaagaagcgggaggagugccuggacgcccucgaguccaucaugaccaccaagagcguguccuuccgccggcugagcuaccugcgcaagcucgugcccggguucggcaaggccuacacgaucuucaacaagacccugauggaggcggacgcccacuacaaguccguccggaccuggaacgagaucauccccagcaaggggugccugaaggugcgcgagcggugccacccgcccguggacggcgucuucuucaacggcaucauccucgggcccgacggcaacgugcugauccccgagaugcaguccagccugcuccagcagcacauggagcugcuggaguccagcgucaucccccucaugcacccgcuggccgaccccuccaccguguucaaggagggggacgaggccgaggacuucguggagguccaccuccccgacgugcacaagcagaucagcggcguggaccuggggcugcccuccuggggcaaguaccugcucaugaucgccggcgggcuggcggcccugguccugaucaucugcagcauggccugcugccgccggacgaagcgcaccgagucccggcgccggggcagcggggaguccgagaagaaggugaccgccaccccgcagacgcgcaagguggucagcagcugggagcucuacaaguccgagggcgacgcccgccuguga

SEQ ID NO: 94561 - RNA, 1575 nt, Artificial Sequence
  derived and/or modified CDS sequence (opt1) from glycoprotein__RABV__AB496679.1
augauccugcaggcccuccuguucgugccccugcucaucagcucccugugccugggcaaguucccgaucuacaccauccccgacaagcucgggcccuggagccccaucgacauccaccaccuguccugcccgaacaaccuggucguggaggacgagggcugcaccaaccucagcggguucuccuacauggagcugaaggugggcuacaucagcgccaucaaggucaacggguucacgugcaccggcguggugaccgaggcggagaccuacacgaacuucgucggcuacgugaccaccaccuucaagcgcaagcacuuccggcccauccccgacgccugccgcgccgccuacaacuggaagauggccggggacccccgguacgaggagucccugcagaacccguaccccgacuaccacuggcuccgcacggugaagaccaccaaggagagccugaucaucaucucccccagcgucgcggaccuggaccccuacgacaagucccuccacagccggguguucccgggcgggaagugccugggcaucaccguguccagcacguacugcuccaccaaccacgacuacaccaucuggaugcccgaggagccccgccuggggaccagcugcgacaucuucacguccagcaagggcaagaaggccuccaagggcgggaagaccugcggcuucgucgacgagcgggggcucuacaagagccugaagggcgccugcaagcugaagcucugcggcgugcuggggcugcgccucauggacggcaccugggugagcauccagaccuccgacgacacgaaguggugcccgcccgaccagcuggucaaccugcacgacuuccacagcgacgagaucgagcaccucgugguggaggagcuggucaagaagcgggaggagugccuggacgcccucgaguccaucaugaccaccaagagcguguccuuccgccggcugagcuaccugcgcaagcucgugcccggguucggcaaggcguacaccaucuucaacaagacgcugauggaggccgacgcccacuacaaguccguccggaccuggaacgagaucauccccagcaaggggugccugaaggugcgcgagcggugccacccgcccguggacggcgucuucuucaacggcaucauccucgggcccgacggcaacgugcugauccccgagaugcaguccagccugcuccagcagcacauggagcugcuggaguccagcgucaucccccucaugcacccgcuggccgaccccuccaccguguucaaggagggggacgaggccgaggacuucguggagguccaccuccccgacgugcacaagcagaucagcggcguggaccuggggcugcccuccuggggcaaguaccugcucaugaucgcgggcgggcuggccgcccugguccugaucaucugcagcauggccugcugccgccggaccaagcagacggagucccgccggcgcggcagcggggaguccgagaagaaggugaccgccaccccgcagaccaagaagguggucagcagcugggagcucuacaaguccgagggcgacgcgcggcuguga

SEQ ID NO: 94562 - RNA, 1575 nt, Artificial Sequence
  derived and/or modified CDS sequence (opt1) from glycoprotein__RABV__AB496680.1
augauccugcccgcccuccuguucgugccgcugcucaucagcucccugugccugggcaaguuccccaucuacaccauccccgacaagcucgggcccuggagcccgaucgacauccaccaccuguccugccccaacaaccuggucguggaggacgagggcugcaccaaccucagcggguucuccuacauggagcugaaggugggcuacaucagcgccaucaaggucaacggguucacgugcaccggcguggugaccgaggcggagaccuacacgaacuucgucggcuacgugaccaccaccuucaagcgcaagcacuuccggcccauccccgacgccugccgcgccgccuacaacuggaagauggccggggacccgcgguacgaggagucccugcagaaccccuaccccgacuaccacuggcuccgcacggugaagaccaccaaggagagccugaucaucaucucccccagcgucgcggaccuggacccguacgacaagucccuccacagccggguguuccccggcgggaagugccugggcaucaccguguccagcacguacugcuccaccaaccacgacuacaccaucuggaugcccgaggagccccgccuggggaccagcugcgacaucuucacguccagcaagggcaagaaggccuccaagggcgggaagaccugcggcuucgucgacgagcgggggcucuacaagagccugaagggcgccugcaagcugaagcucugcggcgugcuggggcugcgccucauggacggcaccugggugagcauccagaccuccgacgacacgaaguggugcccgcccgaccagcuggucaaccugcacgacuuccacagcgacgagaucgagcaccucgugguggaggagcuggucaagaagcgggaggagugccuggacgcccucgaguccaucaugaccaccaagagcguguccuuccgccggcugagcuaccugcgcaagcucgugcccggguucggcaaggcguacaccaucuucaacaagacgcugauggaggccgacgcccacuacaaguccguccggaccuggaacgagaucauccccagcaaggggugccugaaggugcgcgagcggugccacccgcccguggacggcgucuucuucaacggcaucauccucgggcccgacggcaacgugcugauccccgagaugcaguccagccugcuccagcagcacauggagcugcuggaguccagcgucaucccgcucaugcacccccuggccgaccccuccaccguguucaaggagggggacgaggccgaggacuucguggagguccaccuccccgacgugcacaagcagaucagcggcguggaccuggggcugccguccuggggcaaguaccugcucaugaucgcgggcgggcuggccacccugguccugaucaucugcagcauggccugcugccgccggacgaagcgcaccgagucccggcgccggggcagcggggaguccgagaagaaggugaccgccacgccccagacccgcaagguggucagcagcugggagcucuacaaguccgagggcgacgcccgccuguga

SEQ ID NO: 94563 - RNA, 1575 nt, Artificial Sequence
  derived and/or modified CDS sequence (opt1) from glycoprotein__RABV__AB496681.1
augauccugcaggcccuccuguucgugccccugcucaucagcucccugugccugggcaaguucccgaucuacaccauccccgacaagcucgggcccuggagccccaucgacauccaccaccuguccugcccgaacaaccuggucguggaggacgagggcugcaccaaccucagcggguucuccuacauggagcugaaggugggcuacaucagcgccaucaaggucaacggguucacgugcaccggcguggugaccgaggcggagaccuacacgaacuucgucggcuacgugaccaccaccuucaagcgcaagcacuuccggcccauccccgacgccugccgcgccgccuacaacuggaagauggccggggacccccgguacgaggagucccugcagaacccguaccccgaguaccacuggcuccgcacggugaagaccaccaaggagagccugaucaucaucucccccagcgucgcggaccuggaccccuacgacaagucccuccacagccggguguucccgggcgggaagugccugggcaucaccguguccagcacguacugcuccaccaaccacgacuacaccaucuggaugcccgaggagccccgccuggggaccagcugcgacaucuucacguccagcaagggcaagaaggccuccaagggcgggaagaccugcggcuucgucgacgagcgggggcucuacaagagccugaagggcgccugcaagcugaagcucugcggcgugcuggggcugcgccucauggacggcaccugggugagcauccagaccuccgacgacacgaaguggugcccgcccgaccagcuggucaaccugcacgacuuccacagcgacgagaucgagcaccucgugguggaggagcuggucaagaagcgggaggagugccuggacgcccucgaguccaucaugaccaccaagagcguguccuuccgccggcugagcuaccugcgcaagcucgugcccggguucggcaaggcguacaccaucuucaacaagacgcugauggaggccgacgcccacuacaaguccguccggaccuggaacgagaucauccccagcaaggggugccugaaggugcgcgagcggugccacccgcccguggacggcgucuucuucaacggcaucauccucgggcccgacggcaacgugcugauccccgagaugcaguccagccugcuccagcagcacauggagcugcuggaguccagcgucaucccccucaugcacccgcuggccgaccccuccaccguguucaaggagggggacgaggccgaggacuucguggagguccaccuccccgacgugcacaagcagaucagcggcguggaccuggggcugcccuccuggggcaaguaccugcucaugaucgcgggcgggcuggccacccugguccugaucaucugcagcauggccugcugccgccggacgaagcgcaccgagucccggcgccggggcagcggggaguccgagaagaacgugaccgccaccccgcagacgcgcaagguggucagcagcugggagcucuacaaguccgagggcgacgcccgccuguga

SEQ ID NO: 94564 - RNA, 1575 nt, Artificial Sequence
  derived and/or modified CDS sequence (opt1) from glycoprotein__RABV__AB496682.1
augauccugcaggcccuccuguucgugccccugcucaucagcuccagcugccugggcaaguucccgaucuacaccauccccgacaagcuggggcccuggucccccaucgacauccaccaccucagcugcccgaacaaccuggucguggaggacgagggcugcaccaaccuguccggguucagcuacauggagcucaaggugggcuacaucuccgccaucaaggucaacggguucacgugcaccggcguggugaccgaggcggagaccuacacgaacuucgucggcuacgugaccaccaccuucaagcgcaagcacuuccggcccauccccgacgccugccgcgccgccuacaacuggaagauggccggggacccccgguacgaggagagccugcagaacccguaccccgacuaccacuggcugcgcacggugaagaccaccaaggagucccucaucaucaucagccccuccgucgcggaccuggaccccuacgacaagagccugcacucccggguguucccgggcgggaagugccucggcaucaccgugagcuccacguacugcagcaccaaccacgacuacaccaucuggaugcccgaggagccccgccuggggaccuccugcgacaucuucacgagcuccaagggcaagaaggccagcaagggcgggaagaccugcggcuucgucgacgagcgggggcuguacaagagccucaagggcgccugcaagcugaagcugugcggcgugcucgggcugcgccugauggacggcaccuggguguccauccagaccagcgacgacacgaaguggugcccgcccgaccagcucgucaaccugcacgacuuccacuccgacgagaucgagcaccuggugguggaggagcucgucaagaagcgggaggagugccuggacgcccuggagagcaucaugaccaccaaguccgugagcuuccgccggcucuccuaccugcgcaagcuggugcccggguucggcaaggcguacaccaucuucaacaagacgcucauggaggccgacgcccacuacaagagcguccggaccuggaacgagaucauccccuccaaggggugccugaaggugcgcgagcggugccacccgcccguggacggcgucuucuucaacggcaucauccuggggcccgacggcaacgugcucauccccgagaugcagagcucccugcugcagcagcacauggagcuccuggagagcuccgucaucccccugaugcacccgcucgccgaccccagcaccguguucaaggagggggacgaggccgaggacuucguggagguccaccuccccgacgugcacaagcagaucuccggcguggaccuggggcugcccagcuggggcaaguaccugcugaugaucgcgggcgggcucgccacccugguccugaucaucugcuccguggccugcugccgccggacgaagcgcaccgagagccggcgccggggcuccggggagagcggcaagaaggugaccaccacgccgcagacccgcaaggucgugagcuccugggagcuguacaagagcgagggggacgcccgccucuga

SEQ ID NO: 94565 - RNA, 1575 nt, Artificial Sequence
  derived and/or modified CDS sequence (opt1) from glycoprotein__RABV__AB496683.1
augauccugcaggcccuccuguucgugccccugcucaucagcucccugugccugggcaaguucccgaucuacaccauccccgacaagcucgggcccuggagccccaucgacauccaccaccuguccugcccgaacaaccuggucguggaggacgagggcugcaccaaccucagcggguucuccuacauggagcugaaggugggcuacaucagcgccaucaaggucaacggguucacgugcaccggcguggugaccgaggcggagaccuacacgaacuucgucggcuacgugaccaccaccuucaagcgcaagcacuuccggcccgugcccgacgccugccgcgccgccuacaacuggaagauggccggggacccccgguacgaggagucccugcagaacccguaccccgacuaccacuggcuccgcacggucaagaccaccaaggagagccugaucaucaucucccccagcguggcggaccuggaccccuacgacaagucccuccacagccggguguucccgggcgggaagugccugggcaucaccgucuccagcacguacugcuccaccaaccacgacuacaccaucuggaugcccgaggagccccgccuggggaccagcugcgacaucuucacguccagcaagggcaagaaggccuccaagggcgggaagaccugcggcuucguggacgagcgggggcucuacaagagccugaagggcgccugcaagcugaagcucugcggcgugcuggggcugcgccucauggacggcaccugggucagcauccagaccuccgacgacacgaaguggugcccgcccgaccagcuggugaaccugcacgacuuccacagcgacgagaucgagcaccucguggucgaggagcuggugaagaagcgggaggagugccuggacgcccucgaguccaucaugaccaccaagagcguguccuuccgccggcugagcuaccugcgcaagcucguccccggguucggcaaggcguacaccaucuucaacaagacgcugauggaggccgacgcccacuacaaguccgugcggaccuggaacgagaucauccccagcaaggggugccugaaggugcgcgagcggugccacccgcccgucgacggcguguucuucaacggcaucauccucgggcccgacggcaacguccugauccccgagaugcaguccagccugcuccagcagcacauggagcugcuggaguccagcgugaucccccucaugcacccgcuggccgaccccuccaccguguucaaggagggggacgaggccgaggacuucgucgaggugcaccuccccgacgugcacaagcagaucagcggcgucgaccuggggcugcccuccuggggcaaguaccugcucaugaucgcgggcgggcuggccgcccuggugcugaucaucugcagcauggccugcugccgccggaccaagcgcacggagucccggcgccggggcagcggggaguccgagaagaaggugaccgccaccccgcagacccgcaaggucgugagcagcugggagcucuacaaguccgagggcgacgcgcgccuguga

SEQ ID NO: 94566 - RNA, 1575 nt, Artificial Sequence
  derived and/or modified CDS sequence (opt1) from glycoprotein__RABV__AB496684.1
augauccugcaggcccuccuguucgugccccugcucaucagcucccugugccugggcaaguucccgaucuacaccauccccgacaagcucgggcccuggagccccaucgacauccaccaccuguccugcccgaacaaccuggucguggaggacgagggcugcaccaaccucagcggguucuccuacauggagcugaaggugggcuacaucagcgccaucaaggucaacggguucacgugcaccggcguggugaccgaggcggagaccuacacgaacuucgucggcuacgugaccaccaccuucaagcgcaagcacuuccggcccauccccgacgccugccgcgccgccuacaacuggaagauggccggggacccccgguacgaggagucccugcagaacccguaccccgacuaccacuggcuccgcacggugaagaccaccaaggagagccugaucaucaucucccccagcgucgcggaccuggaccccuacgacaagucccuccacagccggguguucccgggcgggaagugccugggcaucaccguguccagcacguacugcuccaccaaccacgacuacaccaucuggaugcccgaggagccccgccuggggaccagcugcgacaucuucacguccagcaagggcaagaaggccuccaagggcgggaagaccugcggcuucgucgacgagcgggggcucuacaagagccugaagggcgccugcaagcugaagcucugcggcgugcuggggcugcgccucauggacggcaccugggugagcauccagaccuccgacgacacgaaguggugcccgcccgaccagcuggucaaccugcacgacuuccacagcgacgagaucgagcaccucgugguggaggagcuggucaagaagcgggaggagugccuggacgcccucgaguccaucaugaccaccaagagcguguccuuccgccggcugagcuaccugcgcaagcucgugcccggguucggcaaggcguacaccaucuucaacaagacgcugauggaggccgacgcccacuacaaguccguccggaccuggaacgagaucauccccagcaaggggugccugaaggugcgcgagcggugccacccgcccguggacggcgucuucuucaacggcaucauccucgggcccgacggcaacgugcugauccccgagaugcaguccagccugcuccagcagcacauggagcugcuggaguccagcgucaucccccucaugcacccgcuggccgaccccuccaccguguucaaggagggggacgaggccgaggacuucguggagguccaccuccccgacgugcacaagcagaucagcggcguggaccuggggcugcccuccuggggcaaguaccugcucaugaucgcgggcgggcuggccgcccugguccugaucaucugcagcauggccugcugccgccggaccaagcgcacggagucccggcgccggggcagcggggaguccgagaagaaggugaccgccgcgccgcagacccgcaagguggucagcagcugggagcucuacaaguccgagggcgacgcccgccuguga

SEQ ID NO: 94567 - RNA, 1575 nt, Artificial Sequence
  derived and/or modified CDS sequence (opt1) from glycoprotein__RABV__AB496685.1
augauccugcaggcccuccuguucgugccccugcucaucagcucccugugccugggcaaguucccgaucuacaccauccccgacaagcucgggcccuggagccccaucgacauccaccaccuguccugcccgaacaaccuggucguggaggacgagggcugcaccaaccucagcggguucuccuacauggagcugaaggugggcuacaucagcgccaucaaggucaacggguucacgugcaccggcguggugaccgaggcggagaccuacacgaacuucgucggcuacgugaccaccaccuucaagcgcaagcacuuccggcccauccccgacgccugccgcgccgccuacaacuggaagauggccggggacccccgguacgaggagucccugcagaacccguaccccgacuaccacuggcuccgcacggugaagaccaccaaggagagccugaucaucaucucccccagcgucgcggaccuggaccccuacgacaagucccuccacagccggguguucccgggcgggaagugccugggcaucaccguguccagcacguacugcuccaccaaccacgacuacaccaucuggaugcccgaggagccccgccuggagaccagcugcgacaucuucacguccagcaaggggaagaaggccuccaagggcggcaagaccugcggguucgucgacgagcggggccucuacaagagccugaagggggccugcaagcugaagcucugcggcgugcugggccugcgccucauggacgggaccugggugagcauccagaccuccgacgacacgaaguggugcccgcccgaccagcuggucaaccugcacgacuuccacagcgacgagaucgagcaccucgugguggaggagcuggucaagaagcgggaggagugccuggacgcccucgaguccaucaugaccaccaagagcguguccuuccgccggcugagcuaccugcgcaagcucgugcccggcuucgggaaggcguacaccaucuucaacaagacgcugauggaggccgacgcccacuacaaguccguccggaccuggaacgagaucauccccagcaagggcugccugaaggugcgcgagcggugccacccgcccguggacggggucuucuucaacggcaucauccucggccccgacgggaacgugcugauccccgagaugcaguccagccugcuccagcagcacauggagcugcuggaguccagcgucaucccccucaugcacccgcuggccgaccccuccaccguguucaaggagggcgacgaggccgaggacuucguggagguccaccuccccgacgugcacaagcagaucagcgggguggaccugggccugcccuccugggggaaguaccugcucaugaucgcgggcggccuggccacccugguccugaucaucugcagcauggccugcugccgccgggccaagcgcacggagucccggcgccgggggagccgcgaguccgagaagaaggugaccgccgcgccgcagacccgcaagguggucagcagcugggagcucuacaaguccgagggcgacgcccggcuguga

SEQ ID NO: 94568 - RNA, 1575 nt, Artificial Sequence; identical to SEQ ID NO: 94540
  derived and/or modified CDS sequence (opt1) from glycoprotein__RABV__AB496686.1

SEQ ID NO: 94569 - RNA, 1575 nt, Artificial Sequence
  derived and/or modified CDS sequence (opt1) from glycoprotein__RABV__AB496687.1
augauccugcaggcccuccuguucgugccccugcucaucagcucccugugccugggcaaguucccgaucuacaccauccccgacaagcucgggcccuggagccccaucgacauccaccaccuguccugcccgaacaaccuggucguggaggacgagggcugcaccaaccucagcggguucuccuacauggagcugaaggugggcuacaucagcgccaucaaggucaacggguucacgugcaccggcguggugaccgaggcggagaccuacacgaacuucgucggcuacgugaccaccaccuucaagcgcaagcacuuccggcccgugcccgacgccugccgcgccgccuacaacuggaagauggccggggacccccgguacgaggagucccugcagaacccguaccccgacuaccacuggcuccgcacggucaagaccaccaaggagagccugaucaucaucucccccagcguggcggaccuggaccccuacgacaagucccuccacagccggguguucccgggcgggaagugccugggcaucaccgucuccagcacguacugcuccaccaaccacgacuacaccaucuggaugcccgaggagccccgccuggggaccagcugcgacaucuucacguccagcaagggcaagaaggccuccaagggcgggaagaccugcggcuucguggacgagcgggggcucuacaagagccugaagggcgccugcaagcugaagcucugcggcgugcuggggcugcgccucauggacggcaccugggucagcauccagaccuccgacgacacgaaguggugcccgcccgaccagcuggugaaccugcacgacuuccacagcgacgagaucgagcaccucguggucgaggagcuggugaagaagcgggaggagugccuggacgcccucgaguccaucaugaccaccaagagcguguccuuccgccggcugagcuaccugcgcaagcucguccccggguucggcaaggcguacaccaucuucaacaagacgcugauggaggccgacgcccacuacaaguccgugcggaccuggaacgagaucauccccagcaaggggugccugaaggugcgcgagcggugccacccgcccgucgacggcguguucuucaacggcaucauccucgggcccgacggcaacguccugauccccgagaugcaguccagccugcuccagcagcacauggagcugcuggaguccagcgugaucccccucaugcacccgcuggccgaccccuccaccguguucaaggagggggacgaggccgaggacuucgucgaggugcaccuccccgacgugcacaagcagaucagcggcgucgaccuggggcugcccuccuggggcaaguaccugcucaugaucgcgggcgggcuggccgcccuggugcugaucaucugcagcauggccugcugccgccggaccaagcgcacggagucccggcgccggggcagcggggaguccgagaagaaggugaccgccaccccgcagacccgcaaggucaucagcagcugggagcucuacaaguccgagggcgacgcgcgccuguga

SEQ ID NO: 94570 - RNA, 1575 nt, Artificial Sequence
  derived and/or modified CDS sequence (opt1) from glycoprotein__RABV__AB496689.1
augauccugcaggcccuccgcuucgugccccugcugaucagcucccucugccugggcaaguucccgaucuacaccauccccgacaagcuggggcccuggagccccaucgacauccaccaccucuccugcccgaacaaccuggucguggaggacgagggcugcaccaaccugagcggguucuccuacauggagcucaaggugggcuacaucagcgccaucaaggucaacggguucacgugcaccggcguggugaccgaggcggagaccuacacgaacuucgucggcuacgugaccaccaccuucaagcggaagcacuuccgccccauccccgacgccugccgggccgccuacaacuggaagauggccggggacccccgcuacgaggagucccugcagaacccguaccccgacuaccacuggcugcggacggugaagaccaccaaggagagccucaucaucaucucccccagcgucgcggaccuggaccccuacgacaagucccugcacagccgcguguucccgggcgggaagugccucggcaucaccguguccagcacguacugcuccaccaaccacgacuacaccaucuggaugcccgaggagccccggcuggggaccagcugcgacaucuucacguccagcaagggcaagaaggccuccaagggcgggaagaccugcggcuucgucgacgagcgcgggcuguacaagagccucaagggcgccugcaagcugaagcugugcggcgugcucgggcugcggcugauggacggcaccugggugagcauccagaccuccgacgacacgaaguggugcccgcccgaccagcucgucaaccugcacgacuuccacagcgacgagaucgagcaccuggugguggaggagcucgucaagaagcgcgaggagugccuggacgcccuggaguccaucaugaccaccaagagcguguccuuccggcgccucagcuaccugcggaagcuggugcccggguucggcaaggcguacaccaucuucaacaagacgcucauggaggccgacgcccacuacaaguccguccgcaccuggaacgagaucauccccagcaaggggugccugaaggugcgggagcgcugccacccgcccguggacggcgucuucuucaacggcaucauccuggggcccgacggcaacgugcucauccccgagaugcaguccagccugcugcagcagcacauggagcuccuggaguccagcgucaucccccugaugcacccgcucgccgaccccuccaccguguucaaggagggggacgaggccgaggacuucguggagguccaccuccccgacgugcacaagcagaucagcggcguggaccuggggcugcccuccuggggcaaguaccugcugaugaucgcgggcgggcucgccgcccugguccugaucaucugcagcauggccugcugccggcgcaccaagcggacggagucccgccggcgcggcagcggggaguccgagaagaaggugaccgccaccccgcagacccgcaagguggucagcagcugggagcuguacaaguccgagggcgacgcgcggcucuga

SEQ ID NO: 94571 - RNA, 1575 nt, Artificial Sequence
  derived and/or modified CDS sequence (opt1) from glycoprotein__RABV__AB496690.1
augauccugcaggcccuccuguucgugccccugcucaucagcucccugugccugggcaaguucccgaucuacaccauccccgacaagcucgggcccuggagccccaucgacauccaccaccuguccugcccgaacaaccuggucguggaggacgagggcugcaccaaccucagcggguucuccuacauggagcugaaggugggcuacaucagcgccaucaaggucaacggguucacgugcaccggcguggugaccgaggcggagaccuacacgaacuucgucggcuacgugaccaccaccuucaagcgcaagcacuuccggcccauccccgacgccugccgcgccgccuacaacuggaagauggccggggacccccgguacgaggagucccugcagaacccguaccccgacuaccacuggcuccgcacggugaagaccaccaaggagagccugaucaucaucucccccagcgucgcggaccuggaccccuacgacaagucccuccacagccggguguucccgggcgggaagugccugggcaucaccguguccagcacguacugcuccaccaaccacgacuacaccaucuggaugcccgaggagccccgccuggggaccagcugcgacaucuucacguccagcaagggcaagaaggccuccaagggcgggaagaccugcggcuucgucgacgagcgggggcucuacaagagccugaagggcgccugcaagcugaagcucugcggcgugcuggggcugcgccucauggacggcaccugggugagcauccagaccuccgacgacacgaaguggugcccgcccgaccagcuggucaaccugcacgacuuccacagcgacgagaucgagcaccucgugguggaggagcuggucaagaagcgggaggagugccuggacgcccucgaguccaucaugaccaccaagagcguguccuuccgccggcugagcuaccugcgcaagcucgugcccggguucggcaaggcguacaccaucuucaacaagacgcugauggaggccgacgcccacuacaaguccguccggaccuggaacgagaucauccccagcaaggggugccugaaggugcgcgagcggugccacccgcccguggacggcgucuucuucaacggcaucauccucgggcccgacggcaacgugcugauccccgagaugcaguccagccugcuccagcagcacauggagcugcuggaguccagcgucaucccccucaugcacccgcuggccgaccccuccaccguguucaaggagggggacgaggccgaggacuucguggagguccaccuccccgacgugcacaagcagaucagcggcguggaccuggggcugcccuccuggggcaaguaccugcucaugaucgcgggcgggcuggccgcccugguccugaucaucugcagcauggccugcugccgccggaccaagcgcacggagucccggcgccggggcagcggggaguccgagaagaaggugaccgccaccccgcagacccgcaaggugaucagcagcugggagcucuacaaguccgagggcgacgcgcgccuguga

SEQ ID NO: 94572 - RNA, 1575 nt, Artificial Sequence
  derived and/or modified CDS sequence (opt1) from glycoprotein__RABV__AB496691.1
augauccugcaggcccuccuguucgugccccugcucaucagcucccugugccugggcaaguucccgaucuacaccauccccgacaagcucgggcccuggagccccaucgacauccaccaccuguccugcccgaacaaccuggucguggaggacgagggcugcaccaaccucagcggguucuccuacauggagcugaaggugggcuacaucagcgccaucaaggucaacggguucacgugcaccggcguggugaccgaggcggagaccuacacgaacuucgucggcuacgugaccaccaccuucaagcgcaagcacuuccggcccauccccgacgccugccgcgccgccuacaacuggaagauggccggggacccccgguacgaggagucccugcagaacccguaccccgacuaccacuggcuccgcacggugaagaccaccaaggagagccugaucaucaucucccccagcgucgcggaccuggaccccuacgacaagucccuccacagccggguguucccgggcgggaagugccugggcaucaccguguccagcacguacugcuccaccaaccacgacuacaccaucuggaugcccgaggagccccgccuggggaccagcugcgacaucuucaucuccagcaagggcaagaaggccuccaagggcgggaagacgugcggcuucgucgacgagcgggggcucuacaagagccugaagggcgccugcaagcugaagcucugcggcgugcuggggcugcgccucauggacggcaccugggugagcauccagaccuccgacgacaccaaguggugcccgcccgaccagcuggucaaccugcacgacuuccacagcgacgagaucgagcaccucgugguggaggagcuggucaagaagcgggaggagugccuggacgcccucgaguccaucaugacgaccaagagcguguccuuccgccggcugagcuaccugcgcaagcucgugcccggguucggcaaggcguacaccaucuucaacaagacccugauggaggccgacgcccacuacaaguccguccggacguggaacgagaucauccccagcaaggggugccugaaggugcgcgagcggugccacccgcccguggacggcgucuucuucaacggcaucauccucgggcccgacggcaacgugcugauccccgagaugcaguccagccugcuccagcagcacauggagcugcuggaguccagcgucaucccccucaugcacccgcuggccgaccccuccaccguguucaaggagggggacgaggccgaggacuucguggagguccaccuccccgacgugcacaagcagaucagcggcguggaccuggggcugcccuccuggggcaaguaccugcucaugaucgcgggcgggcuggccacccugguccugaucaucugcagcauggccugcugccgccggaccaagcgcacggagucccggcgccggggcagccgcgaguccgagaagaaggugaccgccgccccgcagacccgcaagguggucagcagcugggagcucuacaaguccgagggggacgcgcggcuguga

SEQ ID NO: 94573 - RNA, 1575 nt, Artificial Sequence; identical to SEQ ID NO: 94566
  derived and/or modified CDS sequence (opt1) from glycoprotein__RABV__AB496692.1

SEQ ID NO: 94574 - RNA, 1575 nt, Artificial Sequence; identical to SEQ ID NO: 94540
  derived and/or modified CDS sequence (opt1) from glycoprotein__RABV__AB496694.1

SEQ ID NO: 94575 - RNA, 1575 nt, Artificial Sequence; identical to SEQ ID NO: 94540
  derived and/or modified CDS sequence (opt1) from glycoprotein__RABV__AB496695.1

SEQ ID NO: 94576 - RNA, 1575 nt, Artificial Sequence; identical to SEQ ID NO: 94570
  derived and/or modified CDS sequence (opt1) from glycoprotein__RABV__AB496696.1

SEQ ID NO: 94577 - RNA, 1575 nt, Artificial Sequence
  derived and/or modified CDS sequence (opt1) from glycoprotein__RABV__AB496697.1
augauccugcaggcccuccgcuucgugccccugcugaucagcucccucugccugggcaaguucccgaucuacaccauccccgacaagcuggggcccuggagccccaucgacauccaccaccucuccugcccgaacaaccuggucguggaggacgagggcugcaccaaccugagcggguucuccuacauggagcucaaggugggcuacaucagcgccaucaaggucaacggguucacgugcaccggcguggugaccgaggcggagaccuacacgaacuucgucggcuacgugaccaccaccuucaagcggaagcacuuccgccccauccccgacgccugccgggccgccuacaacuggaagauggccggggacccccgcuacgaggagucccugcagaacccguaccccgacuaccacuggcugcggacggugaagaccaccaaggagagccucaucaucaucucccccagcgucgcggaccuggaccccuacgacaagucccugcacagccgcguguucccgggcgggaagugccucggcaucaccguguccagcacguacugcuccaccaaccacgacuacaccaucuggaugcccgaggagccccggcuggggaccagcugcgacaucuucacguccagcaagggcaagaaggccuccaagggcgggaagaccugcggcuucgucgacgagcgcgggcuguacaagagccucaagggcgccugcaagcugaagcugugcggcgugcucgggcugcggcugauggacggcaccugggugagcauccagaccuccgacgacacgaaguggugcccgcccgaccagcucgucaaccugcacgacuuccacagcgacgagaucgagcaccuggugguggaggagcucgucaagaagcgcgaggagugccuggacgcccuggaguccaucaugaccaccaagagcguguccuuccggcgccucagcuaccugcggaagcuggugcccggguucggcaaggcguacaccaucuucaacaagacgcucauggaggccgacgcccacuacaaguccguccgcaccuggaacgagaucauccccagcaaggggugccugaaggugcgggagcgcugccacccgcccguggacggcgucuucuucaacggcaucauccuggggcccgacggcaacgugcucauccccgagaugcaguccagccugcugcagcagcacauggagcuccuggaguccagcgucaucccccugaugcacccgcucgccgaccccuccaccguguucaaggagggggacgaggccgaggacuucguggagguccaccuccccgacgugcacaagcagaucagcggcguggaccuggggcugcccuccuggggcaaguaccugcugaugaucgcgggcgggcucgccgcccugguccugaucaucugcagcauggccugcugccggcgcaccaagcggacggagucccgccggcgcggcagcggggaguccgagaagaaggugaccgugaccccgcagacccgcaaggucgugagcagcugggagcuguacaaguccgagggcgacgcccggcucuga

SEQ ID NO: 94578 - RNA, 1575 nt, Artificial Sequence
  derived and/or modified CDS sequence (opt1) from glycoprotein__RABV__AB496698.1
augauccugcaggccauccucuucgugccccugcugaucagcucccucugccugggcaaguucccgaucuacaccauccccgacaagcuggggcccuggagccccaucgacauccaccaccucuccugcccgaacaaccuggucguggaggacgagggcugcaccaaccugagcggguucuccuacauggagcucaaggugggcuacaucagcgccaucaaggucaacggguucacgugcaccggcguggugaccgaggcggucaccuacacgaacuucgugggcuacgugaccaccaccuucaagcgcaagcacuuccggcccguccccgacgccugccgcacggccuacaacuggaagauggccggggacccccgguacgaggagucccugcagaacccguaccccgacuaccacuggcugcgcaccgugaagaccaccaaggagagccucaucaucaucucccccagcguggccgaccuggaccccuacgacaagucccugcacagccgggucuucccgggcgggaagugccucggcaucacgguguccagcaccuacugcuccaccaaccacgacuacaccaucuggaugcccgaggagccccgccuggggacgagcugcgacaucuucaccuccagcaagggcaagaaggcguccaagggcgggaagaccugcggcuucguggacgagcgggggcuguacaagagccucaagggcgccugcaagcugaagcugugcggcguccucgggcugcgccugauggacggcaccugggugagcauccagacguccgacgacaccaaguggugcccgcccgaccagcucgugaaccugcacgacuuccacagcgacgagaucgagcaccuggucguggaggagcucgugaagaagcgggaggagugccuggacgcccuggaguccaucaugaccaccaagagcgucuccuuccgccggcucagcuaccugcgcaagcuggugcccggguucggcaaggccuacacgaucuucaacaagacccucauggaggcggacgcccacuacaaguccgugcggaccuggaacgagaucauccccagcaaggggugccugaagguccgcgagcggugccacccgcccguggacggcgucuucuucaacggcaucauccuggggcccgacggcaacgugcucauccccgagaugcaguccagccugcugcagcagcacauggagcuccuggaguccagcgugaucccccugaugcacccgcucgccgaccccuccaccgucuucaaggagggggacgaggccgaggacuucguggaggugcaccuccccgacguccacaagcagaucagcggcguggaccuggggcugcccuccuggggcaaguaccugcugaugaucgccggcgggcucgcgacgcuggugcugaucaucugcagcauggccugcugccgccggaccaagcgcaccgagucccggcgccggggcagcggggaguccggcaagaaggucaccgccacgccgcagacccgcaagguggugagcagcugggagcuguacaaguccgagggggacgcccgccucuga

SEQ ID NO: 94579 - RNA, 1575 nt, Artificial Sequence
  derived and/or modified CDS sequence (opt1) from glycoprotein__RABV__AB496699.1
augauccugcaggccauccucuucgugccccugcugaucagcucccucugccugggcaaguucccgaucuacaccauccccgacaagcuggggcccuggagccccaucgacauccaccaccucuccugcccgaacaaccuggucguggaggacgagggcugcaccaaccugagcggguucuccuacauggagcucaaggugggcuacaucagcgccaucaaggucaacggguucacgugcaccggcguggugaccgaggcggagaccuacacgaacuucgucggcuacgugaccaccaccuucaagcgcaagcacuuccggcccgugcccgacgccugccgcacggccuacaacuggaagauggccggggacccccgguacgaggagucccugcagaacccguaccccgacuaccacuggcugcgcaccgucaagaccaccaaggagagccucaucaucaucucccccagcguggccgaccuggaccccuacgacaagucccugcacagccggguguucccgggcgggaagugccucggcaucacggucuccagcaccuacugcuccaccaaccacgacuacaccaucuggaugcccgaggagccccgccuggggacgagcugcgacaucuucaccuccagcaagggcaagaaggcguccaagggcgggaagaccugcggcuucguggacgagcgggggcuguacaagagccucaagggcgccugcaagcugaagcugugcggcgugcucgggcugcgccugauggacggcaccugggucagcauccagacguccgacgacaccaaguggugcccgcccgaccagcucgugaaccugcacgacuuccacagcgacgagaucgagcaccugguggucgaggagcucgugaagaagcgggaggagugccuggacgcccuggaguccaucaugaccaccaagagcguguccuuccgccggcucagcuaccugcgcaagcugguccccggguucggcaaggccuacacgaucuucaacaagacccucauggaggcggacgcccacuacaaguccgugcggaccuggaacgagaucauccccagcaaggggugccugaaggugcgcgagcggugccacccgcccgucgacggcguguucuucaacggcaucauccuggggcccgacggcaacguccucauccccgagaugcaguccagccugcugcagcagcacauggagcuccuggaguccagcgugaucccccugaugcacccgcucgccgaccccuccaccguguucaaggagggggacgaggccgaggacuucgucgaggugcaccuccccgacgugcacaagcagaucagcggcgucgaccuggggcugcccuccuggggccgcuaccugcugaugaucgccggcgggcucgcgacgcuggugcugaucaucugcagcauggccugcugccggcgcaccaagcggaccgagucccgccggcgcggcagcggggaguccggcaagaaggugaccgccacgccgcagacccgcaaggucgugagcagcugggagcuguacaaguccgagggggacgcccggcucuga

SEQ ID NO: 94580 - RNA, 1575 nt, Artificial Sequence
  derived and/or modified CDS sequence (opt1) from glycoprotein__RABV__AB496701.1
augauccugcaggccauccucuucgugccccugcugaucagcucccucugccugggcaaguucccgaucuacaccauccccgacaagcuggggcccuggagccccaucgacauccaccaccucuccugcccgaacaaccuggucguggaggacgagggcugcaccaaccugagcggguucuccuacauggagcucaaggugggcuacaucagcgccaucaaggucaacggguucacgugcaccggcguggugaccgaggcggagaccuacacgaacuucgucggcuacgugaccaccaccuucaagcgcaagcacuuccggcccgugcccgacgccugccgcacggccuacaacuggaagauggccggggacccccgguacgaggagucccugcagaacccguaccccgacuaccacuggcugcgcaccguccggaccaccaaggagagccucaucaucaucucccccagcguggccgaccuggaccccuacgacaagucccugcacagccgcguguucccgggcgggaagugccucggcaucacggucuccagcaccuacugcuccaccaaccacgacuacaccaucuggaugcccgaggagccccggcuggggacgagcugcgacaucuucaccuccagcaagggcaagaaggcguccaagggcgggaagaccugcggcuucguggacgagcgcgggcuguacaagagccucaagggcgccugcaagcugaagcugugcggcgugcucgggcugcggcugauggacggcaccugggucagcauccagacguccgacgacaccaaguggugcccgcccgaccagcucgugaaccugcacgacuuccacagcgacgagaucgagcaccugguggucgaggagcucgugaagaagcgcgaggagugccuggacgcccuggaguccaucaugaccaccaagagcguguccuuccggcgccucagcuaccugcggaagcugguccccggguucggcaaggccuacacgaucuucaacaagacccucauggaggcggacgcccacuacaaguccgugcgcaccuggaacgagaucauccccagcaaggggugccugaaggugcgggagcgcugccacccgcccgucgacggcguguucuucaacggcaucauccuggggcccgacggcaacguccucauccccgagaugcaguccagccugcugcagcagcacauggagcuccuggaguccagcgugaucccccugaugcacccgcucgccgaccccuccaccguguucaaggagggggacgaggccgaggacuucgucgaggugcaccuccccgacgugcacaagcagaucagcggcgucgaccuggggcugcccuccuggggcaaguaccugcugaugaucgccggcgggcucgcgacgcuggugcugaucaucugcagcauggccugcugccggcgcaccaagcggaccgagucccgccggcgcggcagcggggaguccggcaagaaggugaccgccacgccgcagacccgcaaggucgugagcagcugggagcuguacaaguccgagggggacgcccggcucuga

SEQ ID NO: 94581 - RNA, 1575 nt, Artificial Sequence
  derived and/or modified CDS sequence (opt1) from glycoprotein__RABV__AB496703.1
augauccugcaggccauccucuucgugccccugcugaucagcucccucugccugggcaaguucccgaucuacaccauccccgacaagcuggggcccuggagccccaucgacauccaccaccucuccugcccgaacaaccuggucguggaggacgagggcugcaccaaccugagcggguucuccuacauggagcucaaggugggcuacaucagcgccaucaaggucaacggguucacgugcaccggcguggugaccgaggcggagaccuacacgaacuucgucggcuacgugaccaccaccuucaagcgcaagcacuuccggcccgugcccgacgccugccgcacggccuacaacuggaagauggccggggacccccgguacgaggagucccugcagaacccguaccccgacuaccacuggcugcgcaccgucaagaccaccaaggagagccucaucaucaucucccccagcguggccgaccuggaccccuacgacaagucccugcacagccggguguucccgggcgggaagugccucggcaucacggucuccagcaccuacugcuccaccaaccacgacuacaccaucuggaugcccgaggagccccgccuggggacgagcugcgacaucuucaccuccagcaagggcaagaaggcguccaagggcgggcggaccugcggcuucguggacgagcgcgggcuguacaagagccucaagggcgccugcaagcugaagcugugcggcgugcucgggcugcggcugauggacggcaccugggucagcauccagacguccgacgacaccaaguggugcccgcccgaccagcucgugaaccugcacgacuuccacagcgacgagaucgagcaccugguggucgaggagcucgugaagaagcgcgaggagugccuggacgcccuggaguccaucaugaccaccaagagcguguccuuccggcgccucagcuaccugcggaagcugguccccggguucggcaaggccuacacgaucuucaacaagacccucauggaggcggacgcccacuacaaguccgugcgcaccuggaacgagaucauccccagcaaggggugccugaaggugcgggagcgcugccacccgcccgucgacggcguguucuucaacggcaucauccuggggcccgacggcaacguccucauccccgagaugcaguccagccugcugcagcagcacauggagcuccuggaguccagcgugaucccccugaugcacccgcucgccgaccccuccaccguguucaaggagggggacgaggccgaggacuucgucgaggugcaccuccccgacgugcacaagcagaucagcggcgucgaccuggggcugcccuccuggggccgguaccugcugaugaucgccggcgggcucgcgacgcuggugcugaucaucugcagcauggccugcugccgccggaccaagcgcaccgagucccggcgccgcggcagcggggaguccggcaagaaggugaccgccacgccgcagacccggaaggucgugagcagcugggagcuguacaaguccgagggggacgcccgccucuga

SEQ ID NO: 94582 - RNA, 1575 nt, Artificial Sequence; identical to SEQ ID NO: 94578
  derived and/or modified CDS sequence (opt1) from glycoprotein__RABV__AB496705.1

SEQ ID NO: 94583 - RNA, 1575 nt, Artificial Sequence
  derived and/or modified CDS sequence (opt1) from glycoprotein__RABV__AB517659.1
auggugccccaggcccugcuccuggucccgcugcucgccgugagcuucugcuucggcaaguuccccaucuacaccauccccgacaagcuggggcccugguccccgaucgacauccaccaccugagcugccccaacaaccucguggucgaggacgagggcugcaccaaccuguccggguucagcuacauggagcugaaggugggcuacaucuccgcgaucaaggugaacggguucacgugcaccggcgucgugaccgaggccgagaccuacacgaacuucgugggcuacgucaccaccaccuucaagcgcaagcacuuccggcccacgcccgacgccugccgcagcgccuacaacuggaagauggccggggacccgcgguacgaggagucccuccacaaccccuaccccgacuaccacuggcugcgcaccgugaagaccaccaaggagagccuggugaucaucucccccagcgucgcggaccucgacccguacgacaagucccugcacagccggguguuccccuccggcaagugcagcgggaucacgguguccagcaccuacugcuccaccaaccacgacuacaccaucuggcugcccgagaacccccgccucggcacgagcugcgacaucuucaccaacucccgggggaagcgcgccagcaagggcagcaagaccugcggcuucgucgacgagcgggggcuguacaagucccugaagggcgccugcaagcucaagcugugcggggugcugggccuccgccugauggacggcaccuggguggccaugcagacgagcgacgagaccaaguggugcccgcccgaccagcuggucaaccuccacgacuuccgguccgacgagaucgagcaccuggugguggaggagcuggucaagaagcgcgaggagugccucgacgcgcuggagagcaucaugaccaccaaguccgugagcuuccggcgccugucccaccuccggaagcuggugcccggguucggcaaggccuacacgaucuucaacaagacccugauggaggccgacgcccacuacaagagcguccgcaccuggaacgagaucauccccuccaaggggugccuccgggugggcgggcgcugccacccgcacgucaacggcguguucuucaacggcaucauccuggggcccgacggccacgugcugauccccgagaugcagagcucccuccugcagcagcacauggagcugcucgagagcuccgucaucccccugaugcacccgcuggccgaccccagcaccguguucaaggacggggacgaggcggaggacuucguggagguccaccuccccgacgugcacaagcaggucuccggcguggaccuggggcugcccaacuggggcaaguacgugcucaugagcgccggcgugcugaucgcccugaugcucaucaucuuccugaugacgugcugccggcgcgucaaccggccggacuccacccagcgcagcuucgggcgcaccggccggaagguguccgugaccagccagagcgggaaggucaucuccagcugggaguccuacaagagcggcggggagacgcgccuguga

SEQ ID NO: 94584 - RNA, 1575 nt, Artificial Sequence
  derived and/or modified CDS sequence (opt1) from glycoprotein__RABV__AB517660.1
auggugccccagacccugcuguucgucccgcugcugguguucagccucugcuucggcaaguuccccaucuacaccauccccgacaagcuggggcccugguccccgaucgacauccaccaccugagcugccccaacaaccucguggucgaggacgagggcugcacgaaccuguccggguucagcuacauggagcugaaggugggcuacaucuccgccaucaaggugaacggguucacgugcaccggcgucgugaccgaggccgagaccuacaccaacuucgugggcuacgucaccaccacguucaagcgcaagcacuuccggcccacccccgacgcgugccgcgccgccuacaacuggaagauggccggggacccgcgguacgaggagagccuccacaaccccuaccccgacuaccacuggcugcgcaccgugaagaccacgaaggagucccuggugaucaucagccccuccgucgccgaccucgacccguacgacaagagccugcacucccggguguuccccagcggcaagugccuggggaucaccguguccagcaccuacugcuccaccaaccacgacuacacggucuggcgccccgagaacccccggcucggcaccagcugcgacaucuucaccaacucccgcgggaagcgggcgagcaagggcuccaagaccugcggcuucguggacgagcgcgggugguacaagagcuggaagggcgccugcaagcugaagcugugcggggugcucggccugcggcugaucgacggcacguggaucgccaugcagaccagcgaggagaccaaguggugcccgcccgaccagcucgucaaccugcacgacuuccgcuccgacgagaucgagcaccuggugguggaggagcucgucaagaagcgggaggagugccuggacgcccuggagagcaucaugaccacgaaguccgugagcuuccgccggcucucccaccuccgcaagcuggugcccggguucggcaaggcguacaccaucuucaacaagacccucauggaggccgacgcccacuacaagagcauccggaccuggaacgagaucauccccuccaaggggugccugcgcgucggcgggaagugccacccgcacgugaacggcgucuucuucaacggcaucauccuggggcccgacggccacgugcucauccccgagaugcagagcucccugcugcagcagcacauggagcuccuggagagcuccgugaucccccugaugcacccgcucgccgaccccuacacggucuucaaggacggggacgaggccgaggacuucguggaggugcaccuccccgacguccacaagcuggugagcggcguggaccuggggcugcccaacuggggcaaguaccugcucauguccgucggcgugcugaucgcgcugaugcucaucaucuuccugaugaccugcugccgcggggugcaccggccggacagcgcccagcagaagcugggcgggaccggccggcgcgucuccaucaccagccagggcgggcgcgugaucuccagcugggaguccuacaagagcggcggggacacgcggcuguga

SEQ ID NO: 94585 - RNA, 1575 nt, Artificial Sequence; identical to SEQ ID NO: 94534
  derived and/or modified CDS sequence (opt1) from glycoprotein__RABV__AB518487.1

SEQ ID NO: 94586 - RNA, 1575 nt, Artificial Sequence; identical to SEQ ID NO: 94534
  derived and/or modified CDS sequence (opt1) from glycoprotein__RABV__AB518488.1

SEQ ID NO: 94587 - RNA, 1575 nt, Artificial Sequence
  derived and/or modified CDS sequence (opt1) from glycoprotein__RABV__AB518489.1
auggugccccaggcccugcuguucgucccgcugcuggccuucagcuucugcuucggcaaguuccccaucuacaccauccccgacaagcucgggcccugguccccgaucgacauccaccaccugagcugccccaacaaccuggugguggaggacgagggcugcaccaaccucuccggguucagcuacauggagcugaaggucggcuacaucuccgcgaucaaggugaacggguucacgugcaccggcguggucaccgaggccgagaccuacacgaacuucgugggcuacgugaccaccaccuucaagcgcaagcacuuccggcccacgcccgacgccugccgcagcgccuacaacuggaagauggccggggacccgcgguacgaggagucccugcacaaccccuaccccgacuaccacuggcuccgcaccgucaagaccaccaaggagagccuggugaucaucucccccagcguggcggaccuggacccguacgacaagucccuccacagccgggucuuccccaacggcaagugcuccgggaucacggugagcuccaccuacugcagcaccaaccacgacuacaccaucuggcugcccgagaacccccgccugggcacguccugcgacaucuucaccaacagccgggggaagcgcgccuccaagggcagcaagaccugcggcuucguggacgagcgggggcucuacaagagccugaagggcgccugcaagcugaagcucugcgggguccugggccugcgccucauggacggcaccuggguggccaugcagacguccgacgagaccaaguggugcccgcccgaccagcuggugaaccugcacgacuuccggagcgacgagaucgagcaccucgucguggaggagcuggugaagaagcgcgaggagugccuggacgcgcucgaguccaucaugaccaccaagagcgucuccuuccggcgccugagccaccuccggaagcucgugcccggguucggcaaggccuacacgaucuucaacaagacccugauggaggccgacgcccacuacaaguccauccgcaccuggaacgagaucauccccagcaaggggugccugcgggugggcgggcgcugccacccgcacgucaacggcguguucuucaacggcaucauccucgggcccgacggccacguccugauccccgagaugcaguccagccugcuccagcagcacauggagcugcuggaguccagcgugaucccccucaugcacccgcuggccgaccccuccaccguguucaaggacggggacgaggcggaggacuucgucgaggugcaccuccccgacgugcacaagcaggucagcggcguggaccuggggcugcccaacuggggcaaguacgugcugauguccgccggcguccucaucgcccugaugcugacgaucuuccucaugaccugcugccggcgcgugaaccggccggacagcacccagcgcucccuggggaugaccggccgcaaggugagcgucacgucccagagcgggaaggugaucagcuccugggagagcuacaaguccggcggggagacccggcuguga

SEQ ID NO: 94588 - RNA, 1575 nt, Artificial Sequence
  derived and/or modified CDS sequence (opt1) from glycoprotein__RABV__AB518490.1
auggugccccaggcccugcuguucgucccgcugcuggccuucagcuucugcuucggcaaguuccccaucuacaccauccccgacaagcucgggcccugguccccgaucgacauccaccaccugagcugccccaacaaccuggugguggaggacgagggcugcaccaaccucuccggguucagcuacauggagcugaaggucggcuacaucuccgcgaucaaggugaacggguucacgugcaccggcguggucaccgaggccgagaccuacacgaacuucgugggcuacgugaccaccaccuucaagcgcaagcacuuccggcccacgcccgacgccugccgcagcgccuacaacuggaagauggccggggacccgcgguacgaggagucccugcacaaccccuaccccgacuaccacuggcuccgcaccgucaagaccaccaaggagagccuggugaucaucucccccagcguggcggaccuggacccguacgacaagucccuccacagccgggucuuccccaacggcaagugcuccgggaucacggugagcuccaccuacugcagcaccaaccacgacuacaccaucuggcugcccgagaacccccgccugggcacguccugcgacaucuucaccaacagccgggggaagcgcgccuccaagggcggcaagaccugcggguucguggacgagcggggccucuacaagagccugaagggggccugcaagcugaagcucugcggcguccugggccugcgccucauggacgggaccuggguggccaugcagacgagcgacgaggcgaaguggugcccgcccgaccagcuggugaaccugcacgacuuccgguccgacgagaucgagcaccucgucguggaggagcuggugaagaagcgcgaggagugccuggacgcccucgagagcaucaugaccaccaaguccgucagcuuccggcgccugucccaccuccggaagcucgugcccggcuucgggaaggccuacaccaucuucaacaagacgcugauggaggccgacgcccacuacaagagcauccgcaccuggaacgagaucauccccuccaagggcugccugcgggucgggggccgcugccacccgcacgugaacggcguguucuucaacgggaucauccucggccccgacgggcacguccugauccccgagaugcagagcucccugcuccagcagcacauggagcugcuggagagcuccgugaucccccucaugcacccgcuggcggaccccagcaccguguucaaggacggcgacgaggccgaggacuucgucgaggugcaccuccccgacgugcacaagcaggucuccgggguggaccugggccugcccaacuggggcaaguacgugcugaugagcgccgggguccucaucgcccugaugcugaccaucuuccucaugacgugcugccggcgcgugaaccggccggacuccacccagcgcagccugggcaugaccgggcgcaagguguccgucaccagccaguccggcaaggugaucagcagcugggaguccuacaagagcgggggcgagacgcggcuguga

SEQ ID NO: 94589 - RNA, 1575 nt, Artificial Sequence
  derived and/or modified CDS sequence (opt1) from glycoprotein__RABV__AB518492.1
auggugccccaggcccugcuguucgucccgcugcuggccgugagcuucugcuucggcaaguuccccaucuacaccauccccgacaagcucgggcccugguccccgaucgacauccaccaccugagcugccccaacaaccugguggucgaggacgagggcugcaccaaccucuccggguucagcuacauggagcugaaggugggcuacaucuccgcgaucaaggugaacggguucacgugcaccggcgucgugaccgaggccgagaccuacacgaacuucgugggcuacgucaccaccaccuucaagcgcaagcacuuccggcccacgcccgacgccugccgcagcgccuacaacuggaagauggccggggacccgcgguacgaggagucccugcacaaccccuaccccgacuaccacuggcuccgcaccgugaagaccaccaaggagagccuggugaucaucucccccagcgucgcggaccuggacccguacgacaagucccuccacagccggguguuccccuccggcaagugcagcgggaucacgguguccagcaccuacugcuccaccaaccacgacuacaccaucuggcugcccgagaacccccgccugggcacgagcugcgacaucuucaccaacucccgggggaagcgcgccagcaagggcagcaagaccugcggcuucgucgacgagcgggggcucuacaagucccugaagggcgccugcaagcugaagcucugcggggugcugggccugcgccucauggacggcaccuggguggccaugcagacgagcgacgagaccaaguggugcccgcccgaccagcuggucaaccugcacgacuuccgguccgacgagaucgagcaccucgugguggaggagcuggucaagaagcgcgaggagugccuggacgcgcucgagagcaucaugaccaccaaguccgugagcuuccggcgccugucccaccuccggaagcucgugcccggguucggcaaggccuacacgaucuucaacaagacccugauggaggccgacgcccacuacaagagcguccgcaccuggaacgagaucauccccuccaaggggugccugcgggugggcgggcgcugccacccgcacgucaacggcguguucuucaacggcaucauccucgggcccgacggccacgugcugauccccgagaugcagagcucccugcuccagcagcacauggagcugcuggagagcuccgucaucccccucaugcacccgcuggccgaccccagcaccguguucaaggacggggacgaggcggaggacuucguggagguccaccuccccgacgugcacaagcaggucuccggcguggaccuggggcugcccaacuggggcaaguacgugcugaugagcgccggcgugcucacggcccugaugcugaucaucuuccucaugaccugcugccggcgcgucaaccggccggacuccacccagcgcagccuggggcgcaccggccggaagguguccgugacgagccagagcgggaaggucaucuccagcugggaguccuacaagagcggcggggagacccgccuguga

SEQ ID NO: 94590 - RNA, 1575 nt, Artificial Sequence
  derived and/or modified CDS sequence (opt1) from glycoprotein__RABV__AB518493.1
auggugccccaggcccugcuguucgucccgcugcugguguucagccucugcuccggcaaguucccccuguacaccauccccgacaagcuggggcccuggagcccgaucgacauccaccaccucuccugccccaacaaccugguggucgaggacgagggcugcaccaaccugagcggguucuccuacauggagcucaaggugggcuacaucagcgccaucaaggugaacggguucacgugcaccggcgucgugaccgaggcggagaccuacacgaacuucgugggcuacgucaccaccaccuucaagcgcaagcacuuccggcccacgcccgacgccugccgcgccgccuacaacuggaagauggccggggacccgcgguacgaggagucccugcacaaccccuaccccgacuaccacuggcugcgcaccgugaagaccaccaaggagagccucguggucaucucccccagcguggcggaccuggacccguacgacaagucccugcacagccggguguuccccuccggcaagugcagcgggaucacggucuccagcaccuacugcuccaccaaccacgacuacaccaucuggaugcccgagaacccccgccucggcacgagcugcgacaucuucaccaacucccgggggaagcgcgccagcaagggcagcaagaccugcggcuucguggacgagcgggggcuguacaagucccugaagggcgccugcaagcucaagcugugcggggugcugggccuccgccugauggacggcaccugggucgccaugcagaucagcgacgagacgaaguggugcccgcccgaccagcuggugaaccuccacgacuuccgguccgacgagaucgagcaccugguggucgaggagcuggugaagaagcgcgaggagugccucgacgcgcuggagagcaucaugaccaccaaguccgugagcuuccggcgccugucccaccuccggaagcugguccccggguucggcaaggccuacaccaucuucaacaagacgcugauggaggccgacgcccacuacaagagcauccgcaccuggaacgagaucauccccuccaaggggugccuccgggugggcgggcgcugccacccgcacgucagcggcguguucuucaacggcaucauccuggggcccgacggccacgugcugauccccgagaugcaguccagccuccugcagcagcacauggagcugcucgaguccagcgucaucccccugaugcacccgcuggccgaccccuccaccguguucaaggacggggacgaggcggaggacuucguggagguccaccuccccgacgugcacaagcaggucagcggcguggaccuggggcugcccaacuggggcaaguacgugcucauguccgccggcgcccugaucgcccugaugcucaucaucuuccugaugaccugcugccggcgcgugaaccggcuggacagcacgcagcaccgccucgggggcaccgggcgcaaggucuccgugaccccgcagggcgggaaggugaucagcagcugggaguccuacaagagcggcggcgagacccggcucuga

SEQ ID NO: 94591 - RNA, 1575 nt, Artificial Sequence
  derived and/or modified CDS sequence (opt1) from glycoprotein__RABV__AB518494.1
auggugccccaggcccugcuguucgucccgcugcugguguucagccucugcuucggcaaguucccccuguacaccauccccgacaagcuggggcccugguccccgaucgacauccaccaccucagcugccccaacaaccugguggucgaggacgagggcugcaccaaccuguccggguucagcuacauggagcucaaggugggcuacaucuccgccaucaaggugaacggguucacgugcaccggcgucgugaccgaggcggagaccuacacgaacuucgugggcuacgucaccaccaccuucaagcgcaagcacuuccggcccacgcccgacgccugccgcgccgccuacaacuggaagauggccggggacccgcgguacgaggagagccugcacaaccccuaccccgacuaccacuggcugcgcaccgugaagaccaccaaggagucccucguggucaucagccccuccguggcggaccuggacccguacgacaagagccugcacucccggguguuccccagcggcaagugcuccgggaucacggucagcuccaccuacugcagcaccaaccacgacuacaccaucuggaugcccgagaacccccgccucggcacguccugcgacaucuucaccaacagccgggggaagcgcgccuccaagggcagcaagaccugcggcuucguggacgagcgggggcuguacaagagccugaagggcgccugcaagcucaagcugugcggggugcugggccuccgccugauggacggcaccugggucgccaugcagaucuccgacgagacgaaguggugcccgcccgaccagcuggugaaccuccacgacuuccggagcgacgagaucgagcaccugguggucgaggagcuggugaagaagcgcgaggagugccucgacgcgcuggaguccaucaugaccaccaagagcguguccuuccggcgccugagccaccuccggaagcugguccccggguucggcaaggccuacaccaucuucaacaagacgcugauggaggccgacgcccacuacaaguccauccgcaccuggaacgagaucauccccagcaaggggugccuccgggugggcgggcgcugccacccgcacgucuccggcguguucuucaacggcaucauccuggggcccgacggccacgugcugauccccgagaugcagagcucccuccugcagcagcacauggagcugcucgagagcuccgucaucccccugaugcacccgcuggccgaccccagcaccguguucaaggacggggacgaggcggaggacuucguggagguccaccuccccgacgugcacaagcaggucuccggcguggaccuggggcugcccaacuggggcaaguacgugcucaugagcgccggcgcccugaucgcccugauggugaucaucuuccucaugaccugcugccggcgcgucaaccggcuggacuccacgcagcaccgccucgggggcaccgggcgcaaggugagcgugaccccgcagggcgggaaggucaucuccagcugggagagcuacaaguccggcggcgagacccggcuguga

SEQ ID NO: 94592 - RNA, 1575 nt, Artificial Sequence; identical to SEQ ID NO: 94590
  derived and/or modified CDS sequence (opt1) from glycoprotein__RABV__AB518495.1

SEQ ID NO: 94593 - RNA, 1575 nt, Artificial Sequence
  derived and/or modified CDS sequence (opt1) from glycoprotein__RABV__AB519641.1
augauccugcaggcccuccuguucgugccccugcucaucagcucccugugccugggcaaguucccgaucuacaccauccccgacaagcucgggcccuggagccccaucgacauccaccaccuguccugcccgaacaaccuggucguggaggacgagggcugcaccaaccucagcggguucuccuacauggagcugaaggugggcuacaucagcgccaucaaggucaacggguucacgugcaccggcguggugaccgaggcggagaccuacacgaacuucgucggcuacgugaccaccaccuucaagcgcaagcacuuccggcccgugcccgacgccugccgcgccgccuacaacuggaagauggccggggacccccgguacgaggagucccugcagaacccguaccccgacuaccacuggcuccgcacggucaagaccaccaaggagagccugaucaucaucucccccagcguggcggaccuggaccccuacgacaagucccuccacagccggguguucccgggcgggaagugccugggcaucaccgucuccagcacguacugcuccaccaaccacgacuacaccaucuggaugcccgaggagccccgccuggggaccagcugcgacaucuucacguccagcaagggcaagaaggccuccaagggcgggaagaccugcggcuucguggacgagcgggggcucuacaagagccugaagggcgccugcaagcugaagcucugcggcgugcuggggcugcgccucauggacggcaccugggucagcauccagaccuccgacgacacgaaguggugcccgcccgaccagcuggugaaccugcacgacuuccacagcgacgagaucgagcaccucguggucgaggagcuggugaagaagcgggaggagugccuggacgcccucgaguccaucaugaccaccaagagcaucuccuuccgccggcugagcuaccugcgcaagcucgugcccggguucggcaaggcguacaccaucuucaacaagacgcugauggaggccgacgcccacuacaaguccguccggaccuggaacgagaucauccccagcaaggggugccugaaggugcgcgagcggugccacccgcccguggacggcgucuucuucaacggcaucauccucgggcccgacggcaacgugcugauccccgagaugcaguccagccugcuccagcagcacauggagcugcuggaguccagcgucaucccccucaugcacccgcuggccgaccccuccaccguguucaaggagggggacgaggccgaggacuucguggagguccaccuccccgacgugcacaagcagaucagcggcguggaccuggggcugcccuccuggggcaaguaccugcucaugaucgcgggcgggcuggccgcccugguccugaucaucugcagcauggccugcugccgccggaccaagcgcacggagucccggcgccggggcagcggggaguccgagaagaaggugaccgccaccccgcagacccgcaaggugaucagcagcugggagcucuacaaguccgagggcgacgcgcgccuguga

SEQ ID NO: 94594 - RNA, 1575 nt, Artificial Sequence
  derived and/or modified CDS sequence (opt1) from glycoprotein__RABV__AB519642.1
augauccugcaggcccuccuguucgugccccugcucaucagcucccugugccugggcaaguucccgaucuacaccauccccgacaagcucgggcccuggagccccaucgacauccaccaccuguccugcccgaacaaccuggucguggaggacgagggcugcaccaaccucagcggguucuccuacauggagcugaaggugggcuacaucagcgccaucaaggucaacggguucacgugcaccggcguggugaccgaggcggagaccuacacgaacuucgucggcuacgugaccaccaccuucaagcgcaagcacuuccggcccauccccgacgccugccgcgccgccuacaacuggaagauggccggggacccccgguacgaggagucccugcagaacccguaccccgacuaccacuggcuccgcacggugaagaccaccaaggagagccugaucaucaucucccccagcgucgcggaccuggaccccuacgacaagucccuccacagccggguguucccgggcgggaagugccugggcaucaccguguccagcacguacugcuccaccaaccacgacuacaccaucuggaugcccgaggagccccgccuggggaccagcugcgacaucuucacguccagcaagggcaagaaggccuccaagggcgggaagaccugcggcuucgucgacgagcgggggcucuacaagagccugaagggcgccugcaagcugaagcucugcggcgugcuggggcugcgccucauggacggcaccugggugagcauccagaccuccgacgacacgaaguggugcccgcccgaccagcuggucaaccugcacgacuuccacagcgacgagaucgagcaccucgugguggaggagcuggucaagaagcgggaggagugccuggacgcccucgaguccaucaugaccaccaagagcguguccuuccgccggcugagcuaccugcgcaagcucgugcccggguucggcaaggcguacaccaucuucaacaagacgcugauggaggccgacgcccacuacaaguccguccggaccuggaacgagaucauccccagcaaggggugccugaaggugcgcgagcggugccacccgcccguggacggcgucuucuucaacggcaucauccucgggcccgacggcaacgugcugauccccgagaugcaguccagccugcuccagcagcacauggagcugcuggaguccagcgucaucccccucaugcacccgcuggccgaccccuccaccguguucaaggagggggacgaggccgaggacuucguggagguccaccuccccgacgugcacaagcagaucagcggcguggaccuggggcugcccuccuggggcaaguaccugcucaugaucgcgggcgggcuggccacccugguccugaucaucugcagcauggccugcugccgccggacgaagcgcaccgagucccggcgccgggacagccaggaguccgagaagaaggugaccgugaccccgcagacgcgcaaggucgugagcagcugggagcucuacaaguccgagggcgacgccagccuguga

SEQ ID NO: 94595 - RNA, 1575 nt, Artificial Sequence
  derived and/or modified CDS sequence (opt1) from glycoprotein__RABV__AB563791.1
augaucccccaggcccugcuguucgugccgcugcuggucuucagccucugcuucggcaaguuccccaucuacaccauccccgacaagcuggggcccugguccccgaucgacauccaccaccugagcugccccaacaaccucgugguggaggacgagggcugcaccaaccuguccggguucagcuacauggagcugaaggucggcuacaucuccgccaucaaggugaacggguucacgugcaccggcguggucaccgaggcggagaccuacacgaacuucgugggcuacgugaccaccaccuucaagcgcaagcacuuccggcccacgcccgacgccugccgcgccgccuacaacuggaagauggccggggacccgcgguacgaggagagccuccacaaccccuaccccgacuaccacuggcugcgcaccgucaagaccaccaaggagucccuggugaucaucagccccuccguggcggaccucgacccguacgacaagagccugcacucccgggucuuccccagcggcaagugcuccgggaucacggugagcuccaccuacugcagcaccaaccacgacuacaccaucuggaugcccgagaacccccgccugggcacguccugcgacaucuucaccaacagccgggggaagcgcgccuccaagggcagcaagaccugcggcuucguggacgagcgggggcucuacaagagccugaagggcgccugcaagcugaagcucugcgggguccugggccugcgccucauggacggcaccugggccgcgauccagacguccgacgagaccaaguggugcccgcccgaccagcuggugaaccugcacgacuuccggagcgacgagaucgagcaccucguggucgaggagcuggugaagaagcgcgaggagugccuggacgcccucgaguccaucaugaccaccaagagcguguccuuccggcgccugagccaccuccggaagcucguccccggguucggcaaggccuacacgaucuucaacaagacccugauggaggccgacgcccacuacaaguccgugcgcaccuggaacgagaucauccccagcaaggggugccugcgggugggcgggcgcugccacccgcacgucaacggcguguucuucaacggcaucauccucgggcccgacggccacguccugauccccgagaugcaguccagccugcuccagcagcacauggagcugcuggaguccagcgugaucccccucaugcacccgcuggcggaccccuccaccguguucaaggacgacgacgaggccgaggacuucgucgaggugcaccuccccgacgugcacaagcaggucagcgggguggaccugggccugcccuccugggggaaguacgugcugaugagcgccggcguccucacggcccugaugcugaugaucuuccucaugaccugcugccggcgcgccaaccggguggaguccgcgcagcacagccugggcgagcgcgggcgcaagguguccgucaccagccagagcggccgggugaucuccagcugggaguccuacaagagcgggggcgagaccaagcuguga

SEQ ID NO: 94596 - RNA, 1575 nt, Artificial Sequence
  derived and/or modified CDS sequence (opt1) from glycoprotein__RABV__AB563794.1
augaucccccaggcccugcuguucgugccgcugcuggucuucagccucugcuucggcaaguuccccaucuacaccauccccgacaagcuggggcccugguccccgaucgacauccaccaccugagcugccccaacaaccucgugguggaggacgagggcugcaccaaccuguccggguucagcuacauggagcugaaggucggcuacaucuccgccaucaaggugaacggguucacgugcaccggcguggucaccgaggcggagaccuacacgaacuucgugggcuacgugaccaccaccuucaagcgcaagcacuuccggcccacgcccgacgccugccgcgccgccuacaacuggaagauggccggggacccgcgguacgaggagagccuccacaaccccuaccccgacuaccacuggcugcgcaccgucaagaccaccaaggagucccuggugaucaucagccccuccguggcggaccucgacccguacgacaagagccugcacucccgggucuuccccagcggcaagugcuccgggaucacggugagcuccaccuacugcagcaccaaccacgacuacaccaucuggaugcccgagaacccccgccugggcacguccugcgacaucuucaccaacagccgggggaagcgcgccuccaagggcagcaagaccugcggcuucguggacgagcgggggcucuacaagagccugaagggcgccugcaagcugaagcucugcgggguccugggccugcgccucauggacggcaccugggccgcgauccagacguccgacgagaccaaguggugcccgcccgaccagcuggugaaccugcacgacuuccggagcgacgagaucgagcaccucguggucgaggagcuggugaagaagcgcgaggagugccuggacgcccucgaguccaucaugaccaccaagagcguguccuuccggcgccugagccaccuccggaagcucguccccggguucggcaaggccuacacgaucuucaacaagacccugauggaggccgacgcccacuacaaguccgugcgcaccuggaacgagaucauccccagcaaggggugccugcgggugggcgggcgcugccacccgcacgucaacggcguguucuucaacggcaucauccucgggcccgacggccacguccugauccccgagaugcaguccagccugcuccagcagcacauggagcugcuggaguccagcgugaucccccucaugcacccgcuggcggaccccuccaccguguucaaggacgacgacgaggccgaggacuucgucgaggugcaccuccccgacgugcacaagcaggucagcgggguggaccugggccugcccuccugggggaaguacgugcugaugagcgccggcguccucacggcccugaugcugaugaucuuccucaugaccugcugccggcgcgccaaccgggcggaguccgcccagcacagccugggcgagcgcgggcgcaagguguccgugaccagccagagcggccgggucaucuccagcugggaguccuacaagagcgggggcgagaccaagcuguga

SEQ ID NO: 94597 - RNA, 1575 nt, Artificial Sequence
  derived and/or modified CDS sequence (opt1) from glycoprotein__RABV__AB563797.1
augaucccccaggcccugcuguucgugccgcugcuggucuucagccucugcuucggcaaguuccccaucuacaccauccccgacaagcuggggcccugguccccgaucgacauccaccaccugagcugccccaacaaccucgugguggaggacgagggcugcaccaaccuguccggguucagcuacauggagcugaaggucggcuacaucuccgccaucaaggugaacggguucacgugcaccggcguggucaccgaggcggagaccuacacgaacuucgugggcuacgugaccaccaccuucaagcgcaagcacuuccggcccacgcccgacgccugccgcgccgccuacaacuggaagauggccggggacccgcgguacgaggagagccuccacaaccccuaccccgacuaccacuggcugcgcaccgucaagaccaccaaggagucccuggugaucaucagccccuccguggcggaccucgacccguacgacaagagccugcacucccgggucuuccccagcggcaagugcuccgggaucacggugagcuccaccuacugcagcaccaaccacgacuacaccaucuggaugcccgagaacccccgccugggcacguccugcgacaucuucaccaacagccgggggaagcgcgccuccaagggcagcaagaccugcggcuucguggacgagcgggggcucuacaagagccugaagggcgccugcaagcugaagcucugcgggguccugggccugcgccucauggacggcaccugggccgcgauccagacguccgacgagaccaaguggugcccgcccgaccagcuggugaaccugcacgacuuccggagcgacgagaucgagcaccucguggucgaggagcuggugaagaagcgcgaggagugccuggacgcccucgaguccaucaugaccaccaagagcguguccuuccggcgccugagccaccuccggaagcucguccccggguucggcaaggccuacacgaucuucaacaagacccugauggaggccgacgcccacuacaaguccauccgcaccuggaacgagaucauccccagcaaggggugccugcgggugggcgggcgcugccacccgcacgugaacggcgucuucuucaacggcaucauccucgggcccgacggccacgugcugauccccgagaugcaguccagccugcuccagcagcacauggagcugcuggaguccagcgucaucccccucaugcacccgcuggcggaccccuccaccguguucaaggacgacgacgagacggaggacuucguggagguccaccuccccgacgugcacaagcaggucagcgggguggaccugggccugcccuccugggggaaguacgugcugaugagcgccggcgugcucaccgcccugaugcugaugaucuuccucaugaccugcugccggcgcgccaaccgggucgaguccgcccagcacagccugggcgagcgcgggcgcaagguguccgugaccagccagagcggccgggucaucuccagcugggaguccuacaagagcgggggcgagacgaagcuguga

SEQ ID NO: 94598 - RNA, 1575 nt, Artificial Sequence
  derived and/or modified CDS sequence (opt1) from glycoprotein__RABV__AB563798.1
augaucccccaggcccugcuguucgugccgcugcuggucuucagccucugcuucggcaaguuccccaucuacaccauccccgacaagcuggggcccugguccccgaucgacauccaccaccugagcugccccaacaaccucgugguggaggacgagggcugcaccaaccuguccggguucagcuacauggagcugaaggucggcuacaucuccgccaucaaggugaacggguucacgugcaccggcguggucaccgaggcggagaccuacacgaacuucgugggcuacgugaccaccaccuucaagcgcaagcacuuccggcccacgcccgacgccugccgcgccgccuacaacuggaagauggccggggacccgcgguacgaggagagccuccacaaccccuaccccgacuaccacuggcugcgcaccgucaagaccaccaaggagucccuggugaucaucagccccuccguggcggaccucgacccguacgacaagagccugcacucccgggucuuccccagcggcaagugcuccgggaucacggugagcuccaccuacugcagcaccaaccacgacuacaccaucuggaugcccgagaacccccgccugggcacguccugcgacaucuucaccaacagccgggggaagcgcgccuccaagggcagcaagaccugcggcuucguggacgagcgggggcucuacaagagccugaagggcgccugcaagcugaagcucugcgggguccugggccugcgccucauggacggcaccugggccgcgauccagacguccgacgagaccaaguggugcccgcccgaccagcuggugaaccugcacgacuuccggagcgacgagaucgagcaccucguggucgaggagcuggugaagaagcgcgaggagugccuggacgcccucgaguccaucaugaccaccaagagcguguccuuccggcgccugagccaccuccggaagcucguccccggguucggcaaggccuacacgaucuucaacaagacccugauggaggccgacgcccacuacaaguccgugcgcaccuggaacgagaucauccccagcaaggggugccugcgggugggcgggcgcugccacccgcacgucaacggcguguucuucaacggcaucauccucgggcccgacggccacguccugauccccgagaugcaguccagccugcuccagcagcacauggagcugcuggaguccagcgugaucccccucaugcacccgcuggcggaccccuccaccguguucaaggacgacgacgaggccgaggacuucgucgaggugcaccuccccgacgugcacaagcaggucagcgggguggaccugggccugcccuccugggggaaguacgugcugaugagcgccggcguccucacggcccugaugcugaugaucuuccucaugaccugcugccggcgcgccaaccgggcggaguccgcccagcacagccugggcgagggcgggcgcaagguguccgugaccagccagagcgggcgcgucaucuccagcugggaguccuacaagagcggcggggagaccaagcuguga

SEQ ID NO: 94599 - RNA, 1575 nt, Artificial Sequence
  derived and/or modified CDS sequence (opt1) from glycoprotein__RABV__AB563800.1
augaucccccaggcccugcuguucgugccgcugcuggucuucagccucugcuucggcaaguuccccaucuacaccauccccgacaagcuggggcccugguccccgaucgacauccaccaccugagcugccccaacaaccucgugguggaggacgagggcugcaccaaccuguccggguucagcuacauggagcugaaggucggcuacaucuccgccaucaaggugaacggguucacgugcaccggcguggucaccgaggcggagaccuacacgaacuucgugggcuacgugaccaccaccuucaagcgcaagcacuuccggcccacgcccgacgccugccgcgccgccuacaacuggaagauggccggggacccgcgguacgaggagagccuccacaaccccuaccccgacuaccacuggcugcgcaccgucaagaccaccaaggagucccuggugaucaucagccccuccguggcggaccucgacccguacgacaagagccugcacucccgggucuuccccagcggcaagugcuccgggaucacggugagcuccaccuacugcagcaccaaccacgacuacaccaucuggaugcccgagaacccccgccugggcacguccugcgacaucuucaccaacagccgggggaagcgcgccuccaagggcagcaagaccugcggcuucguggacgagcgggggcucuacaagagccugaagggcgccugcaagcugaagcucugcgggguccugggccugcgccucauggacggcaccugggccgcgauccagacguccgacgagaccaaguggugcccgcccgaccagcuggugaaccugcacgacuuccggagcgacgagaucgagcaccucguggucgaggagcuggugaagaagcgcgaggagugccuggacgcccucgaguccaucaugaccaccaagagcguguccuuccggcgccugagccaccuccggaagcucguccccggguucggcaaggccuacacgaucuucaacaagacccugauggaggccgacgcccacuacaaguccgugcgcaccuggaacgagaucauccccagcaaggggugccugcgggugggcgggcgcugccacccgcacgucaacggcguguucuucaacggcaucauccucgggcccgacggccacguccugauccccgagaugcaguccagccugcuccagcagcacauggagcugcuggaguccagcgugaucccccucaugcacccgcuggcggaccccuccaccguguucaaggacgacgacgaggccgaggacuucgucgaggugcaccuccccgacgugcacaagcaggucagcgggguggaccugggccugcccuccugggggaaguacgugcugaugagcgccggcguccucacggcccugaugcugaugaucuuccucaugaccugcugccggcgcgccaaccgggcggaguccgcccagcacagccugggcgagcgcgggcgcaagguguccgugaccagccagagcggccgggucaucuccagcugggaguccuacaagaacgggggcgagaccaagcuguga

SEQ ID NO: 94600 - RNA, 1575 nt, Artificial Sequence
  derived and/or modified CDS sequence (opt1) from glycoprotein__RABV__AB563803.1
augaucccccaggcccugcuguucgugccgcugcuggucuucagccucugcuucggcaaguuccccaucuacaccauccccgacaagcuggggcccugguccccgaucgacauccaccaccugagcugccccaacaaccucgugguggaggacgagggcugcaccaaccuguccggguucagcuacauggagcugaaggucggcuacaucuccgccaucaaggugaacggguucacgugcaccggcguggucaccgaggcggagaccuacacgaacuucgugggcuacgugaccaccaccuucaagcgcaagcacuuccggcccacgcccgacgccugccgcgccgccuacaacuggaagauggccggggacccgcgguacgaggagagccuccacaaccccuaccccgacuaccacuggcugcgcaccgucaagaccaccaaggagucccuggugaucaucagccccuccguggcggaccucgacccguacgacaagagccugcacucccgggucuuccccagcggcaagugcuccgggaucacggugagcuccaccuacugcagcaccaaccacgacuacaccaucuggaugcccgagaacccccgccugggcacguccugcgacaucuucaccaacagccgggggaagcgcgccuccaagggcagcaagaccugcggcuucguggacgagcgggggcucuacaagagccugaagggcgccugcaagcugaagcucugcgggguccugggccugcgccucauggacggcaccugggccgcgauccagacguccgacgagaccaaguggugcccgcccgaccagcuggugaaccugcacgacuuccggagcgacgagaucgagcaccucguggucgaggagcuggugaagaagcgcgaggagugccuggacgcccucgaguccaucaugaccaccaagagcguguccuuccggcgccugagccaccuccggaagcucguccccggguucggcaaggccuacacgaucuucaacaagacccugauggaggccgacgcccacuacaaguccgugcgcaccuggaacgagaucauccccagcaaggggugccugcgggugggcgggcgcugccacccgcacgucaacggcguguucuucaacggcaucauccucgggcccgacggccacguccugauccccgagaugcaguccagccugcuccagcagcacauggagcugcuggaguccagcgugaucccccucaugcacccgcuggcggaccccuccaccguguucaaggacgacgacgaggccgaggacuucgucgaggugcaccuccccgacgugcacaagcaggucagcgggguggaccugggccugcccuccugggggaaguacgugcugaugagcgccggcguccucacggcccugaugcugaugaucuuccucaugaccugcugccggcgcgccaaccgggcggaguccggccagcacagccugggggagcgcggccgcaagguguccgugaccagccagagcgggcgggucaucuccagcugggaguccuacaagagcggcggggagaccaagcuguga

SEQ ID NO: 94601 - RNA, 1575 nt, Artificial Sequence; identical to SEQ ID NO: 94596
  derived and/or modified CDS sequence (opt1) from glycoprotein__RABV__AB563806.1

SEQ ID NO: 94602 - RNA, 1575 nt, Artificial Sequence
  derived and/or modified CDS sequence (opt1) from glycoprotein__RABV__AB563807.1
augaucccccaggcccugauguucgccccgcuccugguguucagccugugcuucggcaaguuccccaucuacaccauccccgacaagcucgggcccugguccccgaucgacauccaccaccugagcugccccaacaaccuggucguggaggacgagggcugcaccaaccucuccggguucagcuacauggagcugaaggugggcuacaucuccgcgaucaaggucaacggguucacgugcaccggcguggugaccgaggccgagaccuacacgaacuucgucggcuacgugaccaccaccuucaagcgcaagcacuuccggcccacgcccgacgccugccgcgccgccuacaacuggaagauggcgggggacccgcgguacgaggagagccugcacaaccccuaccccgacuaccacuggcuccgcaccgugaagaccaccaaggagucccuggucaucaucagccccuccguggccgaccuggacccguacgacaagagccuccacucccggguguuccccagcggcaagugcuccgggaucacggucagcuccaccuacugcagcaccaaccacgacuacaccaucuggaugcccgagaacccccgccugggcacguccugcgacaucuucaccaacagccgggggaagcgcgccuccaagggcagcaagaccugcggcuucguggacgagcgggggcuguacaagagccucaagggcgccugcaagcugaagcugugcggggugcucggccugcgccugauggacggcaccugggcggccauccagacguccgacgagaccaaguggugcccgcccgaccagcucgucaaccugcacgacuuccggagcgacgagaucgagcaccuggugguggaggagcucgucaagaagcgcgaggagugccuggacgcccuggaguccaucaugaccaccaagagcguguccuuccggcgccucagccaccuccggaagcuggugcccggguucggcaaggccuacacgaucuucaacaagacccugauggaggccgacgcgcacuacaaguccguccgcaccuggaacgagaucauccccagcaaggggugccugcgggugggcgggcgcugccacccgcacgugaacggcgucuucuucaacggcaucauccuggggcccgacggccacgugcucauccccgagaugcaguccagccugcugcagcagcacauggagcuccuggaguccagcgucaucccccugaugcacccgcucgccgaccccuccaccguguucaaggacgacggggaggccgaggacuucguggagguccaccuccccgacgugcacaagcaggucagcggcguggaccuggggcugcccuccuggggcaaguacgugcugaugagcgccggcgugcugacggcccucaugcugaugaucuuccugaugaccugcugccggcgcgcgaaccgggccgaguccgcccagcacagccucggggagcgcggccgcaaggucuccgugaccagccagagcgggcgggugaucuccagcugggaguccuacaagagcggcggggagacccgccuguga

SEQ ID NO: 94603 - RNA, 1575 nt, Artificial Sequence
  derived and/or modified CDS sequence (opt1) from glycoprotein__RABV__AB563809.1
augaucccccaggcccuccuguucgugccgcugcuggucuucagccucugcuucggcaaguuccccaucuacaccauccccgacaagcuggggcccugguccccgaucgacauccaccaccugagcugccccaacaaccucgugguggaggacgagggcugcaccaaccuguccggguucagcuaccuggagcucaaggucggcuacaucuccgccaucaaggugaacggguucacgugcaccggcguggucaccgaggcggagaccuacacgaacuucgugggcuacgugaccaccaccuucaagcgcaagcacuuccggcccacgcccgacgccugccgcgccgccuacaacuggaagauggccggggacccgcgguacgaggagagccugcacaaccccuaccccgacuaccacuggcugcgcaccgucaagaccaccaaggagucccucgugaucaucagccccuccguggcggaccuggacccguacgacaagagccugcacucccgggucuuccccagcggcaagugcuccgggaucacggugagcuccaccuacugcagcaccaaccacgacuacaccaucuggaugcccgagaacccccgccucggcacguccugcgacaucuucaccaacagccgggggaagcgcgccuccaagggcagcaagaccugcggcuucguggacgagcgggggcuguacaagagccugaagggcgccugcaagcucaagcugugcgggguccugggccuccgccugauggacggcaccugggccgcgauccagacguccgacgagaccaaguggugcccgcccgaccagcuggugaaccuccacgacuuccggagcgacgagaucgagcaccugguggucgaggagcuggugaagaagcgcgaggagugccucgacgcccuggaguccaucaugaccaccaagagcguguccuuccggcgccugagccaccuccggaagcugguccccggguucggcaaggccuacacgaucuucaacaagacccugauggaggccgacgcccacuacaaguccgugcgcaccuggaacgagaucauccccagcaaggggugccuccgggugggcgggcgcugccacccgcacgucaacggcguguucuucaacggcaucauccuggggcccgacggccacguccugauccccgagaugcaguccagccuccugcagcagcacauggagcugcucgaguccagcgugaucccccugaugcacccgcuggcggaccccuccaccguguucaaggacgacgacgaggccgaggacuucgucgaggugcaccuccccgacgugcacaagcaggucagcgggguggaccugggccugcccuccugggggaaguacgugcucaugagcgccggcguccugacggcccugaugcucaugaucuuccugaugaccugcugccggcgcgccaaccgggcggaguccgcccagcacagccugggcgagggcgggcgcaagguguccgugaccagccagagcgggcgcgucaucuccagcugggaguccuacaagagcggcggggagaccaagcuguga

SEQ ID NO: 94604 - RNA, 1575 nt, Artificial Sequence
  derived and/or modified CDS sequence (opt1) from glycoprotein__RABV__AB563812.1
augaucccccaggcccugcuguucgugccgcugcuggucuucagccucugcuucggcaaguuccccaucuacaccauccccgacaagcuggggcccugguccccgaucgacauccaccaccugagcugccccaacaaccucgugguggaggacgagggcugcaccaaccuguccggguucagcuacauggagcugaaggucggcuacaucuccgccaucaaggugaacggguucacgugcaccggcguggucaccgaggcggagaccuacacgaacuucgugggcuacgugaccaccaccuucaagcgcaagcacguccggcccacgcccgacgccugccgcgccgccuacaacuggaagauggccggggacccgcgguacgaggagagccuccacaaccccuaccccgacuaccacugggugcgcaccgugaagaccaccaaggagucccuggucaucaucagccccuccguggcggaccuggacccguacgacaagagccuccacucccggguguuccccagcggcaagugcuccgggaucacggucagcuccaccuacugcagcaccaaccacgacuacaccaucuggaugcccgagaacccccgccugggcacguccugcgacaucuucaccaacagccgggggaagcgcgccuccaagggcagcaagaccugcggcuucguggacgagcgggggcuguacaagagccucaagggcgccugcaagcugaagcugugcggggugcucggccugcgccugauggacggcaccugggccgcgauccagacguccgacgagaccaaguggugcccgcccgaccagcucgucaaccugcacgacuuccggagcgacgagaucgagcaccuggugguggaggagcucgucaagaagcgcgaggagugccuggacgcccuggaguccaucaugaccaccaagagcguguccuuccggcgccucagccaccuccggaagcuggugcccggguucggcaaggccuacacgaucuucaacaagacccucauggaggccgacgcccacuacaaguccguccgcaccuggaacgagaucauccccagcaaggggugccugcgggugggcgggcgcugccacccgcacgucaacggcguguucuucaacggcaucauccuggggcccgacggccacgugcucauccccgagaugcaguccagccugcugcagcagcacauggagcuccuggaguccagcgucaucccccugaugcacccgcucgcggaccccuccaccguguucaaggacgacgacgaggccgaggacuucguggagguccaccuccccgacgugcacaagcaggucagcgggguggaccugggccugcccuccugggggaaguacgugcugaugagcgccggcgugcugacggcccucaugcugaugaucuuccugaugaccugcugccggcgcaccaaccgggccgaguccgcgcagcacagccuccgcgagcgcggccggaaggucuccgugaccagccagagcgggcgcgugaucuccagcugggaguccuacaagagcggcggggagacgaagcuguga

SEQ ID NO: 94605 - RNA, 1575 nt, Artificial Sequence
  derived and/or modified CDS sequence (opt1) from glycoprotein__RABV__AB563813.1
augaucccccaggcccugcuguucgugccgcugcuggucuucagccucugcuucggcaaguuccccaucuacaccauccccgacaagcuggggcccugguccccgaucgacauccaccaccugagcugccccaacaaccucgugguggaggacgagggcugcaccaaccuguccggguucagcuacauggagcugaaggucggcuacaucuccgccaucaaggugaacggguucacgugcaccggcguggucaccgaggcggagaccuacacgaacuucgugggcuacgugaccaccaccuucaagcgcaagcacuuccggcccacgcccgacgccugccgcgccgccuacaacuggaagauggccggggacccgcgguacgaggagagccuccacaaccccuaccccgacuaccacuggcugcgcaccgucaagaccaccaaggagucccuggugaucaucagccccuccguggcggaccucgacccguacgacaagagccugcacucccgggucuuccccagcggcaagugcuccgggaucacggugagcuccaccuacugcagcaccaaccacgacuacaccaucuggaugcccgagaacccccgccugggcgccuccugcgacaucuucacgaacagccgggggaagcgcgccuccaagggcagcaagaccugcggcuucguggacgagcgggggcucuacaagagccugaagggcgccugcaagcugaagcucugcgggguccugggccugcgccucauggacggcaccugggcggccauccagaccuccgacgagacgaaguggugcccgcccgaccagcuggugaaccugcacgacuuccggagcgacgagaucgagcaccucguggucgaggagcuggugaagaagcgcgaggagugccuggacgcccucgaguccaucaugaccaccaagagcguguccuuccggcgccugagccaccuccggaagcucguccccggguucggcaaggccuacaccaucuucaacaagacgcugauggaggccgacgcgcacuacaaguccgugcgcaccuggaacgagaucauccccagcaaggggugccugcgggugggcgggcgcugccacccgcacgucaacggcguguucuucaacggcaucauccucgggcccgacggccacguccugauccccgagaugcaguccagccugcuccagcagcacauggagcugcuggaguccagcgugaucccccucaugcacccgcuggccgaccccuccaccguguucaaggacgacgacgaggccgaggacuucgucgaggugcaccuccccgacgugcacaagcaggucagcgggguggaccugggccugcccuccugggggaaguacgugcugaugagcgccggcguccucaccgcccugaugcugaugaucuuccucaugacgugcugccggcgcgcgaaccggguggaguccgagcagcacagccugggccagcgcgggcgcaagguguccgucaccagccagagcggccgggugaucuccagcugggaguccuacaagagcgggggcgagaccaagcuguga

SEQ ID NO: 94606 - RNA, 1575 nt, Artificial Sequence; identical to SEQ ID NO: 94595
  derived and/or modified CDS sequence (opt1) from glycoprotein__RABV__AB563816.1

SEQ ID NO: 94607 - RNA, 1575 nt, Artificial Sequence
  derived and/or modified CDS sequence (opt1) from glycoprotein__RABV__AB563817.1
augaucccccaggcccugcuguucgugccgcugcuggucuucagccucugcuucggcaaguuccccaucuacaccauccccgacaagcuggggcccugguccccgaucgacauccaccaccugagcugccccaacaaccucgugguggaggacgagggcugcaccaaccuguccggguucagcuacauggagcugaaggucggcuacaucuccgccaucaaggugaacggguucacgugcaccggcguggucaccgaggcggagaccuacacgaacuucgugggcuacgugaccaccaccuucaagcgcaagcacuuccggcccacgcccgacgccugccgcgccgccuacaacuggaagauggccggggacccgcgguacgaggagagccuccacaaccccuaccccgacuaccacuggcugcgcaccgucaagaccaccaaggagucccuggugaucaucagccccuccguggcggaccucgacccguacgacaagagccugcacucccgggucuuccccagcggcaagugcuccgggaucacggugagcuccaccuacugcagcaccaaccacgacuacaccaucuggaugcccgagaacccccgccugggcacguccugcgacaucuucaccaacagccgggggaagcgcgccuccaagggcagcaagaccugcggcuucguggacgagcgggggcucuacaagagccugaagggcgccugcaagcugaagcucugcgggguccugggccugcgccucauggacggcaccugggccgcgauccagacguccgacgagaccaaguggugcccgcccgaccagcuggugaaccugcacgacuuccggagcgacgagaucgagcaccucguggucgaggagcuggugaagaagcgcgaggagugccuggacgcccucgaguccaucaugaccaccaagagcguguccuuccggcgccugagccaccuccggaagcucguccccggguucggcaaggccuacacgaucuucaacaagacccugauggaggccgacgcccacuacaaguccgugcgcaccuggaacgagaucauccccagcaaggggugccugcgggugggcgggcgcugccacccgcacgucaacggcguguucuucaacggcaucauccucgggcccgacggccacguccugauccccgagaugcaguccagccugcuccagcagcacauggagcugcuggaguccagcgugaucccccucaugcacccgcuggcggaccccuccaccguguucaaggacgacgacgaggccgaggacuucgucgaggugcaccuccccgacgugcacaagcaggucagcgggguggaccugggccugcccuccugggggaaguacgugcugaugagcgccggcgcccucacggcccugaugcugaugaucuuccucaugaccugcugccggcgcgcgaaccgggccgaguccgcccagcacagccugggcgagcgcgggcgcaaggucuccgugaccagccagagcggccgggugaucuccagcugggaguccuacaagagcgggggcgagaccaagcuguga

SEQ ID NO: 94608 - RNA, 1575 nt, Artificial Sequence; identical to SEQ ID NO: 94595
  derived and/or modified CDS sequence (opt1) from glycoprotein__RABV__AB563819.1

SEQ ID NO: 94609 - RNA, 1575 nt, Artificial Sequence
  derived and/or modified CDS sequence (opt1) from glycoprotein__RABV__AB563820.1
augaucccccaggcccugcuguucgugccgcugcuggucuucagccucugcuucggcaaguuccccaucuacaccauccccgacaagcuggggcccugguccccgaucgacauccaccaccugagcugccccaacaaccucgugguggaggacgagggcugcaccaaccuguccggguucagcuacauggagcugaaggucggcuacaucuccgccaucaaggugaacggguucacgugcaccggcguggucaccgaggcggagaccuacacgaacuucgugggcuacgugaccaccaccuucaagcgcaagcacuuccggcccaugcccgacgccugccgcgccgccuacaacuggaagauggccggggacccgcgguacgaggagagccuccacaaccccuaccccgacuaccacuggcugcgcacggucaagaccaccaaggagucccuggugaucaucagccccuccguggcggaccucgacccguacgacaagagccugcacucccgggucuuccccagcggcaagugcuccgggaucaccgugagcuccacguacugcagcaccaaccacgacuacaccaucuggaugcccgagaacccccgccugggcaccuccugcgacaucuucaucaacagccgggggaagcgcgccuccaagggcagcaagacgugcggcuucguggacgagcgggggcucuacaagagccugaagggcgccugcaagcugaagcucugcgggguccugggccugcgccucauggacggcaccugggccgcgauccagaccuccgacgagaccaaguggugcccgcccgaccagcuggugaaccugcacgacuuccggagcgacgagaucgagcaccucguggucgaggagcuggugaagaagcgcgaggagugccuggacgcccucgaguccaucaugacgaccaagagcguguccuuccggcgccugagccaccuccggaagcucguccccggguucggcaaggccuacaccaucuucaacaagacccugauggaggccgacgcccacuacaaguccgugcgcacguggaacgagaucauccccagcaaggggugccugcgggugggcgggcgcugccacccgcacgucaacggcguguucuucaacggcaucauccucgggcccgacggccacguccugauccccgagaugcaguccagccugcuccagcagcacauggagcugcuggaguccagcgugaucccccucaugcacccgcuggcggaccccuccaccguguucaaggacgacgacgaggccgaggacuucgucgaggugcaccuccccgacgugcacaagcaggucagcgggguggaccugggccugcccuccugggggaaguacgugcugaugagcgccggcguccucaccgcccugaugcugaugaucuuccucaugaccugcugccggcgcuccaaccgggccaagagcgagcagcacucccugggcgagcgcgggcgcaaggugagcgugacgagccaguccggccgggucaucagcuccugggagagcuacaagcgcgggggcgagaccaagcuguga

SEQ ID NO: 94610 - RNA, 1575 nt, Artificial Sequence
  derived and/or modified CDS sequence (opt1) from glycoprotein__RABV__AB563821.1
augaucccccaggcccuccuguucgugccgcugcuggucuucagccucugcuucggcaaguuccccaucuacaccauccccgacaagcuggggcccugguccccgaucgacauccaccaccugagcugccccaacaaccucgugguggaggacgagggcugcaccaaccuguccgggcugagcuacauggagcucaaggucggcuacaucuccgccaucaaggugaacggguucacgugcaccggcguggucaccgaggcggagaccuacacgaacuucgugggcuacgugaccaccaccuucaagcgcaagcacuuccggcccacgcccgacgccugccgcgccgccuacaacuggaagauggccggggacccgcgguacgaggagagccugcacaaccccuaccccgacuaccacuggcugcgcaccgucaagaccaccaaggagucccucgugaucaucagccccuccguggcggaccuggacccguacgacaagagccugcacucccgggucuuccccagcggcaagugcuccgggaucacggugagcuccaccuacugcuucaccaaccacgacuacaccaucuggaugcccgagaacccccgccucggcacgagcugcgacaucuucaccaacucccgggggaagcgcgccagcaagggcuccaagaccugcggcuucguggacgagcgggggcuguacaagagccugaagggcgccugcaagcucaagcugugcgggguccugggccuccgccugauggacggcaccugggccgcgauccagacgagcgacgagaccaaguggugcccgcccgaccagcuggugaaccuccacgacuuccgguccgacgagaucgagcaccugguggucgaggagcuggugaagaagcgcgaggagugccucgacgcccuggagagcaucaugaccaccaaguccgugagcuuccggcgccugucccaccuccggaagcugguccccggguucggcaaggccuacacgaucuucaacaagacccugauggaggccgacgcccacuacaagagcgugcgcaccugggacgagaucauccccuccaaggggugccuccgggugggcgggcgcugccacccgcacgucaacggcguguucuucaacggcaucauccuggggcccgacggccacguccugauccccgagaugcagagcucccuccugcagcagcacauggagcugcucgagagcuccgugaucccccugaugcacccgcuggcggaccccagcaccguguucaaggacgacgacgaggccgaggacuucgucgaggugcaccuccccgacgugcacaagcaggucuccgggguggaccugggccugcccagcugggggaaguacgugcucauguccgccggcguccugacggcccugaugcucaugaucuuccugaugaccugcugccggcgcgccaaccgggcggagagcgcccagcacucccugggcgagcgcgggcgcaaggugagcgugaccucccagagcggccgggucaucagcuccugggagagcuacaaguccgggggcgagaccaagcuguga

SEQ ID NO: 94611 - RNA, 1575 nt, Artificial Sequence; identical to SEQ ID NO: 94595
  derived and/or modified CDS sequence (opt1) from glycoprotein__RABV__AB563822.1

SEQ ID NO: 94612 - RNA, 1575 nt, Artificial Sequence
  derived and/or modified CDS sequence (opt1) from glycoprotein__RABV__AB563823.1
augaucccccaggcccugcuccuggugccgcugcucgucuucagccugugcuucggcaaguuccccaucuacaccauccccgacaagcuggggcccugguccccgaucgacauccaccaccucagcugccccaacaaccuggugguggaggacgagggcugcaccaaccuguccggguucagcuacauggagcucaaggucggcuacaucuccgccaucaaggugaacggguucacgugcaccggcguggucaccgaggcggagaccuacacgaacuucgugggcuacgugaccaccaccuucaagcgcaagcacuuccggcccacgcccgacgccugccgcgccgccuacaacuggaagauggccggggacccgcgguacgaggagagccugcacaaccccuaccccgacuaccacuggcugcgcaccgucaagaccaccaaggagucccucgugaucaucagccccuccguggcggaccuggacccguacgacaagagccugcacucccgggucuuccccagcggcaagugcuccgggaucacggugagcuccaccuacugcagcaccaaccacgacuacaccaucuggaugcccgagaacccccgccucggcacguccugcgacaucuucaccaacagccgggggaagcgcgccuccaagggcagcaagaccugcggcuucguggacgagcgggggcuguacaagagccugaagggcgccugcaagcucaagcugugcgggguccugggccuccgccugauggacggcaccugggccgcgauccagacguccgacgagaccaaguggugcccgcccgaccagcuggugaaccuccacgacuuccggagcgacgagaucgagcaccugguggucgaggagcuggugaagaagcgcgaggagugccucgacgcccuggaguccaucaugaccaccaagagcguguccuuccggcgccugagccaccuccggaagcugguccccggguucggcaaggccuacacgaucuucaacaagacccugauggaggccgacgcccacuacaaguccgugcgcaccuggaacgagaucauccccagcaaggggugccuccgggugggcgggcgcugccacccgcacgucaacggcguguucuucaacggcaucauccuggggcccgacggccacguccugauccccgagaugcaguccagccuccugcagcagcacauggagcugcucgaguccagcgugaucccccugaugcacccgcuggcggaccccuccaccguguucaaggacgacgacgaggccgaggacuucgucgaggugcaccuccccgacgugcacaagcaggucagcgggguggaccugggccugcccuccugggggaaguacgugcucaugagcgccggcguccugacggcccugaugcucaugaucuuccugaugaccugcugccggcgcgccaaccggguggaguccgcgcagcacagccugggcgagcgcgggcgcaagguguccgucaccagccagagcggccgggugaucuccagcugggaguccuacaagagcgggggcgagaccaagcuguga

SEQ ID NO: 94613 - RNA, 1575 nt, Artificial Sequence; identical to SEQ ID NO: 94595
  derived and/or modified CDS sequence (opt1) from glycoprotein__RABV__AB563824.1

SEQ ID NO: 94614 - RNA, 1575 nt, Artificial Sequence
  derived and/or modified CDS sequence (opt1) from glycoprotein__RABV__AB563826.1
augaucccccaggcccugcuguucgugccgcugcuggucuucagccucugcuucggcaaguuccccaucuacaccauccccgacaagcuggggcccugguccccgaucgacauccaccaccugagcugccccaacaaccucgugguggaggacgagggcugcaccaaccuguccggguucagcuacauggagcugaaggucggcuacaucuccgccaucaaggugaacggguucacgugcaccggcguggucaccgaggcggagaccuacacgaacuucgugggcuacgugaccaccaccuucaagcgcaagcacuuccggcccacgcccgacgccugccgcgccgccuacaacuggaagauggccggggacccgcgguacgaggagagccuccacaaccccuaccccgacuaccacuggcugcgcaccgucaagaccaccaaggagucccuggugaucaucagccccuccguggcggaccucgacccguacgacaagagccugcacucccgggucuuccccagcggcaagugcuccgggaucacggugagcuccaccuacugcagcaccaaccacgacuacaccaucuggaugcccgagaacccccgccugggcacguccugcgacaucuucaccaacagccgggggaagcgcgccuccaagggcagcaagaccugcggcuucguggacgagcgggggcucuacaagagccugaagggcgccugcaagcugaagcucugcgggguccugggccugcgccucauggacggcaccugggccgcgauccagacguccgacgagaccaaguggugcccgcccgaccagcuggugaaccugcacgacuuccggagcgacgagaucgagcaccucguggucgaggagcuggugaagaagcgcgaggagugccuggacgcccucgaguccaucaugaccaccaagagcguguccuuccggcgccugagccaccuccggaagcucguccccggguucggcaaggccuacacgaucuucaacaagacccugauggaggccgacgcccacuacaaguccgugcgcaccuggaacgagaucauccccagcaaggggugccugcgggugggcgggcgcugccacccgcacgucaacggcguguucuucaacggcaucauccucgggcccgacggccacguccugauccccgagaugcaguccagccugcuccagcagcacauggagcugcuggaguccagcgugaucccccucaugcacccgcuggcggaccccuccagcguguucaaggacgacgacgaggccgaggacuucgucgaggugcaccuccccgacgugcacaagcaggucuccgggguggaccugggccugcccagcugggggaaguacgugcugauguccgccggcguccucaccgcccugaugcugaugaucuuccucaugacgugcugccggcgcgccaaccggguggagagcgcgcagcacucccugggcgagcgcgggcgcaaggugagcgucaccagccaguccggccgggugaucagcuccugggagagcuacaaguccgggggcgagaccaagcuguga

SEQ ID NO: 94615 - RNA, 1575 nt, Artificial Sequence
  derived and/or modified CDS sequence (opt1) from glycoprotein__RABV__AB563827.1
augaucccccaggcccugcuguucgugccgcugcuggucuucagccucugcuucggcaaguuccccaucuacaccauccccgacaagcuggggcccugguccccgaucgacauccaccaccugagcugccccaacaaccucgugguggaggacgagggcugcaccaaccuguccggguucagcuacauggagcugaaggucggcuacaucuccgccaucaaggugaacggguucacgugcaccggcguggucaccgaggcggagaccuacacgaacuucgugggcuacgugaccaccaccuucaagcgcaagcacuuccggcccacgcccgacgccugccgcgccgccuacaacuggaagauggccggggacccgcgguacgaggagagccuccacaaccccuaccccgacuaccacuggcugcgcaccgucaagaccaccaaggagucccuggugaucaucagccccuccguggcggaccucgacccguacgacaagagccugcacucccgggucuuccccagcggcaagugcuccgggaucacggugagcuccaccuacugcagcaccaaccacgacuacaccaucuggaugcccgagaacccccgccugggcacguccugcgacaucuucaccaacagccgggggaagcgcgccuccaagggcagcaagaccugcggcuucguggacgagcgggggcucuacaagagccugaagggcgccugcaagcugaagcucugcgggguccugggccugcgccucauggacggcaccuggguggccauccagacguccgacgagaccaaguggugcccgcccgaccagcuggugaaccugcacgacuuccggagcgacgagaucgagcaccucgucguggaggagcuggugaagaagcgcgaggagugccuggacgcgcucgaguccaucaugaccaccaagagcgucuccuuccggcgccugagccaccuccggaagcucgugcccggguucggcaaggccuacacgaucuucaacaagacccugauggaggccgacgcccacuacaaguccgugcgcaccuggaacgagaucauccccagcaaggggugccugcgggucggcgggcgcugccacccgcacgugaacggcgucuucuucaacggcaucauccucgggcccgacggccacgugcugauccccgagaugcaguccagccugcuccagcagcacauggagcugcuggaguccagcgugaucccccucaugcacccgcuggccgaccccuccaccgucuucaaggacgacgacgaggcggaggacuucguggaggugcaccuccccgacguccacaagcaggucagcgggguggaccugggccugcccuccugggggaaguacgugcugaugagcgccggcgugcucacggcccugaugcugaugaucuuccucaugaccugcugccggcgcgccaaccggguggaguccgcccagcacagccugggcgagcgcgggcgcaaggucuccgugaccagccagagcggccgggugaucuccagcugggaguccuacaagagcgggggcgagaccaagcuguga

SEQ ID NO: 94616 - RNA, 1575 nt, Artificial Sequence
  derived and/or modified CDS sequence (opt1) from glycoprotein__RABV__AB563830.1
augaucccccaggcccugcuccuggugccgcugcucgucuucagccugugcuucggcaaguuccccaucuacaccauccccgacaagcuggggcccugguccccgaucgacauccaccaccucagcugccccaacaaccuggugguggaggacgagggcugcaccaaccuguccggguucagcuacauggagcucaaggucggcuacaucuccgccaucaaggugaacggguucacgugcaccggcguggucaccgaggcggagaccuacacgaacuucgugggcuacgugaccaccaccuucaagcgcaagcacuuccggcccacgcccgacgccugccgcgccgccuacaacuggaagauggccggggacccgcgguacgaggagagccugcacaaccccuaccccgacuaccacuggcugcgcaccgucaagaccaccaaggagucccucgugaucaucagccccuccguggcggaccuggacccguacgacaagagccugcacucccgggucuuccccagcggcaagugcuccgggaucacggugagcuccaccuacugcagcaccaaccacgacuacaccaucuggaugcccgagaacccccgccucggcacguccugcgacaucuucaccaacagccgggggaagcgcgccuccaagggcagcaagaccugcggcuucguggacgagcgggggcuguacaagagccugaagggcgccugcaagcucaagcugugcgggguccugggccuccgccugauggacggcaccugggccgcgauccagacguccgacgagaccaaguggugcccgcccgaccagcuggugaaccuccacgacuuccggagcgacgagaucgagcaccugguggucgaggagcuggugaagaagcgcgaggagugccucgacgcccuggaguccaucaugaccaccaagagcguguccuuccggcgccugagccaccuccggaagcugguccccggguucggcaaggccuacacgaucuucaacaagacccugauggaggccgacgcccacuacaaguccgugcgcaccuggaacgagaucauccccagcaaggggugccuccgggugggcgggcgcugccacccgcacgucaacggcguguucuucaacggcaucauccuggggcccgacggccacguccugauccccgagaugcaguccagccuccugcagcagcacauggagcugcucgaguccagcgugaucccccugaugcacccgcuggcggaccccuccaccguguucaaggacgacgacgaggccgaggacuucgucgaggugcaccuccccgacgugcacaagcaggucagcgggguggaccugggccugcccuccugggggaaguacgugcucaugagcgccggcauccugacggcccugaugcucaugaucuuccugaugaccugcugccggcgcgccaaccgggucgaguccgcgcagcacagccugggcgagcgcgggcgcaagguguccgugaccagccagagcggccgggucaucuccagcugggaguccuacaagagcgggggcgagaccaagcuguga

SEQ ID NO: 94617 - RNA, 1575 nt, Artificial Sequence; identical to SEQ ID NO: 94612
  derived and/or modified CDS sequence (opt1) from glycoprotein__RABV__AB563836.1

SEQ ID NO: 94618 - RNA, 1575 nt, Artificial Sequence
  derived and/or modified CDS sequence (opt1) from glycoprotein__RABV__AB563837.1
augaucccccaggcccugcuguucgugccgcugcuggucuucagccucugcuucggcaaguuccccaucuacaccauccccgacaagcuggggcccugguccccgaucgacauccaccaccugagcugccccaacaaccucgugguggaggacgagggcugcaccaaccuguccggguucagcuacauggagcugaaggucggcuacaucuccgccaucaaggugaacggguucacgugcaccggcguggucaccgaggcggagaccuacacgaacuucgugggcuacgugaccaccaccuucaagcgcaagcacuuccggcccacgcccgacgccugccgcgccgccuacaacuggaagauggccggggacccgcgguacgaggagagccuccacaaccccuaccccgacuaccacuggcugcgcaccgucaagaccaccaaggagucccuggugaucaucagccccuccguggcggaccucgacccguacgacaagagccugcacucccgggucuuccccagcggcaagugcuccgggaucacgguguucagcaccuacugcuccaccaaccacgacuacaccaucuggaugcccgagaacccccgccugggcacgagcugcgacaucuucaccaacucccgggggaagcgcgccagcaagggcuccaagaccugcggcuucguggacgagcgggggcucuacaagagccugaagggcgccugcaagcugaagcucugcgggguccugggccugcgccucauggacggcaccugggccgcgauccagacgagcgacgagaccaaguggugcccgcccgaccagcuggugaaccugcacgacuuccgguccgacgagaucgagcaccucguggucgaggagcuggugaagaagcgcgaggagugccuggacgcccucgagagcaucaugaccaccaaguccgugagcuuccggcgccugucccaccuccggaagcucguccccggguucggcaaggccuacacgaucuucaacaagacccugauggaggccgacgcccacuacaagagcgugcgcaccuggaacgagaucauccccuccaaggggugccugcgggugggcgggcgcugccacccgcacgucaacggcguguucuucaacggcaucauccucgggcccgacggccacguccugauccccgagaugcagagcucccugcuccagcagcacauggagcugcuggagagcuccgugaucccccucaugcacccgcuggcggaccccagcaccguguucaaggacgacgacgaggccgaggacuucgucgaggugcaccuccccgacgugcacaagcaggucuccgggguggaccugggccugcccagcugggggaaguacgugcugauguccgccggcguccucacggcccugaugcugaugaucuuccucaugaccugcugccggcgcgccaaccggguggagagcgcgcagcacucccugggcgagcgcgggcgcaaggugagcgucaccucccagagcggccgggugaucagcuccugggagagcuacaaguccgggggcgagaccaagcuguga

SEQ ID NO: 94619 - RNA, 1575 nt, Artificial Sequence
  derived and/or modified CDS sequence (opt1) from glycoprotein__RABV__AB563838.1
augaucccccaggcccugcuguucgugccgcugcuggucuucagccucugcuucggcaaguuccccaucuacaccauccccgacaagcuggggcccugguccccgaucgacauccaccaccugagcugccccaacaaccucgugguggaggacgagggcugcaccaaccuguccggguucagcuacauggagcugaaggucggcuacaucuccgccaucaaggugaacggguucacgugcaccggcguggucaccgaggcggagaccuacacgaacuucgugggcuacgugaccaccaccuucaagcgcaagcacuuccggcccacgcccgacgccugccgcgccgccuacaacuggaagauggccggggacccgcgguacgaggagagccuccacaaccccuaccccgacuaccacuggcugcgcaccgucaagaccaccaaggagucccuggugaucaucagccccuccguggcggaccucgacccguacgacaagagccugcacucccgggucuuccccagcggcaagugcuccgggaucacggugagcuccaccuacugcagcaccaaccacgacuacaccaucuggaugcccgagaacccccgccugggcacguccugcgacaucuucaccaacagccgggggaagcgcgccuccaagggcagcaagaccugcggcuucguggacgagcgggggcucuacaagagccugaagggcgccugcaagcugaagcucugcgggguccugggccugcgccucauggacggcaccugggccgcgauccagacguccgacgagaccaaguggugcccgcccgaccagcuggugaaccugcacgacuuccggagcgacgagaucgagcaccucguggucgaggagcuggugaagaagcgcgaggagugccuggacgcccucgaguccaucaugaccaccaagagcguguccuuccggcgccugagccaccuccggaagcucguccccggguucggcaaggccuacacgaucuucaacaagacccugauggaggccgacgcccacuacaaguccgugcgcaccuggaacgagaucauccccagcaaggggugccugcgggugggcgggcgcugccacccgcacgucaacggcguguucuucaacggcaucauccucgggcccgacggccacguccugauccccgagaugcaguccagccugcuccagcagcacauggagcugcuggaguccagcgugaucccccucaugcacccgcuggcggaccccuccaccguguucaaggacgacgacgaggccgaggacuucgucgaggugcaccuccccgacgugcacaagcaggucagcgggguggaccugggccugcccuccugggggaaguacgugcugaugagcgccggcguccucacggcccugaugcugaugaucuuccucaugaccugcugccggcgcaccaaccgggccgaguccgcgcagcacagccugggcgagcgcgggcgcaagguguccgugaccagccagagcggccgggucaucuccagcugggaguccuacaagagcgggggcgagacgaagcuguga

SEQ ID NO: 94620 - RNA, 1575 nt, Artificial Sequence
  derived and/or modified CDS sequence (opt1) from glycoprotein__RABV__AB563839.1
augaucccccaggcccugcuguucgugccgcugcuggucuucagccucugcuucggcaaguuccccaucuacaccauccccgacaagcuggggcccugguccccgaucgacauccaccaccugagcugccccaacaaccucgugguggaggacgagggcugcaccaaccuguccggguucagcuacauggagcugaaggucggcuacaucuccgccaucaaggugaacggguucacgugcaccggcguggucaccgaggcggagaccuacacgaacuucgugggcuacgugaccaccaccuucaagcgcaagcacuuccggcccacgcccgacgccugccgcgccgccuacaacuggaagauggccggggacccgcgguacgaggagagccuccacaaccccuaccccgacuaccacuggcugcgcaccgucaagaccaccaaggagucccuggugaucaucagccccuccguggcggaccucgacccguacgacaagagccugcacucccgggucuuccccagcggcaagugcuccgggaucacggugagcuccaccuacugcagcaccaaccacgacuacaccaucuggaugcccgagaacccccgccugggcacguccugcgacaucuucaccaacagccgggggaagcgcgccuccaagggcagcaagaccugcggcuucguggacgagcgggggcucuacaagagccugaagggcgccugcaagcugaagcucugcgggguccugggccugcgccucauggacggcaccugggccgcgauccagacguccgacgagaccaaguggugcccgcccgaccagcuggugaaccugcacgacuuccggagcgacgagaucgagcaccucguggucgaggagcuggugaagaagcgcgaggagugccuggacgcccucgaguccaucaugaccaccaagagcguguccuuccggcgccugagccaccuccggaagcucguccccggguucggcaaggccuacacgaucuucaacaagacccugauggaggccgacgcccacuacaaguccgugcgcaccuggaacgagaucauccccagcaaggggugccugcgggugggcgggcgcugccacccgcacgucaacggcguguucuucaacggcaucauccucgggcccgacggccacguccugauccccgagaugcaguccagccugcuccagcagcacauggagcugcuggaguccagcgugaucccccucaugcacccgcuggcggaccccuccaccguguucaaggacgacgacgaggccgaggacuucgucgaggugcaccuccccgacgugcacaagcaggucagcgggguggaccugggccugcccuccugggggaaguacgugcugaugugcgccggcguccucacggcccugaugcugaugaucuuccucaugaccugcugccggcgcgccaaccgggcggagagcgcccagcacucccugggcgagcgcgggcgcaaggugagcgugaccucccagagcggccgggucaucagcuccugggagagcuacaaguccgggggcgagaccaagcuguga

SEQ ID NO: 94621 - RNA, 1575 nt, Artificial Sequence
  derived and/or modified CDS sequence (opt1) from glycoprotein__RABV__AB563841.1
augaucccccaggcccugcuguucgugccgcugcuggucuucagccucugcuucggcaaguuccccaucuacaccauccccgacaagcuggggcccugguccccgaucgacauccaccaccugagcugccccaacaaccucgugguggaggacgagggcugcaccaaccuguccggguucagcuacauggagcugaaggucggcuacaucuccgccaucaaggugaacggguucacgugcaccggcguggucaccgaggcggagaccuacacgaacuucgugggcuacgugaccaccaccuucaagcgcaagcacuuccggcccacgcccgacgccugccgcgccgccuacaacuggaagauggccggggacccgcgguacgaggagagccuccacaaccccuaccccgacuaccacuggcugcgcaccgucaagaccaccaaggagucccuggugaucaucagccccuccguggcggaccucgacccguacgacaagagccugcacucccgggucuuccccagcggccgcugcuccgggaucacggugagcuccaccuacugcagcaccaaccacgacuacaccaucuggaugcccgagaacccccggcugggcacguccugcgacaucuucaccaacagccgcgggaagcgggccuccaagggcagcaagaccugcggcuucguggacgagcgcgggcucuacaagagccugaagggcgccugcaagcugaagcucugcgggguccugggccugcggcucauggacggcaccugggccgcgauccagacguccgacgagaccaaguggugcccgcccgaccagcuggugaaccugcacgacuuccgcagcgacgagaucgagcaccucguggucgaggagcuggugaagaagcgggaggagugccuggacgcccucgaguccaucaugaccaccaagagcguguccuuccgccggcugagccaccuccgcaagcucguccccggguucggcaaggccuacacgaucuucaacaagacccugauggaggccgacgcccacuacaaguccgugcggaccuggaacgagaucauccccagcaaggggugccugcgcgugggcgggcggugccacccgcacgucaacggcguguucuucaacggcaucauccucgggcccgacggccacguccugauccccgagaugcaguccagccugcuccagcagcacauggagcugcuggaguccagcgugaucccccucaugcacccgcuggcggaccccuccaccguguucaaggacgacgacgaggccgaggacuucgucgaggugcaccuccccgacgugcacaagcaggucagcgggguggaccugggccugcccuccugggggaaguacgugcugaugagcgccggcguccucacggcccugaugcugaugaucuuccucacgaccugcugccgccgggccgaccgcgcggaguccgcccagcacagccugggcgagcgcgggcggaagguguccgugaccagccagagcggccgcgucaucuccagcugggaguccuacaagagcgggggcgagaccaagcuguga

SEQ ID NO: 94622 - RNA, 1575 nt, Artificial Sequence
  derived and/or modified CDS sequence (opt1) from glycoprotein__RABV__AB563842.1
augaucccccaggcccugcuguucgugccgcugcuggucuucagccucugcuucggcaaguuccccaucuacaccauccccgacaagcuggggcccugguccccgaucgacauccaccaccugagcugccccaacaaccucgugguggaggacgagggcugcaccaaccuguccggguucagcuacauggagcugaaggucggcuacaucuccgccaucaaggugaacggguucacgugcaccggcguggucaccgaggcggagaccuacacgaacuucgugggcuacgugaccaccaccuucaagcgcaagcacuuccggcccacgcccgacgccugccgcgccgccuacaacuggaagauggccggggacccgcgguacgaggagagccuccacaaccccuaccccgacuaccacuggcugcgcaccgucaagaccaccaaggagucccuggugaucaucagccccuccguggcggaccucgacccguacgacaagagccugcacucccgggucuuccccagcggcaagugcuccgggaucacggugagcuccaccuacugcagcaccaaccacgacuacaccaucuggaugcccgagaacccccgccugggcacguccugcgacaucuucaccaacagccgggggaagcgcgccuccaagggcagcaagaccugcggcuucguggacgagcgggggcucuacaagagccugaagggcgccugcaagcugaagcucugcgggguccugggccugcgccucauggacggcaccugggccgcgauccagacguccgacgagaccaaguggugcccgcccgaccagcuggugaaccugcacgacuuccggagcgacgagaucgagcaccucguggucgaggagcuggugaagaagcgcgaggagugccuggacgcccucgaguccaucaugaccaccaagagcguguccuuccggcgccugagccaccuccggaagcucguccccggguucggcaaggccuacacgaucuucaacaagacccugauggaggccgacgcccacuacaaguccgugcgcaccuggaacgagaucauccccagcaaggggugccugcgggugggcgggcgcugccacccgcacgucaacggcguguucuucaacggcaucauccucgggcccgacggccacguccugauccccgagaugcaguccagccugcuccagcagcacauggagcugcuggaguccagcgugaucccccucaugcacccgcuggcggaccccuccaccguguucaaggacgacgacgaggccgaggacuucgucgaggugcaccuccccgacgugcacaagcaggucagcgggguggaccugggccugcccuccugggggaaguacgugcugaugagcgccggcguccucacggcccugaugcugaugaucuuccucaugaccugcugccggcgcgccaaccgggcggaguccgcccagcacagccugcgcgagcgcggccggaagguguccgugaccagccagagcgggcgcgucaucuccagcugggaguccuacaagagcggcggggagaccaagcuguga

SEQ ID NO: 94623 - RNA, 1575 nt, Artificial Sequence
  derived and/or modified CDS sequence (opt1) from glycoprotein__RABV__AB563843.1
augaucccccaggcccugcuguucgugccgcugcuggucuucagccucugcuucggcaaguuccccaucuacaccauccccgacaagcuggggcccugguccccgaucgacauccaccaccugagcugccccaacaaccucgugguggaggacgagggcugcaccaaccuguccggguucagcuacauggagcugaaggucggcuacaucuccgccaucaaggugaacggguucacgugcaccggcguggucaccgaggcggagaccuacacgaacuucgugggcuacgugaccaccaccuucaagcgcaagcacuuccggcccacgcccgacgccugccgcgccgccuacaacuggaagauggccggggacccgcgguacgaggagagccuccacaaccccuaccccgacuaccacuggcugcgcaccgucaagaccaccaaggagucccuggugaucaucagccccuccguggcggaccucgacccguacgacaagagccugcacucccgggucuuccccagcggcaagugcuccgggaucacggugagcuccaccuacugcagcaccaaccacgacuacaccaucuggaugcccgagaacccccgccugggcacguccugcgacaucuucaccaacagccgggggaagcgcgccuccaagggcagcaagaccugcggcuucguggacgagcgggggcucuacaagagccugaagggcgccugcaagcugaagcucugcgggguccugggccugcgccucauggacggcaccugggccgcgauccagacguccgacgagaccaaguggugcccgcccgaccagcuggugaaccugcacgacuuccggagcgacgagaucgagcaccucguggucgaggagcuggugaagaagcgcgaggagugccuggacgcccucgaguccaucaugaccaccaagagcguguccuuccggcgccugagccaccuccggaagcucguccccggguucggcaaggccuacacgaucuucaacaagacccugauggaggccgacgcccacuacaaguccgugcgcaccuggaacgagaucauccccagcaaggggugccugcgggugggcgggcgcugccacccgcacgucaacggcguguucuucaacggcaucauccucgggcccgacggccacguccugauccccgagaugcaguccagccugcuccagcagcacauggagcugcuggaguccagcgugaucccccucaugcacccgcuggcggaccccuccaccguguucaaggacgacgacgaggccgaggacuucgucgaggugcaccuccccgacgugcacaagcaggucagcgggguggaccugggccugcccuccugggggaaguacgugcugaugagcgccggcguccucacggcccugaugcugaugaucuuccucacgaccugcugccggcgcgccgaccgggcggaguccgcccagcacagccugggcgagcgcgggcgcaagguguccgugaccagccagagcggccgggucaucuccagcugggaguccuacaagagcgggggcgagaccaagcuguga

SEQ ID NO: 94624 - RNA, 1575 nt, Artificial Sequence; identical to SEQ ID NO: 94596
  derived and/or modified CDS sequence (opt1) from glycoprotein__RABV__AB563844.1

SEQ ID NO: 94625 - RNA, 1575 nt, Artificial Sequence
  derived and/or modified CDS sequence (opt1) from glycoprotein__RABV__AB563845.1
augaacccccaggcccugauguucgugccgcuccuggucuucagccugugcuucggcaaguuccccaucuacaccauccccgacaagcucgggcccugguccccgaucgacauccaccaccugagcugccccaacaaccuggugguggaggacgagggcugcaccaaccucuccggguucagcuacauggagcugaaggucggcuacaucuccgccaucaaggugaacggguucacgugcaccggcguggucaccgaggcggagaccuacacgaacuucgugggcuacgugaccaccaccuucaagcgcaagcacuuccggcccacgcccgacgccugccgcgccgccuacaacuggaagauggccggggacccgcgguacgaggagagccugcacaaccccuaccccgacuaccacuggcuccgcaccgucaagaccaccaaggagucccuggugaucaucagccccuccguggcggaccuggacccguacgacaagagccuccacucccgggucuuccccagcggcaagugcuccgggaucacggugagcuccaccuacugcagcaccaaccacgacuacaccaucuggaugcccgagaacccccgccugggcacguccugcgacaucuucaccaacagccgggggaagcgcgccuccaagggcagcaagaccugcggcuucguggacgagcgggggcuguacaagagccucaagggcgccugcaagcugaagcugugcgggguccucggccugcgccugauggacggcaccugggccgcgauccagacguccgacgagaccaaguggugcccgcccgaccagcucgugaaccugcacgacuuccggagcgacgagaucgagcaccugguggucgaggagcucgugaagaagcgcgaggagugccuggacgcccuggaguccaucaugaccaccaagagcguguccuuccggcgccucagccaccuccggaagcugguccccggguucggcaaggccuacacgaucuucaacaagacccugauggaggccgacgcccacuacaaguccgugcgcaccuggaacgagaucauccccagcaaggggugccugcgggugggcgggcgcugccacccgcacgucaacggcguguucuucaacggcaucauccuggggcccgacggccacguccucauccccgagaugcaguccagccugcugcagcagcacauggagcuccuggaguccagcgugaucccccugaugcacccgcucgcggaccccuccaccguguucaaggacgacgacgaggccgaggacuucgucgaggugcaccuccccgacgugcacaagcaggucagcgggguggaccugggccugcccuccugggggaaguacgugcugaugagcgccggcguccugacggcccucaugcugaugaucuuccugaugaccugcugccggcgcgccaaccgggcggaguccgcccagcacagccucggcgagcgcgggcgcaagguguccgugaccagccagagcggccgggucaucuccagcugggaguccuacaagagcgggggcgagaccaagcuguga

SEQ ID NO: 94626 - RNA, 1575 nt, Artificial Sequence
  derived and/or modified CDS sequence (opt1) from glycoprotein__RABV__AB563846.1
augaucccccaggcccugcuguucgugccgcugcuggucuucagccucugcuucggcaaguuccccaucuacaccauccccgacaagcuggggcccugguccccgaucgacauccaccaccugagcugccccaacaaccucgugguggaggacgagggcugcaccaaccuguccggguucagcuacauggagcugaaggucggcuacaucuccgccaucaaggugaacggguucacgugcaccggcguggucaccgaggcggagaccuacacgaacuucgugggcuacgugaccaccaccuucaagcgcaagcacuuccggcccacgcccgacgccugccgcgccgccuacaacuggaagauggccggggacccgcgguacgaggagagccuccacaaccccuaccccgacuaccacuggcugcgcaccgucaagaccaccaaggagucccuggugaucaucagccccuccguggcggaccucgacccguacgacaagagccugcacucccgggucuuccccagcggcaagugcuccgggaucacggugagcuccaccuacugcagcaccaaccacgacuacaccaucuggaugcccgagaacccccgccugggcacguccugcgacaucuucaccaacagccgggggaagcgcgccuccaagggcagcaagaccugcggcuucguggacgagcgggggcucuacaagagccugaagggcgccugcaagcugaagcucugcgggguccugggccugcgccucauggacggcaccugggccgcgauccagacguccgacgagaccaaguggugcccgcccgaccagcuggugaaccugcacgacuuccggagcgacgagaucgagcaccucguggucgaggagcuggugaagaagcgcgaggagugccuggacgcccucgaguccaucaugaccaccaagagcguguccuuccggcgccugagccaccuccggaagcucguccccggguucggcaaggccuacacgaucuucaacaagacccugauggaggccgacgcccacuacaaguccgugcgcaccuggaacgagaucauccccagcaaggggugccugcgggugggcgggcgcugccacccgcacgucaacggcguguucuucaacggcaucauccucgggcccgacggccacguccugauccccgagaugcaguccagccugcuccagcagcacauggagcugcuggaguccagcgugaucccccucaugcacccgcuggcggaccccuccaccguguucaaggacgacgacgaggccgaggacuucgucgaggugcaccuccccgacgugcacaagcaggucagcgggguggaccugggccugcccuccugggggaaguacgugcugaugagcgccggcguccucacggcccugaugcugaugaucuuccucacgaccugcugccggcgcgccaaccgggcggaguccgcccagcacagccugggcgagcgcgggcgcaagguguccgugaccagccagagcggccgggucaucuccagcugggaguccuacaagagcgggggcgagaccaagcuguga

SEQ ID NO: 94627 - RNA, 1575 nt, Artificial Sequence; identical to SEQ ID NO: 94626
  derived and/or modified CDS sequence (opt1) from glycoprotein__RABV__AB563847.1

SEQ ID NO: 94628 - RNA, 1575 nt, Artificial Sequence
  derived and/or modified CDS sequence (opt1) from glycoprotein__RABV__AB563848.1
augaucccccaggcccugcuguucgugccgcugcuggucuucagccucugcuucggcaaguuccccaucuacaccauccccgacaagcuggggcccugguccccgaucgacauccaccaccugagcugccccaacaaccucgugguggaggacgagggcugcaccaaccuguccggguucagcuacauggagcugaaggucggcuacaucuccgccaucaaggugaacggguucacgugcaccggcguggucaccgaggcggagaccuacacgaacuucgugggcuacgugaccaccaccuucaagcgcaagcacuuccggcccacgcccgacgccugccgcgccgccuacaacuggaagauggccggggacccgcgguacgaggagagccuccacaaccccuaccccgacuaccacuggcugcgcaccgucaagaccaccaaggagucccuggugaucaucagccccuccguggcggaccucgacccguacgacaagagccugcacucccgggucuuccccagcggcaagugcuccgggaucacggugagcuccaccuacugcagcaccaaccacgacuacaccaucuggaugcccgagaacccccgccugggcacguccugcgacaucuucaccaacagccgggggaagcgcgccuccaagggcagcaagaccugcggcuucguggacgagcgggggcucuacaagagccugaagggcgccugcaagcugaagcucugcgggguccugggccugcgccucauggacggcaccugggccgcgauccagacguccgacgagaccaaguggugcccgcccgaccagcuggugaaccugcacgacuuccggagcgacgagaucgagcaccucguggucgaggagcuggugaagaagcgcgaggagugccuggacgcccucgaguccaucaugaccaccaagagcguguccuuccggcgccugagccaccuccggaagcucguccccggguucggcaaggccuacacgaucuucaacaagacccugauggaggccgacgcccacuacaaguccgugcgcaccuggaacgagaucauccccagcaaggggugccugcgggugggcgggcgcugccacccgcacgucaacggcguguucuucaacggcaucauccucgggcccgacggccacguccugauccccgagaugcaguccagccugcuccagcagcacauggagcugcuggaguccagcgugaucccccucaugcacccgcuggcggaccccuccaccguguucaaggacgacgacgaggccgaggacuucgucgaggugcaccuccccgacgugcacaagcaggucagcgggguggaccugggccugcccuccugggggaaguacgugcugaugagcgccggcguccucacggcccugaugcugaccaucuuccucaugaccugcugccggcgcgccaaccgggcggaguccgcccagcacagccugggcgagcgcgggcgcaagguguccgugaccagccagagcggccgggucaucuccagcugggaguccuacaagagcgggggcgagacgaagcuguga

SEQ ID NO: 94629 - RNA, 1575 nt, Artificial Sequence
  derived and/or modified CDS sequence (opt1) from glycoprotein__RABV__AB563849.1
augaucccccaggcccugcuguucgugccgcugcuggucuucagccucugcuucggcaaguuccccaucuacaccauccccgacaagcuggggcccugguccccgaucgacauccaccaccugagcugccccaacaaccucgugguggaggacgagggcugcaccaaccuguccggguucagcuacauggagcugaaggucggcuacaucuccgccaucaaggugaacggguucacgugcaccggcguggucaccgaggcggagaccuacacgaacuucgugggcuacgugaccaccaccuucaagcgcaagcacuuccggcccacgcccgacgccugccgcgccgccuacaacuggaagauggccggggacccgcgguacgaggagagccuccacaaccccuaccccgacuaccacuggcugcgcaccgucaagaccaccaaggagucccuggugaucaucagccccuccguggcggaccucgacccguacgacaagagccugcacucccgggucuuccccagcggcaagugcuccgggaucacggugagcuccaccuacugcagcaccaaccacgacuacaccaucuggaugcccgagaacccccgccugggcacguccugcgacaucuucaccaacagccgggggaagcgcgccuccaagggcagcaagaccugcggcuucguggacgagcgggggcucuacaagagccugaagggcgccugcaagcugaagcucugcgggguccugggccugcgccucauggacggcaccugggccgcgauccagacguccgacgagaccaaguggugcccgcccgaccagcuggugaaccugcacgacuuccggagcgacgagaucgagcaccucguggucgaggagcuggugaagaagcgcgaggagugccuggacgcccucgaguccaucaugaccaccaagagcguguccuuccggcgccugagccaccuccggaagcucguccccggguucggcaaggccuacacgaucuucaacaagacccugauggaggccgacgcccacuacaaguccgugcgcaccuggaacgagaucauccccagcaaggggugccugcgggugggcgggcgcugccacccgcacgucaacggcguguucuucaacggcaucauccucgggcccgacggccacguccugauccccgagaugcaguccagccugcuccagcagcacauggagcugcuggaguccagcgugaucccccucaugcacccgcuggcggaccccuccaccguguucaaggacgacgacgaggccgaggacuucgucgaggugcaccuccccgacgugcacaagcaggucagcgggguggaccugggccugcccuccugggggaaguacgugcugaugagcgccggcguccucacggcccugaugcugaugaucuuccucacgaccugcuaccggcgcgccaaccgggcggaguccgcccagcacagccugggcgagaaggggcgcaagguguccgugaccagccagagcggccgcgucaucuccagcugggaguccuacaagagcgggggcgagaccaagcuguga

SEQ ID NO: 94630 - RNA, 1575 nt, Artificial Sequence; identical to SEQ ID NO: 94623
  derived and/or modified CDS sequence (opt1) from glycoprotein__RABV__AB563850.1

SEQ ID NO: 94631 - RNA, 1575 nt, Artificial Sequence; identical to SEQ ID NO: 94628
  derived and/or modified CDS sequence (opt1) from glycoprotein__RABV__AB563851.1

SEQ ID NO: 94632 - RNA, 1575 nt, Artificial Sequence
  derived and/or modified CDS sequence (opt1) from glycoprotein__RABV__AB563852.1
augaacccccaggcccugauguucgugccgcuccuggucuucagccugugcuucggcaaguuccccaucuacaccauccccgacaagcucgggcccugguccccgaucgacauccaccaccugagcugccccaacaaccuggugguggaggacgagggcugcaccaaccucuccggguucagcuacauggagcugaaggucggcuacaucuccgccaucaaggugaacggguucacgugcaccggcguggucaccgaggcggagaccuacacgaacuucgugggcuacgugaccaccaccuucaagcgcaagcacuuccggcccacgcccgacgccugccgcgccgccuacaacuggaagauggccggggacccgcgguacgaggagagccugcacaaccccuaccccgacuaccacuggcuccgcaccgucaagaccaccaaggagucccuggugaucaucagccccuccguggcggaccuggacccguacgacaagagccuccacucccgggucuuccccagcggcaagugcuccgggaucacggugagcuccaccuacugcagcaccaaccacgacuacaccaucuggaugcccgagaacccccgccugggcacguccugcgacaccuucaccaacagccgggggaagcgcgccuccaagggcagcaagaccugcggcuucguggacgagcgggggcuguacaagagccucaagggcgccugcaagcugaagcugugcgggguccucggccugcgccugauggacggcacgugggccgcgauccagaccuccgacgagaccaaguggugcccgcccgaccagcucgugaaccugcacgacuuccggagcgacgagaucgagcaccugguggucgaggagcucgugaagaagcgcgaggagugccuggacgcccuggaguccaucaugaccaccaagagcguguccuuccggcgccucagccaccuccggaagcugguccccggguucggcaaggccuacacgaucuucaacaagacccugauggaggccgacgcccacuacaaguccgugcgcaccuggaacgagaucauccccagcaaggggugccugcgggugggcgggcgcugccacccgcacgucaacggcguguucuucaacggcaucauccuggggcccgacggccacguccucauccccgagaugcaguccagccugcugcagcagcacauggagcuccuggaguccagcgugaucccccugaugcacccgcucgcggaccccuccacgguguucaaggacgacgacgaggccgaggacuucgucgaggugcaccuccccgacgugcacaagcaggucagcgggguggaccugggccugcccuccugggggaaguacgugcugaugagcgccggcguccugaccgcccucaugcugaugaucuuccugaugaccugcugccggcgcgccaaccgggcggaguccgcccagcacagccucggcgagcgcgggcgcaagguguccgugaccagccagagcggccgggucaucuccagcugggaguccuacaagagcgggggcgagacgaagcuguga

SEQ ID NO: 94633 - RNA, 1575 nt, Artificial Sequence
  derived and/or modified CDS sequence (opt1) from glycoprotein__RABV__AB563854.1
augaucccccaggcccugauguucgugccgcuccuggucuucagccugugcuucggcaaguuccccaucuacaccauccccgacaagcucgggcccugguccccgaucgacauccaccaccugagcugccccaacaaccuggugguggaggacgagggcugcaccaaccucuccggguucagcuacauggagcugaaggucggcuacaucuccgccaucaaggugaacggguucacgugcaccggcguggucaccgaggcggagaccuacacgaacuucgugggcuacgugaccaccaccuucaagcgcaagcacuuccggcccacgcccgacgccugccgcgccgccuacaacuggaagauggccggggacccgcgguacgaggagagccugcacaaccccuaccccgacuaccacuggcuccgcaccgucaagaccaccaaggagucccuggugaucaucagccccuccguggcggaccuggacccguacgacaagagccuccacucccgggucuuccccagcggcaagugcuccgggaucacggugagcuccaccuacugcagcaccaaccacgacuacaccaucuggaugcccgagaacccccgccugggcacguccugcgacaucuucaccaacagccgggggaagcgcgccuccaagggcagcaagaccugcggcuucguggacgagcgggggcuguacaagagccucaagggcgccugcaagcugaagcugugcgggguccucggccugcgccugauggacggcaccugggccgcgauccagacguccgacgagaccaaguggugcccgcccgaccagcucgugaaccugcacgacuuccggagcgacgagaucgagcaccugguggucgaggagcucgugaagaagcgcgaggagugccuggacgcccuggaguccaucaugaccaccaagagcguguccuuccggcgccucagccaccuccggaagcugguccccggguucggcaaggccuacacgaucuucaacaagacccugauggaggccgacgcccacuacaaguccgugcgcaccuggaacgagaucauccccagcaaggggugccugcgggugggcgggcgcugccacccgcacgucaacggcguguucuucaacggcaucauccuggggcccgacggccacguccucauccccgagaugcaguccagccugcugcagcagcacauggagcuccuggaguccagcgugaucccccugaugcacccgcucgcggaccccuccaccguguucaaggacgacgacgaggccgaggacuucgucgaggugcaccuccccgacgugcacaagcaggucagcgggguggaccugggccugcccuccugggggaaguacgugcugaugagcgccggcguccugacggcccucaugcugaugaucuuccugaugaccugcugccggcgcgccaaccgggcggaguccgcccagcacagccucggcgagcgcgggcgcaagguguccgugaccagccagagcggccgggucaucuccagcugggaguccuacaagagcgggggcgagaccaagcuguga

SEQ ID NO: 94634 - RNA, 1575 nt, Artificial Sequence; identical to SEQ ID NO: 94625
  derived and/or modified CDS sequence (opt1) from glycoprotein__RABV__AB563855.1

SEQ ID NO: 94635 - RNA, 1575 nt, Artificial Sequence; identical to SEQ ID NO: 94625
  derived and/or modified CDS sequence (opt1) from glycoprotein__RABV__AB563856.1

SEQ ID NO: 94636 - RNA, 1575 nt, Artificial Sequence
  derived and/or modified CDS sequence (opt1) from glycoprotein__RABV__AB563857.1
augaacccccaggcccugauguucgugccgcuccuggucuucagccugugcuucggcaaguuccccaucuacaccauccccgacaagcucgggcccugguccccgaucgacauccaccaccugagcugccccaacaaccuggugguggaggacgagggcugcaccaaccucuccggguucagcuacauggagcugaaggucggcuacaucuccgccaucaaggugaacggguucacgugcaccggcguggucaccgaggcggagaccuacacgaacuucgugggcuacgugaccaccaccuucaagcgcaagcacuuccggcccacgcccgacgccugccgcgccgccuacaacuggaagauggccggggacccgcgguacgaggagagccugcacaaccccuaccccgacuaccacuggcuccgcaccgucaagaccaccaaggagucccuggugaucaucagccccuccguggcggaccuggacccguacgacaagagccuccacucccgggucuuccccagcggcaagugcuccgggaucacggugagcuccaccuacugcagcaccaaccacgacuacaccaucuggaugcccgagaacccccgccugggcacguccugcgacauccugaccaacagccgggggaagcgcgccuccaagggcagcaagaccugcggcuucguggacgagcgggggcucuacaagagccugaagggcgccugcaagcugaagcucugcgggguccugggccugcgccucauggacggcaccugggccgcgauccagacguccgacgagaccaaguggugcccgcccgaccagcuggugaaccugcacgacuuccggagcgacgagaucgagcaccucguggucgaggagcuggugaagaagcgcgaggagugccuggacgcccucgaguccaucaugaccaccaagagcguguccuuccggcgccugagccaccuccggaagcugguccccggguucggcaaggccuacacgaucuucaacaagacccugauggaggccgacgcccacuacaaguccgugcgcaccuggaacgagaucauccccagcaaggggugccugcgggugggcgggcgcugccacccgcacgucaacggcguguucuucaacggcaucauccucgggcccgacggccacguccugauccccgagaugcaguccagccugcuccagcagcacauggagcugcuggaguccagcgugaucccccucaugcacccgcuggcggaccccuccaccguguucaaggacgacgacgaggccgaggacuucgucgaggugcaccuccccgacgugcacaagcaggucagcgggguggaccugggccugcccuccugggggaaguacgugcugaugagcgccggcguccucacggcccugaugcugaugaucuuccucaugaccugcugccggcgcgccaaccgggcggaguccgcccagcacagccugggcgagcgcgggcgcaagguguccgugaccagccagagcggccgggucaucuccagcugggaguccuacaagagcgggggcgagaccaagcuguga

SEQ ID NO: 94637 - RNA, 1575 nt, Artificial Sequence; identical to SEQ ID NO: 94596
  derived and/or modified CDS sequence (opt1) from glycoprotein__RABV__AB563860.2

SEQ ID NO: 94638 - RNA, 1575 nt, Artificial Sequence; identical to SEQ ID NO: 94596
  derived and/or modified CDS sequence (opt1) from glycoprotein__RABV__AB563861.1

SEQ ID NO: 94639 - RNA, 1575 nt, Artificial Sequence
  derived and/or modified CDS sequence (opt1) from glycoprotein__RABV__AB563862.1
augaucccccaggcccugcuguucgugccgcugcuggucuucagccucugcuucggcaaguuccccaucuacaccauccccgacaagcuggggcccugguccccgaucgacauccaccaccugagcugccccaacaaccucgugguggaggacgagggcugcaccaaccuguccggguucagcuacauggagcugaaggucggcuacaucuccgccaucaaggugaacggguucacgugcaccggcguggucaccgaggcggagaccuacacgaacuucgugggcuacgugaccaccaccuucaagcgcaagcacuuccggcccacgcccgacgccugccgcgccgccuacaacuggaagaugagcggggacccgcgguacgaggagucccuccacaaccccuaccccgacuaccacuggcugcgcaccgucaagaccaccaaggagagccuggugaucaucucccccagcguggccgaccucgacccguacgacaagucccugcacagccgggucuuccccuccggcaagugcagcgggaucacgguguccagcaccuacugcuccaccaaccacgacuacaccaucuggaugcccgagaacccccgccugggcacgagcugcgacaucuucaccaacucccgggggaagcgcgcgagcaagggcagcaagaccugcggcuucguggacgagcgggggcucuacaagucccugaagggcgccugcaagcugaagcucugcgggguccugggccugcgccucauggacggcaccugggccgccauccagacgagcgacgagaccaaguggugcccgcccgaccagcuggugaaccugcacgacuuccgguccgacgagaucgagcaccucguggucgaggagcuggugaagaagcgcgaggagugccuggacgcgcucgagagcaucaugaccaccaaguccgugagcuuccggcgccugucccaccuccggaagcucguccccggguucggcaaggccuacacgaucuucaacaagacccugauggaggccgacgcccacuacaagagcgugcgcaccuggaacgagaucauccccuccaaggggugccugcgggugggcgggcgcugccacccgcacgucaacggcguguucuucaacggcaucauccucgggcccgacggccacguccugauccccgagaugcagagcucccugcuccagcagcacauggagcugcuggagagcuccgugaucccccucaugcacccgcuggccgaccccagcaccguguucaaggacgacgacgaggcggaggacuucgucgaggugcaccuccccgacgugcacaagcaggucuccgggguggaccugggccugcccagcugggggaaguacgugcugauguccgccggcguccucacggcccugaugcugaugaucuuccucaugaccugcugccggcgcgccaaccggaccgagagcgcccagcacucccugggcgagcgcgggcgcaaggugagcgugaccagccaguccggccgggucaucagcuccugggagagcuacaaguccgggggcgagacgaagcuguga

SEQ ID NO: 94640 - RNA, 1575 nt, Artificial Sequence
  derived and/or modified CDS sequence (opt1) from glycoprotein__RABV__AB563863.1
augaucccccaggcccugcuguucgugccgcugcuggucuucagccucugcuucggcaaguuccccaucuacaccauccccgacaagcuggggcccugguccccgaucgacauccaccaccugagcugccccaacaaccucgugguggaggacgagggcugcaccaaccuguccggguucagcuacauggagcugaaggucggcuacaucuccgccaucaaggugaacggguucacgugcaccggcguggucaccgaggcggagaccuacacgaacuucgugggcuacgugaccaccaccuucaagcgcaagcacuuccggcccacgcccgacgccugccgcgccgccuacaacuggaagauggccggggacccgcgguacgaggagagccuccacaaccccuaccccgacuaccacuggcugcgcaccgucaagaccaccaaggagucccuggugaucaucagccccuccguggcggaccucgacccguacgacaagagccugcacucccgggucuuccccagcggcaagugcuccgggaucacggugagcuccaccuacugcagcaccaaccacgacuacaccaucuggaugcccgagaacccccgccugggcacguccugcgacaucuucaccaacagccgggggaagcgcgccuccaagggcagcaagaccugcggcuucguggacgagcgggggcucuacaagagccugaagggcgccugcaagcugaagcucugcgggguccugggccugcgccucauggacggcaccugggccgcgauccagacguccgacgagaccaaguggugcccgcccgaccagcuggugaaccugcacgacuuccggagcgacgagaucgagcaccucguggucgaggagcuggugaagaagcgcgaggagugccuggacgcccucgaguccaucaugaccaccaagagcguguccuuccggcgccugagccaccuccggaagcucguccccggguucggcaaggccuacacgaucuucaacaagacccugauggaggccgacgcccacuacaaguccgugcgcaccuggaacgagaucauccccagcaaggggugccugcgggugggcgggcgcugccacccgcacgucaacggcguguucuucaacggcaucauccucgggcccgacggccacguccugauccccgagaugcaguccagccugcuccagcagcacauggagcugcuggaguccagcgugaucccccucaugcacccgcuggcggaccccuccaccguguucaaggacgacgacgaggccgaggacuucgucgaggugcaccuccccgacgugcacaagcaggucagcgggguggaccugggccugcccuccugggggaaguacgugcugaugagcgccggcguccucacggcccugaugcugaugaucuuccucaugaccugcugccggcgcgccaaccgggcggaguccgcccagcacagccugggcgagaaggggcgcaagguguccgugaccagccagagcggccgcgucaucuccagcugggaguccuacaagagcgggggcgagaccaagcuguga

SEQ ID NO: 94641 - RNA, 1575 nt, Artificial Sequence
  derived and/or modified CDS sequence (opt1) from glycoprotein__RABV__AB563864.1
augaucccccaggcccugcuguucgugccgcugcuggucuucagccucugcuucggcaaguuccccaucuacaccauccccgacaagcuggggcccugguccccgaucgacauccaccaccugagcugccccaacaaccucgugguggaggacgagggcugcaccaaccuguccggguucagcuacauggagcugaaggucggcuacaucuccgccaucaaggugaacggguucacgugcaccggcguggucaccgaggcggagaccuacacgaacuucgugggcuacgugaccaccaccuucaagcgcaagcacuuccggcccacgcccgacgccugccgcgccgccuacaacuggaagauggccggggacccgcgguacgaggagagccuccacaaccccuaccccgacuaccacuggcugcgcaccgucaagaccaccaaggagucccuggugaucaucagccccuccguggcggaccucgacccguacgacaagagccugcacucccgggucuuccccagcggcaagugcuccgggaucacggugagcuccaccuacugcagcaccaaccacgacuacaccaucuggaugcccgagaacccccgccugggcacguccugcgacaucuucaccaacagccgggggaagcgcgccuccaagggcagcaagaccugcggcuucguggacgagcgggggcucuacaagagccugaagggcgccugcaagcugaagcucugcgggguccugggccugcgccucaucgacggcaccugggccgcgauccagacguccgacgagaccaaguggugcccgcccgaccagcuggugaaccugcacgacuuccggagcgacgagaucgagcaccucguggucgaggagcuggugaagaagcgcgaggagugccuggacgcccucgaguccaucaugaccaccaagagcguguccuuccggcgccugagccaccuccggaagcucguccccggguucggcaaggccuacacgaucuucaacaagacccugauggaggccgacgcccacuacaaguccgugcgcaccuggaacgagaucauccccagcaaggggugccugcgggugggcgggcgcugccacccgcacgucaacggcguguucuucaacggcaucauccucgggcccgacggccacguccugauccccgagaugcaguccagccugcuccagcagcacauggagcugcuggaguccagcgugaucccccucaugcacccgcuggcggaccccuccaccguguucaaggacgacgacgaggccgaggacuucgucgaggugcaccuccccgacgugcacaagcaggucagcgggguggaccugggccugcccuccugggggaaguacgugcugaugagcgccggcguccucacggcccugaugcugaugaucuuccucacgaccugcugccggcgcgccaaccgggcggaguccgcccagcacagccugggcgagcgcgggcgcaagguguccgccaccagccagagcggccgggugaucuccagcugggaguccuacaagagcgggggcgagaccaagcuguga

SEQ ID NO: 94642 - RNA, 1575 nt, Artificial Sequence
  derived and/or modified CDS sequence (opt1) from glycoprotein__RABV__AB563865.1
augaucccccaggcccugcuguucgugccgcugcuggucuucagccucugcuucggcaaguuccccaucuacaccauccccgacaagcuggggcccugguccccgaucgacauccaccaccugagcugccccaacaaccucgugguggaggacgagggcugcaccaaccuguccggguucagcuacauggagcugaaggucggcuacaucuccgccaucaaggugagcggguucacgugcaccggcguggucaccgaggcggagaccuacacgaacuucgugggcuacgugaccaccaccuucaagcgcaagcacuuccggcccacgcccgacgccugccgcgccgccuacaacuggaagauggccggggacccgcgguacgaggagucccuccacaaccccuaccccgacuaccacuggcugcgcaccgucaagaccaccaaggagagccuggugaucaucucccccagcguggcggaccucgacccguacgacaagucccugcacagccgggucuuccccuccggcaagugcagcgggaucacgguguccagcaccuacugcuccaccaaccacgacuacaccaucuggaugcccgagaacccccgccugggcacgagcugcgacaucuucaccaacucccgggggaagcgcgccagcaagggcagcaagaccugcggcuucguggacgagcgggggcucuacaagucccugaagggcgccugcaagcugaagcucugcgggguccugggccugcgccucauggacggcaccugggccgcgauccagacgagcgacgagaccaaguggugcccgcccgaccagcuggugaaccugcacgacuuccgguccgacgagaucgagcaccucguggucgaggagcuggugaagaagcgcgaggagugccuggacgcccucgagagcaucaugaccaccaaguccgugagcuuccggcgccugucccaccuccggaagcucguccccggguucggcaaggccuacacgaucuucaacaagacccugauggaggccgacgcccacuacaagagcgugcgcaccuggaacgagaucauccccuccaaggggugccugcgggugggcgggcgcugccacccgcacgucaacggcguguucuucaacggcaucauccucgggcccgacggccacguccugauccccgagaugcagagcucccugcuccagcagcacauggagcugcuggagagcuccgugaucccccucaugcacccgcuggcggaccccagcaccguguucaaggacgacgacgaggccgaggacuucgucgaggugcaccuccccgacgugcacaagcaggucuccgggguggaccugggccugcccagcugggggaaguacgugcugauguccgccggcgcccucacggcccugaugcugaugaucuuccucaugaccugcugccggcgcgcgaaccgggccgagagcgcccagcacucccugggcgagggcgggcgcaaggucagcgugaccagccaguccgggcgcgugaucagcuccugggagagcuacaaguccggcggggagaccaagcuguga

SEQ ID NO: 94643 - RNA, 1575 nt, Artificial Sequence
  derived and/or modified CDS sequence (opt1) from glycoprotein__RABV__AB563867.1
augaucccccaggcccugcuguucgugccgcugcuggucuucagccucugcuucggcaaguuccccaucuacaccauccccgacaagcuggggcccugguccccgaucgacauccaccaccugagcugccccaacaaccucgugguggaggacgagggcugcaccaaccuguccggguucagcuacauggagcugaaggucggcuacaucuccgccaucaaggugagcggguucacgugcaccggcguggucaccgaggcggagaccuacacgaacuucgugggcuacgugaccaccaccuucaagcgcaagcacuuccggcccacgcccgacgccugccgcgccgccuacaacuggaagauggccggggacccgcgguacgaggagucccuccacaaccccuaccccgacuaccacuggcugcgcaccgucaagaccaccaaggagagccuggugaucaucucccccagcguggcggaccucgacccguacgacaagucccugcacagccgggucuuccccuccggcaagugcagcgggaucacgguguccagcaccuacugcuccaccaaccacgacuacaccaucuggaugcccgagaacccccgccugggcacgagcugcgacaucuucaccaacucccgggggaagcgcgccagcaagggcagcaagaccugcggcuucguggacgagcgggggcucuacaagucccugaagggcgccugcaagcugaagcucugcgggguccugggccugcgccucauggacggcaccugggccgcgauccagacgagcgacgagaccaaguggugcccgcccgaccagcuggugaaccugcacgacuuccgguccgacgagaucgagcaccucguggucgaggagcuggugaagaagcgcgaggagugccuggacgcccucgagagcaucaugaccaccaaguccgugagcuuccggcgccugucccaccuccggaagcucguccccggguucggcaaggccuacacgaucuucaacaagacccugauggaggccgacgcccacuacaagagcgugcgcaccuggaacgagaucauccccuccaaggggugccugcgggugggcgggcgcugccacccgcacgucaacggcguguucuucaacggcaucauccucgggcccgacggccacguccugauccccgagaugcagagcucccugcuccagcagcacauggagcugcuggagagcuccgugaucccccucaugcacccgcuggcggaccccagcaccguguucaaggacgacgacgaggccgaggacuucgucgaggugcaccuccccgacgugcacaagcaggucuccgggguggaccugggccugcccagcugggggaaguacgugcugauguccgccggcgcccucacggcccugaugcugaugaucuuccucaugaccugcugccggaaggcgaaccgcgccgagagcgcccagcacucccugggcgagggcgggcggaaggucagcgugaccagccaguccgggcgcgugaucagcuccugggagagcuacaaguccggcggggagaccaagcuguga

SEQ ID NO: 94644 - RNA, 1575 nt, Artificial Sequence
  derived and/or modified CDS sequence (opt1) from glycoprotein__RABV__AB563870.1
augaucccccaggcccugcuguucgugccgcugcuggucuucagccucugcuucggcaaguuccccaucuacaccauccccgacaagcuggggcccugguccccgaucgacauccaccaccugagcugccccaacaaccucgugguggaggacgagggcugcaccaaccuguccggguucagcuacauggagcugaaggucggcuacaucuccgccaucaaggugaacggguucacgugcaccggcguggucaccgaggcggagaccuacacgaacuucgugggcuacgugaccaccaccuucaagcgcaagcacuuccggcccacgcccgacgccugccgcgccgccuacaacuggaagauggccggggacccgcgguacgaggagagccuccacaaccccuaccccgacuaccacuggcugcgcaccgucaagaccaccaaggagucccuggugaucaucagccccuccguggcggaccucgacccguacgacaagagccugcacucccgggucuuccccagcggcaagugcuccgggaucacggugagcuccaccuacugcagcaccaaccacgacuacaccaucuggaugcccgagaacccccgccugggcacguccugcgacaucuucaccaacagccgggggaagcgcgccuccaagggcagcaagaccugcggcuucguggacgagcgggggcucuacaagagccugaagggcgccugcaagcugaagcucugcgggguccugggccugcgccucauggacggcaccugggccgcgauccagacguccgacgagaccaaguggugcccgcccgaccagcuggugaaccugcacgacuuccggagcgacgagaucgagcaccucguggucgaggagcuggugaagaagcgcgaggagugccuggacgcccucgaguccaucaugaccaccaagagcguguccuuccggcgccugagccaccuccggaagcucguccccggguucggcaaggccuacacgaucuucaacaagacccugauggaggccgacgcccacuacaaguccgugcgcaccuggaacgagaucauccccagcaaggggugccugcgggugggcgggcgcugccacccgcacgucaacggcguguucuucaacggcaucauccucgggcccgacggccacguccugauccccgagaugcaguccagccugcuccagcagcacauggagcugcuggaguccagcgugaucccccucaugcacccgcuggcggaccccuccaccguguucaaggacgacgacgaggccgaggacuucgucgaggugcaccuccccgacgugcacaagcaggucagcgggguggaccugggccugcccuccugggggaaguacgugcugaugagcgccggcguccucacggcccugaugcugaccaucuuccucaucacgugcugccggcgcgccaaccgggcggaguccgcccagcacagccugggcgagcgcgggcgcaagguguccgugaccagccagagcggccgggucaucuccagcugggaguccuacaagagcgggggcgagaccaagcuguga

SEQ ID NO: 94645 - RNA, 1575 nt, Artificial Sequence; identical to SEQ ID NO: 94625
  derived and/or modified CDS sequence (opt1) from glycoprotein__RABV__AB563871.1

SEQ ID NO: 94646 - RNA, 1575 nt, Artificial Sequence; identical to SEQ ID NO: 94625
  derived and/or modified CDS sequence (opt1) from glycoprotein__RABV__AB563873.1

SEQ ID NO: 94647 - RNA, 1575 nt, Artificial Sequence
  derived and/or modified CDS sequence (opt1) from glycoprotein__RABV__AB563874.1
augaacccccaggcccugauguucgugccgcuccuggucuucagccugugcuucggcaaguuccccaucuacaccauccccgacaagcucgggcccugguccccgaucgacauccaccaccugagcugccccaacaaccuggugguggaggacgagggcugcaccaaccucuccggguucagcuacauggagcugaaggucggcuacaucuccgccaucaaggugaacggguucacgugcaccggcguggucaccgaggcggagaccuacacgaacuucgugggcuacgugaccaccaccuucaagcgcaagcacuuccggcccacgcccgacgccugccgcgccgccuacaacuggaagauggccggggacccgcgguacgaggagagccugcacaaccccuaccccgacuaccacuggcuccgcaccgucaagaccaccaaggagucccuggugaucaucagccccuccguggcggaccuggacccguacgacaagagccuccacucccgggucuuccccagcggcaagugcuccgggaucacggugagcuccaccuacugcagcaccaaccacgacuacaccaucuggaugcccgagaacccccgccugggcacguccugcgacaucuucaccaacagccgggggaagcgcgccuccaagggcagcaagaccugcggcuucguggacgagcgggggcuguacaagagccucaagggcgccugcaagcugaagcugugcgggguccucggccugcgccugauggacggcaccugggccgcgauccagacguccgacgagaccaaguggugcccgcccgaccagcucgugaaccugcacgacuuccggagcgacgagaucgagcaccugguggucgaggagcucgugaagaagcgcgaggagugccuggacgcccuggaguccaucaugaccaccaagagcguguccuuccggcgccucagccaccuccggaagcugguccccggguucggcaaggccuacacgaucuucaacaagacccugauggaggccgacgcccacuacaaguccgugcgcaccuggaacgagaucauccccagcaaggggugccugcgggugggcgggcgcugccacccgcacgucaacggcguguucuucaacggcaucauccuggggcccgacggccacguccucauccccgagaugcaguccagccugcugcagcagcacauggagcuccuggaguccagcgugaucccccugaugcacccgcucgcggaccccuccaccguguucaaggacgacgacgaggccgaggacuucgucgaggugcaccuccccgacgugcacaagcaggucagcgggguggaccugggccuguccagcugggggaaguacgugcugauguccgccggcguccugacggcccucaugcugaugaucuuccugaugaccugcugccggcgcgccaaccgggcggagagcgcccagcacucccucggcgagcgcgggcgcaaggugagcgugaccagccaguccggccgggucaucagcuccugggagagcuacaaguccgggggcgagaccaagcuguga

SEQ ID NO: 94648 - RNA, 1575 nt, Artificial Sequence
  derived and/or modified CDS sequence (opt1) from glycoprotein__RABV__AB563875.1
augaacccccaggcccugauguucgugccgcuccuggucuucagccugugcuucggcaaguuccccaucuacaccauccccgacaagcucgggcccugguccccgaucgacauccaccaccugagcugccccaacaaccuggugguggaggacgagggcugcaccaaccucuccggguucagcuacauggagcugaaggucggcuacaucuccgccaucaaggugaacggguucacgugcaccggcguggucaccgaggcggagaccuacacgaacuucgugggcuacgugaccaccaccuucaagcgcaagcacuuccggcccacgcccgacgccugccgcgccgccuacaacuggaagauggccggggacccgcgguacgaggagagccugcacaaccccuaccccgacuaccacuggcuccgcaccgucaagaccaccaaggagucccuggugaucaucagccccuccguggcggaccuggacccguacgacaagagccuccacucccgggucuuccccagcggcaagugcuccgggaucacggugagcuccaccuacugcagcaccaaccacgacuacaccaucuggaugcccgagaacccccgccugggcacguccugcgacaucuucaccaacagccgggggaagcgcgccuccaagggcagcaagaccugcggcuucguggacgagcgggggcuguacaagagccucaagggcgccugcaagcugaagcugugcgggguccucggccugcgccugauggacggcaccugggccgcgauccagacguccgacgagaccaaguggugcccgcccgaccagcucgugaaccugcacgacuuccggagcgacgagaucgagcaccugguggucgaggagcucgugaagaagcgcgaggagugccuggacgcccuggaguccaucaugaccaccaagagcguguccuuccggcgccucagccaccuccggaagcugguccccggguucggcaaggccuacacgaucuucaacaagacccugauggaggccgacgcccacuacaaguccgugcgcaccuggaacgagaucauccccagcaaggggugccugcgggugggcgggcgcugccacccgcacgucaacggcguguucuucaacggcaucauccuggggcccgacggccacguccucauccccgagaugcaguccagccugcugcagcagcacauggagcuccuggaguccagcgugaucccccugaugcacccgcucgcggaccccuccaccguguucaaggacgacgacgaggccgaggacuucgucgaggugcaccuccccgacgugcacaagcaggucagcgggguggaccugggccugcccuccugggggaaguacgugcugaugagcgccggcguccugacggcccucaugcugaugaucuuccugaugaccugcugccggcgcgccaaccgggcggaguccgcccagcacagccucggcgagcgccgccggaagguguccgugaccagccagagcgggcgcgucaucuccagcugggaguccuacaagagcggcggggagaccaagcuguga

SEQ ID NO: 94649 - RNA, 1575 nt, Artificial Sequence
  derived and/or modified CDS sequence (opt1) from glycoprotein__RABV__AB563878.1
augaucccccaggcccugcuguucgugccgcugcuggucuucagccucugcuucggcaaguuccccaucuacaccauccccgacaagcuggggcccugguccccgaucgacauccaccaccugagcugccccaacaaccucgugguggaggacgagggcugcaccaaccuguccggguucagcuacauggagcugaaggucggcuacaucuccgccaucaaggugaacggguucacgugcaccggcguggucaccgaggcggagaccuacacgaacuucgugggcuacgugaccaccaccuucaagcgcaagcacuuccggcccacgcccgacgccugccgcgccgccuacaacuggaagauggccggggacccgcgguacgaggagagccuccacaaccccuaccccgacuaccacuggcugcgcaccgucaagaccaccaaggagucccuggugaucaucagccccuccguggcggaccucgacccguacgacaagagccugcacucccgggucuuccccagcggcaagugcuccgggaucacggugagcuccaccuacugcagcaccaaccacgacuacaccaucuggaugcccgagaacccccgccugggcacguccugcgacaucuucaccaacagccgggggaagcgcgccuccaagggcagcaagaccugcggcuucguggacgagcgggggcucuacaagagccugaagggcgccugcaagcugaagcucugcgggguccugggccugcgccucauggacggcaccugggccgcgauccagacguccgacgagaccaaguggugcccgcccgaccagcuggugaaccugcacgacuuccggagcgacgagaucgagcaccucguggucgaggagcuggugaagaagcgcgaggagugccuggacgcccucgaguccaucaugaccaccaagagcguguccuuccggcgccugagccaccuccggaagcucguccccggguucggcaaggccuacacgaucuucaacaagacccugauggaggccgacgcccacuacaaguccgugcgcaccuggaacgagaucauccccagcaaggggugccugcgggugggcgggcgcugccacccgcacgucaacggcguguucuucaacggcaucauccucgggcccgacggccacguccugauccccgagaugcaguccagccugcuccagcagcacauggagcugcuggaguccagcgugaucccccucaugcacccgcuggcggaccccuccaccguguucaaggacgacgacgaggccgaggacuucgucgaggugcaccuccccgacgugcacaagcaggucagcgggguggaccugggccugcccuccugggggaaguacgugcugaugagcgccggcguccucacggcccugaugcugaugaucuuccucacgaccugcugccggcgcgccaaccgggcggaguccgcccagcacagccugggcgagaaggggcgcaagguguccgugaccagccagagcggccgcgucaucuccagcugggaguccuacaagagcgggggcgagaccaagcuguga

SEQ ID NO: 94650 - RNA, 1575 nt, Artificial Sequence; identical to SEQ ID NO: 94596
  derived and/or modified CDS sequence (opt1) from glycoprotein__RABV__AB563879.1

SEQ ID NO: 94651 - RNA, 1575 nt, Artificial Sequence
  derived and/or modified CDS sequence (opt1) from glycoprotein__RABV__AB563881.1
augaucccccaggcccuccuguucgugccgcugcuggucuucagccucugcuucggcaaguuccccaucuacaccauccccgacaagcuggggcccugguccccgaucgacauccaccaccugagcugccccaacaaccucgugguggaggacgagggcugcaccaaccuguccggguucagcuaccuggagcucaaggucggcuacaucuccgccaucaaggugaacggguucacgugcaccggcguggucaccgaggcggagaccuacacgaacuucgugggcuacgugaccaccaccuucaagcgcaagcacuuccggcccacgcccgacgccugccgcgccgccuacaacuggaagauggccggggacccgcgguacgaggagagccugcacaaccccuaccccgacuaccacuggcugcgcaccgucaagaccaccaaggagucccucgugaucaucagccccuccguggcggaccuggacccguacgacaagagccugcacucccgggucuuccccagcggcaagugcuccgggaucacggugagcuccaccuacugcagcaccaaccacgacuacaccaucuggaugcccgagaacccccgccucggcacguccugcgacaucuucaccaacagccgggggaagcgcgccuccaagggcagcaagaccugcggcuucguggacgagcgggggcuguacaagagccugaagggcgccugcaagcucaagcugugcgggguccugggccuccgccugauggacggcaccugggccgcgauccagacguccgacgagaccaaguggugcccgcccgaccagcuggugaaccuccacgacuuccggagcgacgagaucgagcaccugguggucgaggagcuggugaagaagcgcgaggagugccucgacgcccuggaguccaucaugaccaccaagagcguguccuuccggcgccugagccaccuccggaagcugguccccggguucggcaaggccuacacgaucuucaacaagacccugauggaggccgacgcccacuacaaguccgugcgcaccuggaacgagaucauccccagcaaggggugccuccgggugggcgggcgcugccacccgcacgucaacggcguguucuucaacggcaucauccuggggcccgacggccacguccugauccccgagaugcaguccagccuccugcagcagcacauggagcugcucgaguccagcgugaucccccugaugcacccgcuggcggaccccuccaccguguucaaggacgacgacgaggccgaggacuucgucgaggugcaccuccccgacgugcacaagcaggucagcgggguggaccugggccugcccuccugggggaaguacgugcucaugagcgccggcguccugacggcccugaugcucaugaucuuccugaugaccugcugccggcgcgccaaccgggcggacuccgcccagcacagccugggcgagggggagcgcaagguguccgugaccagccagagcggccgcgucaucuccagcugggaguccuacaagagcgggggcgagaccaagcuguga

SEQ ID NO: 94652 - RNA, 1575 nt, Artificial Sequence
  derived and/or modified CDS sequence (opt1) from glycoprotein__RABV__AB563883.1
augaucccccaggcccugcuguucgugccguuccuggucuucagccugugcuucggcaaguuccccaucuacaccauccccgacaagcucgggcccugguccccgaucgacauccaccaccugagcugccccaacaaccuggugguggaggacgagggcugcaccaaccucuccggguucagcuacauggagcugaaggucggcuacaucuccgccaucaaggugaacggguucacgugcaccggcguggucaccgaggcggagaccuacacgaacuucgugggcuacgugaccaccaccuucaagcgcaagcacuuccggcccacgcccgacgccugccgcgccgccuacaacuggaagauggccggggacccgcgguacgaggagagccugcacaaccccuaccccgacuaccacuggcuccgcaccgucaagaccaccaaggagucccuggugaucaucagccccuccguggcggaccuggacccguacgacaagagccuccacucccgggucuuccccagcggcaagugcuccgggaucacggugagcuccaccuacugcagcaccaaccacgacuacaccaucuggaugcccgagaacccccgccugggcacguccugcgacaucuucaccaacagccgggggaagcgcgccuccaagggcagcaagaccugcggcuucguggacgagcgggggcuguacaagagccucaagggcgccugcaagcugaagcugugcgggguccucggccugcgccugauggacggcaccugggccgcgauccagacguccgacgagaccaaguggugcccgcccgaccagcucgugaaccugcacgacuuccggagcgacgagaucgagcaccugguggucgaggagcucgugaagaagcgcgaggagugccuggacgcccuggaguccaucaugaccaccaagagcguguccuuccggcgccucagccaccuccggaagcugguccccggguucggcaaggccuacacgaucuucaacaagacccucauggaggccgacgcccacuacaaguccgugcgcaccuggaacgagaucauccccagcaaggggugccugcgggugggcgggcgcugccacccgcacgucaacggcguguucuucaacggcaucauccuggggcccgacggccacguccucauccccgagaugcaguccagccugcugcagcagcacauggagcuccuggaguccagcgugaucccccugaugcacccgcucgcggaccccuccaccguguucaaggacgacgacgaggccgaggacuucgucgaggugcaccuccccgacgugcacaagcaggucagcgggguggaccugggccugcccuccugggggaaguacgugcugaugagcgccggcguccugacggcccucaugcugaccaucuuccugaugaccugcugccggcgcgccaaccgggcggaguccgcccagcacagccucggcgagcgcgggcgcaagguguccgugaccagccagagcggccgggucaucuccagcugggaguccuacaagagcgggggcgagacgaagcuguga

SEQ ID NO: 94653 - RNA, 1575 nt, Artificial Sequence
  derived and/or modified CDS sequence (opt1) from glycoprotein__RABV__AB563884.1
augaucccccaggcccugcuguucgugccgcugcuggucuucagccucugcuucggcaaguuccccaucuacaccauccccgacaagcuggggcccugguccccgaucgacauccaccaccugagcugccccaacaaccucgugguggaggacgagggcugcaccaaccuguccggguucagcuacauggagcugaaggucggcuacaucuccgccaucaaggugaacggguucacgugcaccggcguggucaccgaggcggagaccuacacgaacuucgugggcuacgugaccaccaccuucaagcgcaagcacuuccggcccacgcccgacgccugccgcgccgccuacaacuggaagauggccggggacccgcgguacgaggagagccuccacaaccccuaccccgacuaccacuggcugcgcaccgucaagaccaccaaggagucccuggugaucaucagccccuccguggcggaccucgacccguacgacaagagccugcacucccgggucuuccccagcggcaagugcuccgggaucacggugagcuccaccuacugcagcaccaaccacgacuacaccaucuggaugcccgagaacccccgccugggcacguccugcgacaucuucaccaacagccgggggaagcgcgccuccaagggcagcaagaccugcggcuucguggacgagcgggggcucuacaagagccugaagggcgccugcaagcugcgccucugcgggguccugggccugcggcucauggacggcaccugggccgcgauccagacguccgacgagaccaaguggugcccgcccgaccagcuggugaaccugcacgacuuccgcagcgacgagaucgagcaccucguggucgaggagcuggugaagaagcgggaggagugccuggacgcccucgaguccaucaugaccaccaagagcguguccuuccgccggcugagccaccuccgcaagcucguccccggguucggcaaggccuacacgaucuucaacaagacccugauggaggccgacgcccacuacaaguccgugcggaccuggaacgagaucauccccagcaaggggugccugcgcgugggcgggcggugccacccgcacgucaacggcguguucuucaacggcaucauccucgggcccgacggccacguccugauccccgagaugcaguccagccugcuccagcagcacauggagcugcuggaguccagcgugaucccccucaugcacccgcuggcggaccccuccaccguguucaaggacgacgacgaggccgaggacuucgucgaggugcaccuccccgacgugcacaagcaggucagcgggguggaccugggccugcccuccugggggaaguacgugcugaugagcgccggcguccucacggcccugaugcugaugaucuuccucaugaccugcugccgccgggccaaccgcgcggaguccgcccagcacagccugggcgagcgcgggcggaagguguccgugaccagccagagcggccgcgucaucuccagcugggaguccuacaagagcgggggcgagaccaagcuguga

SEQ ID NO: 94654 - RNA, 1575 nt, Artificial Sequence
  derived and/or modified CDS sequence (opt1) from glycoprotein__RABV__AB563886.1
augaucccccaggcccugcuguucgugccgcugcuggucuucagccucugcuucggcaaguuccccaucuacaccauccccgacaagcuggggcccugguccccgaucgacauccaccaccugagcugccccaacaaccucgugguggaggacgagggcugcaccaaccuguccggguucagcuacauggagcugaaggucggcuacaucuccgccaucaaggugaacggguucacgugcaccggcguggucaccgaggcggagaccuacacgaacuucgugggcuacgugaccaccaccuucaagcgcaagcacuuccggcccacgcccgacgccugccgcgccgccuacaacuggaagauggccggggacccgcgguacgaggagagccuccacaaccccuaccccgacuaccacuggcugcgcaccgucaagaccaccaaggagucccuggugaucaucagccccuccguggcggaccucgacccguacgacaagagccugcacucccgggucuuccccagcggcaagugcuccgggaucacggugagcuccaccuacugcagcaccaaccacgacuacaccaucuggaugcccgagaacccccgccugggcacguccugcgacaucuucaccaacagccgggggaagcgcgccuccaagggcagcaagaccugcggcuucguggacgagcgggggcucuacaagagccugaagggcgccugcaagcugaagcucugcgggguccugggccugcgccucauggacggcaccugggccgcgauccagacguccgacgagaccaaguggugcccgcccgaccagcuggugaaccugcacgacuuccggagcgacgagaucgagcaccucguggucgaggagcuggugaagaagcgcgaggagugccuggacgcccucgaguccaucaucaccaccaagagcguguccuuccggcgccugagccaccuccggaagcucguccccggguucggcaaggccuacacgaucuucaacaagacccugauggaggccgacgcccacuacaaguccgugcgcaccuggaacgagaucauccccagcaaggggugccugcgggugggcgggcgcugccacccgcacgucaacggcguguucuucaacggcaucauccucgggcccgacggccacguccugauccccgagaugcaguccagccugcuccagcagcacauggagcugcuggaguccagcgugaucccccucaugcacccgcuggcggaccccuccaccguguucaaggacgacgacgaggccgaggacuucgucgaggugcaccuccccgacgugcacaagcaggucagcgggguggaccugggccugcccuccugggggaaguacgugcugaugagcgccggcguccucacggcccugaugcugaugaucuuccucaugaccugcugccggcgcgccaaccggguggaguccgcgcagcacagccugggcgagcgcgggcgcaagguguccgucaccagccagagcggccgggugaucuccagcugggaguccuacaagagcgggggcgagaccaagcuguga

SEQ ID NO: 94655 - RNA, 1575 nt, Artificial Sequence; identical to SEQ ID NO: 94596
  derived and/or modified CDS sequence (opt1) from glycoprotein__RABV__AB563887.1

SEQ ID NO: 94656 - RNA, 1575 nt, Artificial Sequence; identical to SEQ ID NO: 94596
  derived and/or modified CDS sequence (opt1) from glycoprotein__RABV__AB563888.1

SEQ ID NO: 94657 - RNA, 1575 nt, Artificial Sequence
  derived and/or modified CDS sequence (opt1) from glycoprotein__RABV__AB563889.1
augaucccccaggcccugcuguucgugccgauccuggucuucagccugugcuucggcaaguuccccaucuacaccauccccgacaagcucgggcccugguccccgaucgacauccaccaccugagcugccccaacaaccuggugguggaggacgagggcugcaccaaccucuccggguucagcuacauggagcugaaggucggcuacaucuccgccaucaaggugaacggguucacgugcaccggcguggucaccgaggcggagaccuacacgaacuucgugggcuacgugaccaccaccuucaagcgcaagcacuuccggcccacgcccgacgccugccgcgccgccuacaacuggaagauggccggggacccgcgguacgaggagagccugcacaaccccuaccccgacuaccacuggcuccgcaccgucaagaccaccaaggagucccuggugaucaucagccccuccguggcggaccuggacccguacgacaagagccuccacucccgggucuuccccagcggcaagugcuccgggaucacggugagcuccaccuacugcagcaccaaccacgacuacaccaucuggaugcccgagaacccccgccugggcacguccugcgacaucuucaccaacagccgggggaagcgcgccuccaagggcagcaagaccugcggcuucguggacgagcgggggcuguacaagagccucaagggcgccugcaagcugaagcugugcgggguccucggccugcgccugauggacggcaccugggccgcgauccagacguccgacgagaccaaguggugcccgcccgaccagcucgugaaccugcacgacuuccggagcgacgagaucgagcaccugguggucgaggagcucgugaagaagcgcgaggagugccuggacgcccuggaguccaucaugaccaccaagagcguguccuuccggcgccucagccaccuccggaagcugguccccggguucggcaaggccuacacgaucuucaacaagacccucauggaggccgacgcccacuacaaguccgugcgcaccuggaacgagaucauccccagcaaggggugccugcgggugggcgggcgcugccacccgcacgucaacggcguguucuucaacggcaucauccuggggcccgacggccacguccucauccccgagaugcaguccagccugcugcagcagcacauggagcuccuggaguccagcgugaucccccugaugcacccgcucgcggaccccuccaccguguucaaggacgacgacgaggccgaggacuucgucgaggugcaccuccccgacgugcacaagcaggucagcgggguggaccugggccugcccuccugggggaaguacgugcugaugagcgccggcguccugacggcccucaugcugaugaucuuccugaugaccugcugccggcgcgccaaccggguggaguccgcgcagcacagccucggcgagcgcgggcgcaagguguccgucaccagccagagcggccgggugaucuccagcugggaguccuacaagagcgggggcgagaccaagcuguga

SEQ ID NO: 94658 - RNA, 1575 nt, Artificial Sequence
  derived and/or modified CDS sequence (opt1) from glycoprotein__RABV__AB563890.1
augaucccccaggcccugcuguucgugccgcugcuggucuucagccucugcuucggcaaguuccccaucuacaccauccccgacaagcuggggcccugguccccgaucgacauccaccaccugagcugccccaacaaccucgugguggaggacgagggcugcaccaaccuguccggguucagcuacauggagcugaaggucggcuacaucuccgccaucaaggugaacggguucacgugcaccggcguggucaccgaggcggagaccuacacgaacuucgugggcuacgugaccaccaccuucaagcgcaagcacuuccggcccaugcccgacgccugccgcgccgccuacaacuggaagauggccggggacccgcgguacgaggagagccuccacaaccccuaccccgacuaccacuggcugcgcacggucaagaccaccaaggagucccuggugaucaucagccccuccguggcggaccucgacccguacgacaagagccugcacucccgggucuuccccagcggcaagugcuccgggaucaccgugagcuccacguacugcagcaccaaccacgacuacaccaucuggaugcccgagaacccccgccugggcaccuccugcgacaucuucacgaacagccgggggaagcgcgccuccaagggcagcaagaccugcggcuucguggacgagcgggggcucuacaagagccugaagggcgccugcaagcugaagcucugcgggguccugggccugcgccucauggacggcaccugggccgcgauccagaccuccgacgagacgaaguggugcccgcccgaccagcuggugaaccugcacgacuuccggagcgacgagaucgagcaccucguggucgaggagcuggugaagaagcgcgaggagugccuggacgcccucgaguccaucaugaccaccaagagcguguccuuccggcgccugagccaccuccggaagcucguccccggguucggcaaggccuacaccaucuucaacaagacgcugauggaggccgacgcccacuacaaguccgugcgcaccuggaacgagaucauccccagcaaggggugccugcgggugggcgggcgcugccacccgcacgucaacggcguguucuucaacggcaucauccucgggcccgacggccacguccugauccccgagaugcaguccagccugcuccagcagcacauggagcugcuggaguccagcgugaucccccucaugcacccgcuggcggaccccuccaccguguucaaggacgacgacgaggccgaggacuucgucgaggugcaccuccccgacgugcacaagcaggucagcgggguggaccugggccugcccuccugggggaaguacgugcugaugagcgccggcguccucaccgugcugaugcugaugaucuucuucaugacgugcugccggcgcgccaaccggguggaguccgcccagcacagccucggcgagcgcgggcgcaaggucuccgugaccagccagagcggccgggugaucuccagcugggaguccuacaagagcgggggcgagaccaagcuguga

SEQ ID NO: 94659 - RNA, 1575 nt, Artificial Sequence
  derived and/or modified CDS sequence (opt1) from glycoprotein__RABV__AB563891.1
augaucccccaggcccugcuguucgugccgcugcuggucuucagccucugcuucggcaaguuccccaucuacaccauccccgacaagcuggggcccugguccccgaucgacauccaccaccugagcugccccaacaaccucgugguggaggacgagggcugcaccaaccuguccggguucagcuacauggagcugaaggucggcuacaucuccgccaucaaggugaacggguucacgugcaccggcguggucaccgaggcggagaccuacacgaacuucgugggcuacgugaccaccaccuucaagcgcaagcacuuccggcccaugcccgacgccugccgcgccgccuacaacuggaagauggccggggacccgcgguacgaggagagccuccacaaccccuaccccgacuaccacuggcugcgcacggucaagaccaccaaggagucccuggugaucaucagccccuccguggcggaccucgacccguacgacaagagccugcacucccgggucuuccccagcggcaagugcuccgggaucaccgugagcuccacguacugcagcaccaaccacgacuacaccaucuggaugcccgagaacccccgccugggcaccuccugcgacaucuucacgaacagccgggggaagcgcgccuccaagggcagcaagaccugcggcuucguggacgagcgggggcucuacaagagccugaagggcgccugcaagcugaagcucugcgggguccugggccugcgccucauggacggcaccugggccgcgauccagaccuccgacgagacgaaguggugcccgcccgaccagcuggugaaccugcacgacuuccggagcgacgagaucgagcaccucguggucgaggagcuggugaagaagcgcgaggagugccuggacgcccucgaguccaucaugaccaccaagagcguguccuuccggcgccugagccaccuccggaagcucguccccggguucggcaaggccuacaccaucuucaacaagacgcugauggaggccgacgcccacuacaaguccgugcgcaccuggaacgagaucauccccagcaaggggugccugcgggugggcgggcgcugccacccgcacgucaacggcguguucuucaacggcaucauccucgggcccgacggccggguccugauccccgagaugcaguccagccugcuccagcagcacauggagcugcuggaguccagcgugaucccccucaugcacccgcuggcggaccccuccaccguguucaaggacgacgacgaggccgaggacuucgucgaggugcaccuccccgacgugcacaagcaggucagcgggguggaccugggccugcccuccugggggaaguacgugcugaugagcgccggcguccucaccgugcugaugcugaugaucuucuucaugacgugcugccgccgggccaaccgcguggaguccgcccagcacagccucggcgagcgcgggcggaaggucuccgugaccagccagagcggccgcgugaucuccagcugggaguccuacaagagcgggggcgagaccaagcuguga

SEQ ID NO: 94660 - RNA, 1575 nt, Artificial Sequence
  derived and/or modified CDS sequence (opt1) from glycoprotein__RABV__AB563892.1
augaucccccaggcccugcuguucgugccgcugcuggucuucagccucugcuucggcaaguuccccaucuacaccauccccgacaagcuggggcccugguccccgaucgacauccaccaccugagcugccccaacaaccucgugguggaggacgagggcugcaccaaccuguccggguucagcuacauggagcugaaggucggcuacaucuccgccaucaaggugaacggguucacgugcaccggcguggucaccgaggcggagaccuacacgaacuucgugggcuacgugaccaccaccuucaagcgcaagcacuuccggcccacgcccgacgccugccgcgccgccuacaacuggaagauggccggggacccgcgguacgaggagagccuccacaaccccuaccccgacuaccacuggcugcgcaccgucaagaccaccaaggagucccuggugaucaucagccccuccguggcggaccucgacccguacgacaagagccugcacucccgggucuuccccagcggcaagugcuccgggaucacggugagcuccaccuacugcagcaccaaccacgacuacaccaucuggaugcccgagaacccccgccugggcacguccugcgacaucuucaccaacagccgggggaagcgcgccuccaagggcagcaagaccugcggcuucguggacgagcgggggcucuacaagagccugaagggcgccugcaagcugaagcucugcgggguccugggccugcgccucauggacggcaccugggccgcgauccagacguccgacgagaccaaguggugcccgcccgaccagcuggugaaccugcacgacuuccggagcgacgagaucgagcaccucguggucgaggagcuggugaagaagcgcgaggagugccuggacgcccucgaguccaucaugaccaccaagagcguguccuuccggcgccugagccaccuccggaagcucguccccggguucggcaaggccuacacgaucuucaacaagacccugauggaggccgacgcccacuacaaguccgugcgcaccuggaacgagaucauccccagcaaggggugccugcgggugggcgggcgcugccacccgcacgucaacggcguguucuucaacggcaucauccucgggcccgacggccacguccugauccccgagaugcaguccagccugcuccagcagcacauggagcugcuggaguccagcgugaucccccucaugcacccgcuggcggaccccuccaccguguucaaggacgacgacgaggccgaggacuucgucgaggugcaccuccccgacgugcacaagcaggucagcgggguggaccugggccugcccuccugggggaaguacgugcugaugagcgccggcguccucacggugcugaugcugaugaucuucuucaugaccugcugccggcgcgccaaccggguggaguccgcccagcacagccucggcgagcgcgggcgcaaggucuccgugaccagccagagcggccgggugaucuccagcugggaguccuacaagagcgggggcgagaccaagcuguga

SEQ ID NO: 94661 - RNA, 1575 nt, Artificial Sequence; identical to SEQ ID NO: 94658
  derived and/or modified CDS sequence (opt1) from glycoprotein__RABV__AB563893.1

SEQ ID NO: 94662 - RNA, 1575 nt, Artificial Sequence; identical to SEQ ID NO: 94658
  derived and/or modified CDS sequence (opt1) from glycoprotein__RABV__AB563894.1

SEQ ID NO: 94663 - RNA, 1575 nt, Artificial Sequence
  derived and/or modified CDS sequence (opt1) from glycoprotein__RABV__AB563900.1
augaucccccaggcccugauguucgugccgcuccuggucuucagccugugcuucggcaaguuccccaucuacaccauccccgacaagcucgggcccugguccccgaucgacauccaccaccugagcugccccaacaaccuggugguggaggacgagggcugcaccaaccucuccggguucagcuacauggagcugaaggucggcuacaucuccgccaucaaggugaacggguucacgugcaccggcguggucaccgaggcggagaccuacacgaacuucgugggcuacgugaccaccaccuucaagcgcaagcacuuccggcccaugcccgacgccugccgcgccgccuacaacuggaagauggccggggacccgcgguacgaggagagccugcacaaccccuaccccgacuaccacuggcuccgcacggucaagaccaccaaggagucccuggugaucaucagccccuccguggcggaccuggacccguacgacaagagccuccacucccgggucuuccccagcggcaagugcuccgggaugaccgugagcuccacguacugcagcaccaaccacgacuacaccaucuggaugcccgagaacccccgccugggcaccuccugcgacaucuucacgaacagccgggggaagcgcgccuccaagggcagcaagaccugcggcuucguggacgagcgggggcuguacaagagccucaagggcgccugcaagcugaagcugugcgggguccucggccugcgccugauggacggcaccugggccgcgauccagaccuccgacgagacgaaguggugcccgcccgaccagcucgugaaccugcacgacuuccggagcgacgagaucgagcaccugguggucgaggagcucgugaagaagcgcgaggagugccuggacgcccuggaguccaucaugaccaccaagagcguguccuuccggcgccucagccaccuccggaagcugguccccggguucggcaaggccuacaccaucuucaacaagacgcugauggaggccgacgcccacuacaaguccgugcgcaccuggaacgagaucauccccagcaaggggugccugcgggugggcgggcgcugccacccgcacgucaacggcguguucuucaacggcaucauccuggggcccgacggccacguccucauccccgagaugcaguccagccugcugcagcagcacauggagcuccuggaguccagcgugaucccccugaugcacccgcucgcggaccccuccaccguguucaagggggacgacgaggccgaggacuucgucgaggugcaccuccccgacgugcacaagcaggucagcggcguggaccuggggcugcccuccuggggcaaguacgugcugaugagcgccggcguccugaccgcccucaugcugaugaucuuccugaugacgugcugcaagcgggccaaccgcgcggaguccgcccaccacagccucggggagcggggccgcaagguguccgugaccagccagagcgggcgcgucaucuccagcugggaguccuacaagagcggcggggagaccaagcuguga

SEQ ID NO: 94664 - RNA, 1575 nt, Artificial Sequence
  derived and/or modified CDS sequence (opt1) from glycoprotein__RABV__AB563901.1
augaucccccaggcccugcuguucgugccgcugcuggucuucagccucugcuucggcaaguuccccaucuacaccauccccgacaagcuggggcccugguccccgaucgacauccaccaccugagcugccccaacaaccucgugguggaggacgagggcugcaccaaccuguccggguucagcuacauggagcugaaggucggcuacaucuccgccaucaaggugaacggguucacgugcaccggcguggucaccgaggcggagaccuacacgaacuucgugggcuacgugaccaccaccuucaagcgcaagcacuuccggcccacgcccgacgccugccgcgccgccuacaacuggaagauggccggggacccgcgguacgaggagagccuccacaaccccuaccccgacuaccacuggcugcgcaccgucaagaccaccaaggagucccuggugaucaucagccccuccguggcggaccucgacccguacgacaagagccugcacucccgggucuuccccagcggcaagugcuccgggaucacggugagcuccaccuacugcagcaccaaccacgacuacaccaucuggaugcccgagaacccccgccugggcacguccugcgacaucuucaccaacagccgggggaagcgcgccuccaagggcagcaagaccugcggcuucguggacgagcgggggcucuacaagagccugaagggcgccugcaagcugaagcucugcgggguccugggccugcgccucauggacggcaccugggccgcgauccagacguccgacgagaccaaguggugcccgcccgaccagcuggugaaccugcacgacuuccggagcgacgagaucgagcaccucguggucgaggagcuggugaagaagcgcgaggagugccuggacgcccucgaguccaucaugaccaccaagagcguguccuuccggcgccugagccaccuccggaagcucguccccggguucggcaaggccuacacgaucuucaacaagacccugauggaggccgacgcccacuacaaguccgugcgcaccuggaacgagaucauccccagcaaggggugccugcgggugggcgggcgcugccacccgcacgucaacggcguguucuucaacggcaucauccucgggcccgacggccacguccugauccccgagaugcaguccagccugcuccagcagcacauggagcugcuggaguccagcgugaucccccucaugcacccgcuggcggaccccuccaccguguucaaggacgacgacgaggccgaggacuucgucgaggugcaccuccccgacgugcacaagcaggucagcgggguggaccugggccugcccuccugggggaaguacgugcugaugagcgccggcguccucacggcccugaugcugaccaucuuccucaugaccugcugccggcgcgccaaccgggcggaguccgcccagcacagccugggcgagcgcgggcgcaagguguccgugaccccgcagagcggccgggucaucagcuccugggagagcuacaaguccgggggcgagacgaagcuguga

SEQ ID NO: 94665 - RNA, 1575 nt, Artificial Sequence; identical to SEQ ID NO: 94596
  derived and/or modified CDS sequence (opt1) from glycoprotein__RABV__AB563904.1

SEQ ID NO: 94666 - RNA, 1575 nt, Artificial Sequence; identical to SEQ ID NO: 94640
  derived and/or modified CDS sequence (opt1) from glycoprotein__RABV__AB563907.1

SEQ ID NO: 94667 - RNA, 1575 nt, Artificial Sequence; identical to SEQ ID NO: 94658
  derived and/or modified CDS sequence (opt1) from glycoprotein__RABV__AB563911.1

SEQ ID NO: 94668 - RNA, 1575 nt, Artificial Sequence
  derived and/or modified CDS sequence (opt1) from glycoprotein__RABV__AB563912.1
augaucccccaggcccugcuguucgugccgcugcuggucuucagccucugcuucggcaaguuccccaucuacaccauccccgacaagcuggggcccugguccccgaucgacauccaccaccugagcugccccaacaaccucgugguggaggacgagggcugcaccaaccuguccggguucagcuacauggagcugaaggucggcuacaucuccgccaucaaggugaacggguucacgugcaccggcguggucaccgaggcggagaccuacacgaacuucgugggcuacgugaccaccaccuucaagcgcaagcacuuccggcccaugcccgacgccugccgcgccgccuacaacuggaagauggccggggacccgcgguacgaggagagccuccacaaccccuaccccgacuaccacuggcugcgcacggucaagaccaccaaggagucccuggugaucaucagccccuccguggcggaccucgacccguacgacaagagccugcacucccgggucuuccccagcggcaagugcuccgggaucaccgugagcuccacguacugcagcaccaaccacgacuacaccaucuggaugcccgagaacccccgccugggcaccuccugcgacaucuucacgaacagccgggggaagcgcgccuccaagggcagcaagaccugcggcuucguggacgagcgggggcucuacaagagccugaagggcgccugcaagcugaagcucugcgggguccugggccugcgccucauggacggcaccugggccgcgauccagaccuccgacgagacgaaguggugcccgcccgaccagcuggugaaccugcacgacuuccggagcgacgagaucgagcaccucguggucgaggagcuggugaagaagcgcgaggagugccuggacgcccucgaguccaucaugaccaccaagagcguguccuuccggcgccugagccaccuccggaagcucguccccggguucggcaaggccuacaccaucuucaacaagacgcugauggaggccgacgcccacuacaaguccgugcgcaccuggaacgagaucauccccagcaaggggugccugcgggugggcgggcgcugccacccgcacgucaacggcguguucuucaacggcaucauccucgggcccgacggccacguccugauccccgagaugcaguccagccugcuccagcagcacauggagcugcuggaguccagcgugaucccccucaugcacccgcuggcggaccccuccaccguguucaaggacgacgacgaggccgaggacuucgucgaggugcaccuccccgacgugcacaagcaggucagcgggguggaccugggccugcccuccugggggaaguacgugcugaugagcaccggcguccucacggugcugaugcugaugaucuucuucaugaugugcugccggcgcgccaaccggguggaguccgcccagcacagccucggcgagcgcgggcgcaaggucuccgugaccagccagagcggccgggugaucuccagcugggaguccuacaagagcgggggcgagaccaagcuguga

SEQ ID NO: 94669 - RNA, 1575 nt, Artificial Sequence; identical to SEQ ID NO: 94658
  derived and/or modified CDS sequence (opt1) from glycoprotein__RABV__AB563913.1

SEQ ID NO: 94670 - RNA, 1575 nt, Artificial Sequence
  derived and/or modified CDS sequence (opt1) from glycoprotein__RABV__AB563914.1
augaucccccaggcccugcuguucgugccgcugcuggucuucagccucugcuucggcaaguuccccaucuacaccauccccgacaagcuggggcccugguccccgaucgacauccaccaccugagcugccccaacaaccucgugguggaggacgagggcugcaccaaccuguccggguucagcuacauggagcugaaggucggcuacaucuccgccaucaaggugaacggguucacgugcaccggcguggucaccgaggcggagaccuacacgaacuucgugggcuacgugaccaccaccuucaagcgcaagcacuuccggcccaugcccgacgccugccgcgccgccuacaacuggaagauggccggggacccgcgguacgaggagagccuccacaaccccuaccccgacuaccacuggcugcgcacggucaagaccaccaaggagucccuggugaucaucagccccuccguggcggaccucgacccguacgacaagagccugcacucccgggucuuccccagcggcaagugcuccgggaucaccgugagcuccacguacugcagcaccaaccacgacuacaccaucuggaugcccgagaacccccgccugggcaccuccugcgacaucuucacgaacagccgggggaagcgcgccuccaagggcagcaagaccugcggcuucguggacgagcgggggcucuacaagagccugaagggcgccugcaagcugaagcucugcgggguccugggccugcgccucauggacggcaccugggccgcgauccagaccuccgacgagacgaaguggugcccgcccgaccagcuggugaaccugcacgacuuccggagcgacgagaucgagcaccucguggucgaggagcuggugaagaagcgcgaggagugccuggacgcccucgaguccaucaugaccaccaagagcguguccuuccggcgccugagccaccuccggaagcucguccccggguucggcaaggccuacaccaucuucaacaagacgcugauggaggccgacgcccacuacaaguccgugcgcaccuggaacgagaucauccccagcaaggggugccugcgggugggcgggcgcugccacccgcacgucaacggcguguucuucaacggcaucauccucgggcccgacggccacguccugauccccgagaugcaguccuaccugcuccagcagcacauggagcugcuggagagcuccgugaucccccucaugcacccgcuggcggaccccagcaccguguucaaggacgacgacgaggccgaggacuucgucgaggugcaccuccccgacgugcacaagcaggucuccgggguggaccugggccugcccagcugggggaaguacgugcugauguccgccggcguccucaccgugcugaugcugaugaucuucuucaugacgugcugccggcgcgccaaccggguggagagcgcccagcacucccucggcgagcgcgggcgcaaggucagcgugaccucccagagcggccgggugaucagcuccugggagagcuacaaguccgggggcgagacccgccuguga

SEQ ID NO: 94671 - RNA, 1575 nt, Artificial Sequence; identical to SEQ ID NO: 94658
  derived and/or modified CDS sequence (opt1) from glycoprotein__RABV__AB563915.1

SEQ ID NO: 94672 - RNA, 1575 nt, Artificial Sequence; identical to SEQ ID NO: 94625
  derived and/or modified CDS sequence (opt1) from glycoprotein__RABV__AB563921.1

SEQ ID NO: 94673 - RNA, 1575 nt, Artificial Sequence
  derived and/or modified CDS sequence (opt1) from glycoprotein__RABV__AB563922.1
augaacccccaggcccugauguucgugccgcuccuggucuucagccugugcuucggcaaguuccccaucuacaccauccccgacaagcucgggcccugguccccgaucgacauccaccaccugagcugccccaacaaccuggugguggaggacgagggcugcaccaaccucuccggguucagcuacauggagcugaaggucggcuacaucuccgccaucaaggugaacggguucacgugcaccggcguggucaccgaggcggagaccuacacgaacuucgugggcuacgugaccaccaccuucaagcgcaagcacuuccggcccacgcccgacgccugccgcgccagcuacaacuggaagauggccggggacccgcgguacgaggagucccugcacaaccccuaccccgacuaccacuggcuccgcaccgucaagaccaccaaggagagccuggugaucaucucccccagcguggccgaccuggacccguacgacaagucccuccacagccgggucuuccccuccggcaagugcagcgggaucacgguguccagcaccuacugcuccaccaaccacgacuacaccaucuggaugcccgagaacccccgccugggcacgagcugcgacaucuucaccaacucccgggggaagcgcgcgagcaagggcagcaagaccugcggcuucguggacgagcgggggcuguacaagucccucaagggcgccugcaagcugaagcugugcgggguccucggccugcgccugauggacggcaccugggccgccauccagacgagcgacgagaccaaguggugcccgcccgaccagcucgugaaccugcacgacuuccgguccgacgagaucgagcaccugguggucgaggagcucgugaagaagcgcgaggagugccuggacgcgcuggagagcaucaugaccaccaaguccgugagcuuccggcgccucucccaccuccggaagcugguccccggguucggcaaggccuacacgaucuucaacaagacccugauggaggccgacgcccacuacaagagcgugcgcaccuggaacgagaucauccccuccaaggggugccugcgggugggcgggcgcugccacccgcacgucaacggcguguucuucaacggcaucauccuggggcccgacggccacguccucauccccgagaugcagagcucccugcugcagcagcacauggagcuccuggagagcuccgugaucccccugaugcacccgcucgccgaccccagcaccguguucaaggacgacgacgaggcggaggacuucgucgaggugcaccuccccgacgugcacaagcaggucuccgggguggaccugggccugcccagcugggggaaguacgugcugauguccgccggcguccugacggcccucaugcugaugaucuuccugaugaccugcugccggcgcgccaaccgggccgagagcgcgcagcacucccucggcgagcgcgggcgcaaggugagcgugaccagccaguccggccgggucaucagcuccugggagagcuacaaguccgggggcgagaccaagcuguga

SEQ ID NO: 94674 - RNA, 1575 nt, Artificial Sequence
  derived and/or modified CDS sequence (opt1) from glycoprotein__RABV__AB563923.1
augaucccccaggcccugauguucgugccgcuccuggucuucagccugugcuucggcaaguuccccaucuacaccauccccgacaagcucgggcccugguccccgaucgacauccaccaccugagcugccccaacaaccuggugguggaggacgagggcugcaccaaccucuccggguucagcuacauggagcugaaggucggcuacaucuccgccaucaaggugaacggguucacgugcaccggcguggucaccgaggcggagaccuacacgaacuucgugggcuacgugaccaccaccuucaagcgcaagcacuuccggcccacgcccgacgccugccgcgccgccuacaacuggaagauggccggggacccgcgguacgaggagagccugcacaaccccuaccccgacuaccacuggcuccgcaccgucaagaccaccaaggagucccuggugaucaucagccccuccguggcggaccuggacccguacgacaagagccuccacucccgggucuuccccagcggcaagugcuccgggaucacggugagcuccaccuacugcagcaccaaccacgacuacaccaucuggaugcccgagaacccccgccugggcacguccugcgacaucuucaccaacagccgggggaagcgcgccuccaagggcagcaagaccugcggcuucguggacgagcgggggcuguacaagagccucaagggcgccugcaagcugaagcugugcgggguccucggccugcgccugauggacggcaccugggccgcgauccagacguccgacgagaccaaguggugcccgcccgaccagcucgugaaccugcacgacuuccggagcgacgagaucgagcaccugguggucgaggagcucgugcgcaagcgggaggagugccuggacgcccuggaguccaucaugaccaccaagagcguguccuuccgccggcucagccaccuccgcaagcugguccccggguucggcaaggccuacacgaucuucaacaagacccugauggaggccgacgcccacuacaaguccgugcggaccuggaacgagaucauccccagcaaggggugccugcgcgugggcgggcggugccacccgcacgucaacggcguguucuucaacggcaucauccuggggcccgacggccacguccucauccccgagaugcaguccagccugcugcagcagcacauggagcuccuggaguccagcgugaucccccugaugcacccgcucgcggaccccuccaccguguucaaggacgacgacgaggccgaggacuucgucgaggugcaccuccccgacgugcacaagcaggucagcgggguggaccugggccugcccuccugggggaaguacgugcugaugagcgccggcguccugacggcccucaugcugaugaucuuccugaugaccugcugccgccgggccaaccgcgcggaguccgcccagcacagccucggcgagcgcgggcggaagguguccgugaccagccagagcggccgcgucaucuccagcugggaguccuacaagagcgggggcgagaccaagcuguga

SEQ ID NO: 94675 - RNA, 1575 nt, Artificial Sequence
  derived and/or modified CDS sequence (opt1) from glycoprotein__RABV__AB563926.1
augaucccccaggcccugcuguucgugccgcugcuggucuucagccucugcuucggcaaguuccccaucuacaccauccccgacaagcuggggcccugguccccgaucgacauccaccaccugagcugccccaacaaccucgugguggaggacgagggcugcaccaaccuguccggguucagcuacauggagcugaaggucggcuacaucuccgccaucaaggugaacggguucacgugcaccggcguggucaccgaggcggagaccuacacgaacuucgugggcuacgugaccaccaccuucaagcgcaagcacuuccggcccacgcccgacgccugccgcgccgccuacaacuggaagauggccggggacccgcgguacgaggagagccuccacaaccccuaccccgacuaccacuggcugcgcaccgucaagaccaccaaggagucccuggugaucaucagccccuccguggcggaccucgacccguacgacaagagccugcacucccgggucuuccccagcggcaagugcuccgggaucacggugagcuccaccuacugcagcaccaaccacgacuacaccaucuggaugcccgagaacccccgccugggcacguccugcgacaucuucaccaacagccgggggaagcgcgccuccaagggcagcaagaccugcggcuucguggacgagcgggggcucuacaagagccugaagggcgccugcaagcugaagcucugcgggguccugggccugcgccucauggacggcaccugggccgcgauccagacguccgacgagaccaaguggugcccgcccgaccagcuggugaaccugcacgacuuccggagcgacgagaucgagcaccucguggucgaggagcuggugaagaagcgcgaggagugccuggacgcccucgaguccaucaugaccaccaagagcguguccuuccggcgccugagccaccuccggaagcucguccccggguucggcaaggccuacacgaucuucaacaagacccugauggaggccgacgcccacuacaaguccgugcgcaccuggaacgagaucauccccagcaaggggugccugcgggugggcgggcgcugccacccgcacgucaacggcguguucuucaacggcaucauccucgggcccgacggccacguccugauccccgagaugcaguccagccugcuccagcagcacauggagcugcuggaguccagcgugaucccccucaugcacccgcuggcggaccccuccaccguguucaaggacgacgacgaggccgaggacuucgucgaggugcaccuccccgacgugcacaagcaggucagcgggguggaccugggccugcccuccugggggaaguacgugcugaugagcgccggcguccucacggcccugaugcugaugaucuuccucaugaccugcugccggcgcgccaaccgggcggaguccgcccagcacagccugggcgagggggagcgcaagguguccgugaccagccagagcggccgcgucaucuccagcugggaguccuacaagagcgggggcgagaccaagcuguga

SEQ ID NO: 94676 - RNA, 1575 nt, Artificial Sequence; identical to SEQ ID NO: 94626
  derived and/or modified CDS sequence (opt1) from glycoprotein__RABV__AB563927.1

SEQ ID NO: 94677 - RNA, 1575 nt, Artificial Sequence; identical to SEQ ID NO: 94622
  derived and/or modified CDS sequence (opt1) from glycoprotein__RABV__AB563928.1

SEQ ID NO: 94678 - RNA, 1575 nt, Artificial Sequence
  derived and/or modified CDS sequence (opt1) from glycoprotein__RABV__AB563929.1
augaucccccaggcccugcuguucgugccgcugcuggucuucagccucugcuucggcaaguuccccaucuacaccauccccgacaagcuggggcccugguccccgaucgacauccaccaccugagcugccccaacaaccucgugguggaggacgagggcugcaccaaccuguccggguucagcuacauggagcugaaggucggcuacaucuccgccaucaaggugaacggguucacgugcaccggcguggucaccgaggcggagaccuacacgaacuucgugggcuacgugaccaccaccuucaagcgcaagcacuuccggcccacgcccgacgccugccgcgccgccuacaacuggaagauggccggggacccgcgguacgaggagagccuccacaaccccuaccccgacuaccacuggcugcgcaccgucaagaccaccaaggagucccuggugaucaucagccccuccguggcggaccucgacccguacgacaagagccugcacucccgggucuuccccagcggcaagugcuccgggaucacggugagcuccaccuacugcagcaccaaccacgacuacaccaucuggaugcccgagaacccccgccugggcacguccugcgacaucuucaccaacagccgggggaagcgcgccuccaagggcagcaagaccugcggcuucguggacgagcgggggcucuacaagagccugaagggcgccugcaagcugaagcucugcgggguccugggccugcgccucaucgacggcaccugggccgcgauccagacguccgacgagaccaaguggugcccgcccgaccagcuggugaaccugcacgacuuccggagcgacgagaucgagcaccucguggucgaggagcuggugaagaagcgcgaggagugccuggacgcccucgaguccaucaugaccaccaagagcguguccuuccggcgccugagccaccuccggaagcucguccccggguucggcaaggccuacacgaucuucaacaagacccugauggaggccgacgcccacuacaaguccgugcgcaccuggaacgagaucauccccagcaaggggugccugcgggugggcgggcgcugccacccgcacgucaacggcguguucuucaacggcaucauccucgggcccgacggccacguccugauccccgagaugcaguccagccugcuccagcagcacauggagcugcuggaguccagcgugaucccccucaugcacccgcuggcggaccccuccaccguguucaaggacgacgacgaggccgaggacuucgucgaggugcaccuccccgacgugcacaagcaggucagcgggguggaccugggccugcccuccugggggaaguacgugcugaugagcgccggcguccucacggcccugaugcugaugaucuuccucacgaccugcugccggcgcgccaaccgggcggaguccgcccagcacagccugggcgagcgcgggcgcaagguguccgugaccagccagagcggccgggucaucuccagcugggaguccuacaagagcgggggcgagaccaagcuguga

SEQ ID NO: 94679 - RNA, 1575 nt, Artificial Sequence; identical to SEQ ID NO: 94628
  derived and/or modified CDS sequence (opt1) from glycoprotein__RABV__AB563930.1

SEQ ID NO: 94680 - RNA, 1575 nt, Artificial Sequence; identical to SEQ ID NO: 94622
  derived and/or modified CDS sequence (opt1) from glycoprotein__RABV__AB563931.1

SEQ ID NO: 94681 - RNA, 1575 nt, Artificial Sequence; identical to SEQ ID NO: 94657
  derived and/or modified CDS sequence (opt1) from glycoprotein__RABV__AB563933.2

SEQ ID NO: 94682 - RNA, 1575 nt, Artificial Sequence; identical to SEQ ID NO: 94596
  derived and/or modified CDS sequence (opt1) from glycoprotein__RABV__AB563934.1

SEQ ID NO: 94683 - RNA, 1575 nt, Artificial Sequence; identical to SEQ ID NO: 94628
  derived and/or modified CDS sequence (opt1) from glycoprotein__RABV__AB563937.1

SEQ ID NO: 94684 - RNA, 1575 nt, Artificial Sequence
  derived and/or modified CDS sequence (opt1) from glycoprotein__RABV__AB563938.1
augaucccccaggcccugcuguucgugccgcugcuggucuucagccucugcuucggcaaguuccccaucuacaccauccccgacaagcuggggcccugguccccgaucgacauccaccaccugagcugccccaacaaccucgugguggaggacgagggcugcaccaaccuguccggguucagcuacauggagcugaaggucggcuacaucuccgccaucaaggugaacggguucacgugcaccggcguggucaccgaggcggagaccuacacgaacuucgugggcuacgugaccaccaccuucaagcgcaagcacuuccggcccacgcccgacgccugccgcgccgccuacaacuggaagauggccggggacccgcgguacgaggagagccuccacaaccccuaccccgacuaccacuggcugcgcaccgucaagaccaccaaggagucccuggugaucaucagccccuccguggcggaccucgacccguacgacaagagccugcacucccgggucuuccccagcggcaagugcuccgggaucacggugagcuccaccuacugcagcaccaaccacgacuacaccaucuggaugcccgagaacccccgccugggcacguccugcgacaucuucaccaacagccgggggaagcgcgccuccaagggcagcaagaccugcggcuucguggacgagcgggggcucuacaagagccugaagggcgccugcaagcugaagcucugcgggguccugggccugcgccucauggacggcaccugggccgcgauccagacguccgacgagaccaaguggugcccgcccgaccagcuggugaaccugcacgacuuccggagcgacgagaucgagcaccucguggucgaggagcuggugaagaagcgcgaggagugccuggacgcccucgaguccaucaugaccaccaagagcguguccuuccggcgccugagccaccuccggaagcucguccccggguucggcaaggccuacacgaucuucaacaagacccugauggaggccgacgcccacuacaaguccgugcgcaccuggaacgagaucauccccagcaaggggugccugcgggugggcgggcgcugccacccgcacgucaacggcguguucuucaacggcaucauccucgggcccgacggccacguccugauccccgagaugcaguccagccugcuccagcagcacauggagcugcuggaguccagcgugaucccccucaugcacccgcuggcggaccccuccaccguguucaaggacgacgacgaggccgaggacuucgucgaggugcaccuccccgacgugcacaagcaggucagcgggguggaccugggccugcccuccugggggaaguacgugcugaugagcgccggcguccucacggcccugaugcugaugaucuuccucaugaccugcugcauccgggccaaccgcgcggaguccgcccagcacagccugggcgagcgggggcgcaagguguccgugaccagccagagcggccgcgucaucuccagcugggaguccuacaagagcgggggcgagaccaagcuguga

SEQ ID NO: 94685 - RNA, 1575 nt, Artificial Sequence; identical to SEQ ID NO: 94628
  derived and/or modified CDS sequence (opt1) from glycoprotein__RABV__AB563939.1

SEQ ID NO: 94686 - RNA, 1575 nt, Artificial Sequence
  derived and/or modified CDS sequence (opt1) from glycoprotein__RABV__AB563942.1
augaucccccaggcccugcuguucgugccgcugcuggucuucagccucugcuucggcaaguuccccaucuacaccauccccgacaagcuggggcccugguccccgaucgacauccaccaccugagcugccccaacaaccucgugguggaggacgagggcugcaccaaccuguccggguucagcuacauggagcugaaggucggcuacaucuccgccaucaaggugaacggguucacgugcaccggcguggucaccgaggcggagaccuacacgaacuucgugggcuacgugaccaccaccuucaagcgcaagcacuuccggcccacgcccgacgccugccgcgccgccuacaacuggaagauggccggggacccgcgguacgaggagagccuccacaaccccuaccccgacuaccacuggcugcgcaccgucaagaccaccaaggagucccuggugaucaucagccccuccguggcggaccucgacccguacgacaagagccugcacucccgggucuuccccagcggcaagugcuccgggaucacggugagcuccaccuacugcagcaccaaccacgacuacaccaucuggaugcccgagaacccccgccugggcacguccugcgacaucuucaccaacagccgggggaagcgcgccuccaagggcagcaagaccugcggcuucguggacgagcgggggcucuacaagagccugaagggcgccugcaagcugaagcucugcgggguccugggccugcgccucauggacggcaccugggccgcgauccagacguccgacgagaccaaguggugcccgcccgaccagcuggugaaccugcacgacuuccggagcgacgagaucgagcaccucguggucgaggagcuggugaagaagcgcgaggagugccuggacgcccucgaguccaucaugaccaccaagagcguguccuuccggcgccugagccaccuccggaagcucguccccggguucggcaaggccuacacgaucuucaacaagacccugauggaggccgacgcccacuacaaguccgugcgcaccuggaacgagaucauccccagcaaggggugccugcgggugggcgggcgcugccacccgcacgucaacggcguguucuucaacggcaucauccucgggcccgacggccacguccugauccccgagaugcaguccagccugcuccagcagcacauggagcugcuggaguccagcaucaucccccucaugcacccgcuggcggaccccuccaccguguucaaggacgacgacgaggccgaggacuucguggagguccaccuccccgacgugcacaagcaggucagcgggguggaccugggccugcccuccugggggaaguacgugcugaugagcgccggcgugcucacggcccugaugcugaugaucuuccucaugaccugcugccggcgcaccaaccgggccgaguccgcgcagcacagccugggcgagcgcgggcgcaaggucuccgugaccagccagagcggccgggugaucuccagcugggaguccuacaagagcgggggcgagacgaagcuguga

SEQ ID NO: 94687 - RNA, 1575 nt, Artificial Sequence
  derived and/or modified CDS sequence (opt1) from glycoprotein__RABV__AB563945.1
augaucccccaggcccugcuguucgugccgcugcuggucuucagccucugcuucggcaaguuccccaucuacaccauccccgacaagcuggggcccugguccccgaucgacauccaccaccugagcugccccaacaaccucgugguggaggacgagggcugcaccaaccuguccggguucagcuacauggagcugaaggucggcuacaucuccgccaucaaggugaacggguucacgugcaccggcguggucaccgaggcggagaccuacacgaacuucgugggcuacgugaccaccaccuucaagcgcaagcacuuccggcccacgcccgacgccugccgcgccgccuacaacuggaagauggccggggacccgcgguacgaggagagccuccacaaccccuaccccgacuaccacuggcugcgcaccgucaagaccaccaaggagucccuggugaucaucagccccuccguggcggaccucgacccguacgacaagagccugcacucccgggucuuccccagcggcaagugcuccgggaucacggugagcuccaccuacugcagcaccaaccacgacuacaccaucuggaugcccgagaacccccgccugggcacguccugcgacaucuucaccaacagccgggggaagcgcgccuccaagggcagcaagaccugcggcuucguggacgagcgggggcucuacaagagccugaagggcgccugcaagcugaagcucugcgggguccugggccugcgccucauggacggcaccugggccgcgauccagacguccgacgagaccaaguggugcccgcccgaccagcuggugaaccugcacgacuuccggagcgacgagaucgagcaccucguggucgaggagcuggugaagaagcgcgaggagugccuggacgcccucgaguccaucaugaccaccaagagcguguccuuccggcgccugagccaccuccggaagcucguccccggguucggcaaggccuacacgaucuucaacaagacccugauggaggccgacgcccacuacaaguccgugcgcaccuggaacgagaucauccccagcaaggggugccugcgggugggcgggcgcugccacccgcacgucaacggcguguucuucaacggcaucauccucgggcccgacggccacguccugauccccgagaugcaguccagccugcuccagcagcacauggagcugcuggaguccagcgugaucccccucaugcacccgcuggcggaccccuccaccguguucaaggacgacgacgaggccgaggacuucgucgaggugcaccuccccgacgugcacaagcaggucagcgggguggaccugggccugcccuccugggggaaguacgugcugaugagcgccggcguccucacggcccugaugcugaugaucuuccucaugaccugcugccggggcaccaaccgcgccgaguccgcgcagcacagccugggggagcggggccgcaagguguccgugaccagccagaacgggcgcgucaucagcuccugggagagcuacaaguccggcggggagacgaagcuguga

SEQ ID NO: 94688 - RNA, 1575 nt, Artificial Sequence
  derived and/or modified CDS sequence (opt1) from glycoprotein__RABV__AB563946.2
augaucccccaggcccugcuguucgugccgcugcugaucagcucccucugcuucggcaaguuccccaucuacaccauccccgacaagcuggggcccuggagcccgaucgacauccaccaccuguccugccccaacaaccucgucguggaggacgagggcugcaccaaccugagcggguucuccuacauggagcugaaggugggcuacaucagcgccaucaaggucaacggguucacgugcaccggcguggugaccgaggcggagaccuacacgaacuucgucggcuacgugaccaccaccuucaagcgcaagcacuuccggcccacgcccgacgccugccgcgccgccuacaacuggaagauggccggggacccgcgguacgaggagucccuccacaaccccuaccccgacuaccacuggcugcgcaccgugaagaccaccaaggagagccuggucaucaucucccccagcguggcggaccucgacccguacgacaagucccugcacagccggguguuccccuccggcaagugcagcgggaucacggucuccagcaccuacugcuccaccaaccacgacuacaccaucuggaugcccgagaacccccgccugggcacgagcugcgacaucuucaccaacucccgggggaagcgcgccagcaagggcagcaagaccugcggcuucguggacgagcgggggcucuacaagucccugaagggcgccugcaagcugaagcucugcggggugcugggccugcgccucauggacggcaccugggccgcgauccagacgagcgacgagaccaaguggugcccgcccgaccagcuggucaaccugcacgacuuccgguccgacgagaucgagcaccucgugguggaggagcuggucaagaagcgcgaggagugccuggacgcccucgagagcaucaugaccaccaaguccgugagcuuccggcgccugucccaccuccggaagcucgugcccggguucggcaaggccuacacgaucuucaacaagacccugauggaggccgacgcccacuacaagagcguccgcaccuggaacgagaucauccccuccaaggggugccugcgggugggcgggcgcugccacccgcacgugaacggcgucuucuucaacggcaucauccucgggcccgacggccacgugcugauccccgagaugcagagcucccugcuccagcagcacauggagcugcuggagagcuccgucaucccccucaugcacccgcuggcggaccccagcaccguguucaaggacgacgacgaggccgaggacuucguggagguccaccuccccgacgugcacaagcaggucuccgggguggaccugggccugcccagcugggggaaguacgugcugauguccgccggcgugcucacggcccugaugcugaugaucuuccucaugaccugcugccggcgcgccaaccgggcggagagcgcccagcacucccugggcgagcgcgggcgcaaggucagcgugaccagccaguccggccgggugaucagcuccugggagagcuacaaguccgggggcgagaccaagcuguga

SEQ ID NO: 94689 - RNA, 1575 nt, Artificial Sequence; identical to SEQ ID NO: 94663
  derived and/or modified CDS sequence (opt1) from glycoprotein__RABV__AB563947.1

SEQ ID NO: 94690 - RNA, 1575 nt, Artificial Sequence
  derived and/or modified CDS sequence (opt1) from glycoprotein__RABV__AB563948.1
augaucccccaggcccugauguucgugccgcuccuggucuucagccugugcuucggcaaguuccccaucuacaccauccccgacaagcucgggcccugguccccgaucgacauccaccaccugagcugccccaacaaccuggugguggaggacgagggcugcaccaaccucuccggguucagcuacauggagcugaaggucggcuacaucuccgccaucaaggugaacggguucacgugcaccggcguggucaccgaggcggagaccuacacgaacuucgugggcuacgugaccaccaccuucaagcgcaagcacuuccggcccaugcccgacgccugccgcgccgccuacaacuggaagauggccggggacccgcgguacgaggagagccugcacaaccccuaccccgacuaccacuggcuccgcacggucaagaccaccaaggagucccuggugaucaucagccccuccguggcggaccuggacccguacgacaagagccuccacucccgggucuuccccggcgggaagugcagcggcaugaccguguccagcacguacugcuccaccaaccacgacuacaccaucuggaugcccgagaacccccgccuggggaccagcugcgacaucuucacgaacucccggggcaagcgcgccagcaagggcuccaagaccugcggguucguggacgagcggggccuguacaagagccucaagggggccugcaagcugaagcugugcggcguccucggccugcgccugauggacgggaccugggccgcgauccagaccagcgacgagacgaaguggugcccgcccgaccagcucgugaaccugcacgacuuccgguccgacgagaucgagcaccugguggucgaggagcucgugaagaagcgcgaggagugccuggacgcccuggagagcaucaugaccaccaaguccgugagcuuccggcgccucucccaccuccggaagcugguccccggcuucgggaaggccuacaccaucuucaacaagacgcugauggaggccgacgcccacuacaagagcgugcgcaccuggaacgagaucauccccuccaagggcugccugcgggucgggggccgcugccacccgcacgugaacggcguguucuucaacgggaucauccugggccccgacgggcacguccucauccccgagaugcagagcucccugcugcagcagcacauggagcuccuggagagcuccgugaucccccugaugcacccgcucgcggaccccagcaccguguucaagggcgacgacgaggccgaggacuucgucgaggugcaccuccccgacgugcacaagcaggucuccgggguggaccugggccugcccagcuggggcaaguacgugcugauguccgccgggguccugaccgcccucaugcugaugaucuuccugaugacgugcugcaagcgggccaaccgcgcggagagcgcccaccacucccucggcgagcgggggcgcaaggugagcgugaccucccagagcggccgcgucaucagcuccugggagagcuacaaguccgggggcgagaccaagcuguga

SEQ ID NO: 94691 - RNA, 1575 nt, Artificial Sequence
  derived and/or modified CDS sequence (opt1) from glycoprotein__RABV__AB563949.1
augaucccccaggcccugauguucgugccgcuccuggucuucagccugugcuucggcaaguuccccaucuacaccauccccgacaagcucgggcccugguccccgaucgacauccaccaccugagcugccccaacaaccuggugguggaggacgagggcugcaccaaccucuccggguucagcuacauggagcugaaggucggcuacaucuccgccaucaaggugaacggguucacgugcaccggcguggucaccgaggcggagaccuacacgaacuucgugggcuacgugaccaccaccuucaagcgcaagcacuuccggcccaugcccgacgccugccgcgccgccuacaacuggaagauggccggggacccgcgguacgaggagagccugcacaaccccuaccccgacuaccacuggcuccgcacggucaagaccaccaaggagucccuggugaucaucagccccuccguggcggaccuggacccguacgacaagagccuccacucccgggucuuccccagcggcaagugcuccgggaugaccgugagcuccacguacugcagcaccaaccacgacuacaccaucuggaugcccgagaacccccgccugggcaccuccugcgacaucuucacgaacagccgggggaagcgcgccuccaagggcagcaagaccugcggcuucguggacgagcgggggcuguacaagagccucaagggcgccugcaagcugaagcugugcgggguccucggccugcgccugauggacggcaccugggccgcgauccagaccuccgacgagacgaaguggugcccgcccgaccagcucgugaaccugcacgacuuccggagcgacgagaucgagcaccugguggucgaggagcucgugaagaagcgcgaggagugccuggacgcccuggaguccaucaugaccaccaagagcguguccuuccggcgccucagccaccuccggaagcugguccccggguucggcaaggccuacaccaucuucaacaagacgcugauggaggccgacgcccacuacaaguccgugcgcaccuggaacgagaucauccccagcaaggggugccugcgggugggcgggcgcugccacccgcacgucaacggcguguucuucaacggcaucauccuggggcccgacggccacguccucauccccgagaugcaguccagccugcugcagcagcacauggagcuccuggaguccagcgugaucccccugaugcacccgcucgcggaccccuccaccguguucaagggggacgacgaggccgaggacuucgucgaggugcaccuccccgacgugcacaagcaggucagcggcguggaccuggggcugcccuccuggggcaaguacgugcugaugagcgccggcguccugaccgcccucaugcugaugaucuuccugaugacgugcugcaagcgggccaaccgcgcggaguccgcccaccacaaccucggggagcggggccgcaaggugagcgugaccucccagagcgggcgcgucaucagcuccugggagagcuacaaguccggcggggagaccaagcuguga

SEQ ID NO: 94692 - RNA, 1575 nt, Artificial Sequence
  derived and/or modified CDS sequence (opt1) from glycoprotein__RABV__AB563950.1
augaucccccaggcccugauguucgugccgcuccuggucuucagccugugcuucggcaaguuccccaucuacaccauccccgacaagcucgggcccugguccccgaucgacauccaccaccugagcugccccaacaaccuggugguggaggacgagggcugcaccaaccucuccggguucagcuacauggagcugaaggucggcuacaucuccgccaucaaggugaacggguucacgugcaccggcguggucaccgaggcggagaccuacacgaacuucgugggcuacgugaccaccaccuucaagcgcaagcacuuccggcccaugcccgacgccugccgcgccgccuacaacuggaagauggccggggacccgcgguacgaggagagccugcacaaccccuaccccgacuaccacuggcuccgcacggucaagaccaccaaggagucccuggugaucaucagccccuccguggcggaccuggacccguacgacaagagccuccacucccgggucuuccccagcggcaagugcuccgggaucaccgugagcuccacguacugcagcaccaaccacgacuacaccaucuggaugcccgagaacccccgccugggcaccuccugcgacaucuucacgaacagccgggggaagcgcgccuccaagggcagcaagaccugcggcuucguggacgagcgggggcuguacaagagccucaagggcgccugcaagcugaagcugugcgggguccucggccugcgccugauggacggcaccugggccgcgauccagaccuccgacgagacgaaguggugcccgcccgaccagcucgugaaccugcacgacuuccggagcgacgagaucgagcaccugguggucgaggagcucgugaagaagcgcgaggagugccuggacgcccuggaguccaucaugaccaccaagagcguguccuuccggcgccucagccaccuccggaagcugguccccggguucggcaaggccuacaccaucuucaacaagacgcugauggaggccgacgcccacuacaaguccgugcgcaccuggaacgagaucauccccagcaaggggugccugcgggugggcgggcgcugccacccgcacgucaacggcguguucuucaacggcaucauccuggggcccgacggccacguccucauccccgagaugcaguccagccugcugcagcagcacauggagcuccuggaguccagcgugaucccccugaugcacccgcucgcggaccccuccaccguguucaagggggacgacgaggccgaggacuucgucgaggugcaccuccccgacgugcacaagcaggucagcggcguggaccuggggcugcccuccuggggcaaguacgugcugaugagcgccggcguccugaccgcccucaugcugaugaucuuccugaugacgugcugcaagcgggccaaccgcgcggaguccgcccaccacagccucggggagcggggccgcaagguguccgugaccagccagagcgggcgcgucaucuccagcugggaguccuacaagagcggcggggagaccaagcuguga

SEQ ID NO: 94693 - RNA, 1575 nt, Artificial Sequence
  derived and/or modified CDS sequence (opt1) from glycoprotein__RABV__AB563951.1
augaucccccaggcccugcuguucgugccgcugcuggucuucagccucugcuucggcaaguuccccaucuacaccauccccgacaagcuggggcccugguccccgaucgacauccaccaccugagcugccccaacaaccucgugguggaggacgagggcugcaccaaccuguccggguucagcuacauggagcugaaggucggcuacaucuccgccaucaaggugaacggguucacgugcaccggcguggucaccgaggcggagaccuacacgaacuucgugggcuacgugaccaccaccuucaagcgcaagcacuuccggcccacgcccgacgccugccgcgccgccuacaacuggaagauggccggggacccgcgguacgaggagagccuccacaaccccuaccccgacuaccacuggcugcgcaccgucaagaccaccaaggagucccuggugaucaucagccccuccguggcggaccucgacccguacgacaagagccugcacucccgggucuuccccagcggcaagugcuccgggaucacggugagcuccaccuacugcagcaccaaccacgacuacaccaucuggaugcccgagaacccccgccugggcacguccugcgacaucuucaccaacagccgggggaagcgcgccuccaagggcagcaagaccugcggcuucguggacgagcgggggcucuacaagagccugaagggcgccugcaagcugaagcucugcgggguccugggccugcgccucauggacggcaccugggccgcgauccagacguccgacgagaccaaguggugcccgcccgaccagcuggugaaccugcacgacuuccggagcgacgagaucgagcaccucguggucgaggagcuggugaagaagcgcgaggagugccuggacgcccucgaguccaucaugaccaccaagagcguguccuuccggcgccugagccaccuccggaagcucguccccggguucggcaaggccuacacgaucuucaacaagacccugauggaggccgacgcccacuacaaguccgugcgcaccuggaacgagaucauccccaccaaggggugccugcgggugggcgggcgcugccacccgcacgucaacggcguguucuucaacggcaucauccucgggcccgacggccacguccugauccccgagaugcagagcucccugcuccagcagcacauggagcugcuggagagcuccgugaucccccucaugcacccgcuggcggaccccagcacgguguucaaggacgacgacgaggccgaggacuucgucgaggugcaccuccccgacgugcacaagcaggucuccgggguggaccugggccugcccagcugggggaaguacgugcugauguccgccggcguccucaccgcccugaugcugaugaucuuccucacgaccugcugccggcgcgccgaccgggcggagagcgcccagcacucccugggcgagcgcgggcgcaaggugagcgugaccucccagagcggccgggucaucagcuccugggagagcuacaaguccgggggcgagaccaagcuguga

SEQ ID NO: 94694 - RNA, 1575 nt, Artificial Sequence; identical to SEQ ID NO: 94619
  derived and/or modified CDS sequence (opt1) from glycoprotein__RABV__AB563952.2

SEQ ID NO: 94695 - RNA, 1575 nt, Artificial Sequence; identical to SEQ ID NO: 94619
  derived and/or modified CDS sequence (opt1) from glycoprotein__RABV__AB563953.2

SEQ ID NO: 94696 - RNA, 1575 nt, Artificial Sequence; identical to SEQ ID NO: 94596
  derived and/or modified CDS sequence (opt1) from glycoprotein__RABV__AB563954.1

SEQ ID NO: 94697 - RNA, 1575 nt, Artificial Sequence
  derived and/or modified CDS sequence (opt1) from glycoprotein__RABV__AB563955.1
augaucccccaggcccugcuguucgugccgcugcuggucuucagccucugcuucggcaaguuccccaucuacaccauccccgacaagcuggggcccugguccccgaucgacauccaccaccugagcugccccaacaaccucgugguggaggacgagggcugcaccaaccuguccggguucagcuacauggagcugaaggucggcuacaucuccgccaucaaggugaacggguucacgugcaccggcguggucaccgaggcggagaccuacacgaacuucgugggcuacgugaccaccaccuucaagcgcaagcacuuccggcccacgcccgacgccugccgcgccgccuacaacuggaagauggccggggacccgcgguacgaggagagccuccacaaccccuaccccgacuaccacuggcugcgcaccgucaagaccaccaaggagucccuggugaucaucagccccuccguggcggaccucgacccguacgacaagagcccccacucccgggucccgcccagcggcaagugcuccgggaucacggugagcuccaccuacugcagcaccaaccacgacuacaccaucuggaugcccgagaacccccgccugggcacguccugcgacaucuucaccaacagccgggggaagcgcgccuccaagggcagcaagaccugcggcuucguggacgagcgggggcuguacaagagccucaagggcgccugcaagcugaagcugugcgggguccucggccugcgccugauggacggcaccugggccgcgauccagacguccgacgagaccaaguggugcccgcccgaccagcucgugaaccugcacgacuuccggagcgacgagaucgagcaccugguggucgaggagcucgugaagaagcgcgaggagugccuggacgcccuggaguccaucaugaccaccaagagcguguccuuccggcgccucagccaccuccggaagcugguccccggguucggcaaggccuacacgaucuucaacaagacccucauggaggccgacgcccacuacaaguccgugcgcaccuggaacgagaucauccccagcaaggggugccugcgggugggcgggcgcugccacccccacgucaacggcguguucuucaacggcaucauccuggggcccgacggccacguccucaucccggagaugcaguccagccugcugcagcagcacauggagcuccuggaguccagcgugaucccccugaugcacccccucgcggaccccuccaccguguucaaggacgacgacgaggccgaggacuucgucgaggugcaccucccggacgugcacaagcaggucagcgggguggaccugggccugcccuccugggggaaguacgugcugaugagcgccggcguccugacggcccucaugcugaugaucuuccugacgaccugcugccggcgcgccaaccgggcggaguccgcccagcacagccucggcgagcgcgggcgcaagguguccgugaccagccagagcggccgggucaucuccagcugggaguccuacaagagcgggggcgagaccaagcuguga

SEQ ID NO: 94698 - RNA, 1575 nt, Artificial Sequence
  derived and/or modified CDS sequence (opt1) from glycoprotein__RABV__AB563956.1
augaucccccaggcccugcuguucgugccgcugcuggucuucagccucugcuucggcaaguuccccaucuacaccauccccgacaagcuggggcccugguccccgaucgacauccaccaccugagcugccccaacaaccucgugguggaggacgagggcugcaccaaccuguccggguucagcuacauggagcugaaggucggcuacaucuccgccaucaaggugaacggguucacgugcaccggcguggucaccgaggcggagaccuacacgaacuucgugggcuacgugaccaccaccuucaagcgcaagcacuuccggcccacgcccgacgccugccgcgccgccuacgacuggaagauggccggggacccgcgguacgaggagagccuccacaaccccuaccccgacuaccacuggcugcgcaccgucaagaccaccaaggagucccccgugaucaucagcccguccguggcggaccuggaccccuacgacaagagccuccacucccgggucccgcccagcggcaagugcuccgggaucacggugagcuccaccuacugcagcaccaaccacgacuacaccaucuggaugcccgagaacccccgccugggcacguccugcgacaucuucaccaacagccgggggaagcgcgccuccaagggcagcaagaccugcggcuucguggacgagcgggggcuguacaagagccucaagggcgccugcaagcugaagcugugcgggguccucggccugcgccugauggacggcaccugggccgcgauccagacguccgacgagaccaaguggugcccgcccgaccagcucgugaaccugcacgacuuccggagcgacgagaucgagcaccugguggucgaggagcucgugaagaagcgcgaggagugccuggacgcccuggaguccaucaugaccaccaagagcguguccuuccggcgccucagccaccuccggaagcugguccccggguucggcaaggccuacacgaucuucaacaagacccucauggaggccgacgcccacuacaaguccgugcgcaccuggaacgagaucauccccagcaaggggugccugcgggugggcgggcgcugccacccccacgucaacggcguguucuucaacggcaucauccuggggcccgacggccacguccucaucccggagaugcaguccagccugcugcagcagcacauggagcuccuggaguccagcgugaucccccugaugcacccccucgcggaccccuccaccguguucaaggacgacgacgaggccgaggacuucgucgaggugcaccucccggacgugcacaagcaggucagcgggguggaccugggccugcccuccugggggaaguacgugcugaugagcgccggcauccugacggcccucaugcugaugaucuuccugacgaccugcugccggcgcgccgaccgggcggaguccgcccagcacagccucggcgagcgcgggcgcaaggucuccgugaccagccagagcggccgggugaucuccagcugggaguccuacaagagcgggggcgagaccaagcuguga

SEQ ID NO: 94699 - RNA, 1575 nt, Artificial Sequence
  derived and/or modified CDS sequence (opt1) from glycoprotein__RABV__AB563957.1
augaucccccaggcccugcuguucgugccgcugauggucuucagccugugcuucggcaaguuccccaucuacaccauccccgacaagcucgggcccugguccccgaucgacauccaccaccugagcugccccaacaaccuggugguggaggacgagggcugcaccaaccucuccggguucagcuacauggagcugaaggucggcuacaucuccgccaucaaggugaacggguucacgugcaccggcguggucaccgaggcggagaccuacacgaacuucgugggcuacgugaccaccaccuucaagcgcaagcacuuccggcccacgcccgacgccugccgcgccgccuacaacuggaagauggccggggacccgcgguacgaggagagccugcacaaccccuaccccgacuaccacuggcuccgcaccgucaagaccaccaaggagucccuggugaucaucagccccuccguggcggaccuggacccguacgacaagagccuccacucccgggccuuccccagcggcaagugcuccgggaucacggucagcuccaccuacugcagcaccaaccacgacuacaccaucuggaugcccgagaacccccgccugggcacguccugcgacaucuucaccaacagccgggggaagcgcgccuccaagggcagcaagaccugcggcuucguggacgagcgggggcuguacaagagccucaagggcgccugcaagcugaagcugugcggggugcucggccugcgccugauggacggcaccugggcggccauccagacguccgacgagaccaaguggugcccgcccgaccagcucgucaaccugcacgacuuccggagcgacgagaucgagcaccuggugguggaggagcucgucaagaagcgcgaggagugccuggacgcccuggaguccaucaugaccaccaagagcguguccuuccggcgccucagccaccuccggaagcuggugcccggguucggcaaggccuacacgaucuucaacaagacccucauggaggccgacgcgcacuacaaguccguccgcaccuggaacgagaucauccccagcaaggggugccugcgggugggcgggcgcugccacccgcacgugaacggcgucuucuucaacggcaucauccuggggcccgacggccacgugcucauccccgagaugcaguccagccugcugcagcagcacauggagcuccuggaguccagcgucaucccccugaugcacccgcucgccgaccccuccaccguguucaaggacgacgacgaggccgaggacuucguggagguccaccuccccgacgugcacaagcaggucagcgggguggaccugggccugcccuccugggggaaguacgugcugaugagcgccggcgugcugacggcccucaugcugaugaucuuccugaugaccugcugccggcgcaccaaccgggcggaguccgcccagcacagccucggcgagcgcgggcgcaaggucuccgugaccagccagagcggccgggugaucuccagcugggaguccuacaagagcgggggcgagacgaagcuguga

SEQ ID NO: 94700 - RNA, 1575 nt, Artificial Sequence; identical to SEQ ID NO: 94663
  derived and/or modified CDS sequence (opt1) from glycoprotein__RABV__AB563958.1

SEQ ID NO: 94701 - RNA, 1575 nt, Artificial Sequence
  derived and/or modified CDS sequence (opt1) from glycoprotein__RABV__AB563959.1
augaucccccaggcccugauguucgugccgcuccuggucuucagccugugcuucggcaaguuccccaucuacaccauccccgacaagcucgggcccugguccccgaucgacauccaccaccugagcugccccaacaaccuggugguggaggacgagggcugcaccaaccucuccggguucagcuacauggagcugaaggucggcuacaucuccgccaucaaggugaacggguucacgugcaccggcguggucaccgaggcggagaccuacacgaacuucgugggcuacgugaccaccaccuucaagcgcaagcacuuccggcccaugcccgacgccugccgcgccgccuacaacuggaagauggccggggacccgcgguacgaggagagccugcacaaccccuaccccgacuaccacuggcuccgcacggucaagaccaccaaggagucccuggugaucaucagccccuccguggcggaccuggacccguacgacaagagccuccacucccgggucuuccccagcggcaagugcuccgggaccacggugagcuccaccuacugcagcaccaaccacgacuacaccaucuggaugcccgagaacccccgccugggcacguccugcgacaucuucaccaacagccgggggaagcgcgccuccaagggcagcaagaccugcggcuucguggacgagcgggggcuguacaagagccucaagggcgccugcaagcugaagcugugcgggguccucggccugcgccugauggacggcaccugggccgcgauccagacguccgacgagaccaaguggugcccgcccgaccagcucgugaaccugcacgacuuccggagcgacgagaucgagcaccugguggucgaggagcucgugaagaagcgcgaggagugccuggacgcccuggaguccaucaugaccaccaagagcguguccuuccggcgccucagccaccuccggaagcugguccccggguucggcaaggccuacacgaucuucaacaagacccugauggaggccgacgcccacuacaaguccgugcgcaccuggaacgagaucauccccagcaaggggugccugcgggugggcgggcgcugccacccgcacgucaacggcguguucuucaacggcaucauccuggggcccgacggccacguccucauccccgagaugcaguccagccugcugcagcagcacauggagcuccuggaguccagcgugaucccccugaugcacccgcucgcggaccccuccaccguguucaagggggacgacgaggccgaggacuucgucgaggugcaccuccccgacgugcacaagcaggucagcggcguggaccuggggcugcccuccuggggcaaguacgugcugaugagcgccggcguccugacggcccucaugcugaugaucuuccugaugaccugcugcaagcgggccaaccgcgcggaguccgcccaccacagccucggggagcggggccgcaagguguccgugaccagccagagcgggcgcgucaucuccagcugggaguccuacaagagcggcggggagaccaagcuguga

SEQ ID NO: 94702 - RNA, 1575 nt, Artificial Sequence
  derived and/or modified CDS sequence (opt1) from glycoprotein__RABV__AB563960.1
augaucccccaggcccugcuguucgugccguuccuggucuucagccugugcuucggcaaguuccccaucuacaccauccccgacaagcucgggcccugguccccgaucgacauccaccaccugagcugccccaacaaccuggugguggaggacgagggcugcaccaaccucuccggguucagcuacauggagcugaaggucggcuacaucuccgccaucaaggugaacggguucacgugcaccggcguggucaccgaggcggagaccuacacgaacuucgugggcuacgugaccaccaccuucaagcgcaagcacuuccggcccaugcccgacgccugccgcgccgccuacaacuggaagauggccggggacccgcgguacgaggagagccugcacaaccccuaccccgacuaccacuggcuccgcacggucaagaccaccaaggagucccuggugaucaucagccccuccguggcggaccuggacccguacgacaagagccuccacucccgggucuuccccagcggcaagugcuccgggaucaccgugagcuccacguacugcagcaccaaccacgacuacaccaucuggaugcccgagaacccccgccugggcaccuccugcgacaucuucacgaacagccgggggaagcgcgccuccaagggcagcaagaccugcggcuucguggacgagcgggggcuguacaagagccucaagggcgccugcaagcugaagcugugcgggguccucggccugcgccugauggacggcaccugggccgcgauccagaccuccgacgagacgaaguggugcccgcccgaccagcucgugaaccugcacgacuuccggagcgacgagaucgagcaccugguggucgaggagcucgugaagaagcgcgaggagugccuggacgcccuggaguccaucaugaccaccaagagcguguccuuccggcgccucagccaccuccggaagcugguccccggguucggcaaggccuacaccaucuucaacaagacgcucauggaggccgacgcccacuacaaguccgugcgcaccuggaacgagaucauccccagcaaggggugccugcgggugggcgggcgcugccacccgcacgucaacggcguguucuucaacggcaucauccuggggcccgacggccacguccucauccccgagaugcaguccagccugcugcagcagcacauggagcuccuggaguccagcgugaucccccugaugcacccgcucgcggaccccuccaccguguucaaggacgacgacgaggccgaggacuucgucgaggugcaccuccccgacgugcacaagcaggucagcgggguggaccugggccugcccuccugggggaaguacgugcugaugagcgccggcguccugaccgugcucaugcugaugaucuucuucaugacgugcugccggcgcgccaaccggguggaguccgcccagcacagccugggcgagcgcgggcgcaaggucuccgugaccagccagagcggccgggugaucuccagcugggaguccuacaagagcgggggcgagaccaagcucuga

SEQ ID NO: 94703 - RNA, 1575 nt, Artificial Sequence; identical to SEQ ID NO: 94658
  derived and/or modified CDS sequence (opt1) from glycoprotein__RABV__AB563961.1

SEQ ID NO: 94704 - RNA, 1575 nt, Artificial Sequence; identical to SEQ ID NO: 94658
  derived and/or modified CDS sequence (opt1) from glycoprotein__RABV__AB563962.1

SEQ ID NO: 94705 - RNA, 1575 nt, Artificial Sequence
  derived and/or modified CDS sequence (opt1) from glycoprotein__RABV__AB563963.1
augaucccccaggcccugcuguucgugccgcugcuggucuucagccucugcuucggcaaguuccccaucuacaccauccccgacaagcuggggcccugguccccgaucgacauccaccaccugagcugccccaacaaccucgugguggaggacgagggcugcaccaaccuguccggguucagcuacauggagcugaaggucggcuacaucuccgccaucaaggugaacggguucacgugcaccggcguggucaccgaggcggagaccuacacgaacuucgugggcuacgugaccaccaccuucaagcgcaagcacuuccggcccacgcccgacgccugccgcgccgccuacaacuggaagauggccggggacccgcgguacgaggagagccuccacaaccccuaccccgacuaccacuggcugcgcaccgucaagaccaccaaggagucccuggugaucaucagccccuccguggcggaccucgacccguacgacaagagccugcacucccgggucuuccccagcggcaagugcuccgggaucacggugagcuccaccuacugcagcaccaaccacgacuacaccaucuggaugcccgagaacccccgccugggcacguccugcgacaucuucaccaacagccgggggaagcgcgccuccaagggcagcaagaccugcggcuucguggacgagcgggggcucuacaagagccugaagggcgccugcaagcugaagcucugcgggguccugggccugcgccucauggacggcaccugggccgcgauccagacguccgacgagaccaaguggugcccgcccgaccagcuggugaaccugcacgacuuccggagcgacgagaucgagcaccucguggucgaggagcuggugaagaagcgcgaggagugccuggacgcccucgaguccaucaugaccaccaagagcguguccuuccggcgccugagccaccuccggaagcucguccccggguucggcaaggccuacacgaucuucaacaagacccugauggaggccgacgcccacuacaaguccgugcgcaccuggaacgagaucauccccagcaaggggugccugcgggugggcgggcgcugccacccgcacgucaacggcguguucuucaacggcaucauccucgggcccgacggccacguccugauccccgagaugcaguccagccugcuccagcagcacauggagcugcuggaguccagcgugaucccccucaugcacccgcuggcggaccccuccaccaucuucaaggacgacgacgaggccgaggacuucguggagguccaccuccccgacgugcacaagcaggucagcgggguggaccugggccugcccuccugggggaaguacgugcugaugagcgccggcgugcucacgguccugaugcugaugaucuucuucaugaccugcugccggcgcgccaaccggguggaguccgcccagcacagccucggcgagcgcgggcgcaagguguccgucaccagccagagcggccgggugaucuccagcugggaguccuacaagagcgggggcgagaccaagcuguga

SEQ ID NO: 94706 - RNA, 1575 nt, Artificial Sequence; identical to SEQ ID NO: 94658
  derived and/or modified CDS sequence (opt1) from glycoprotein__RABV__AB563964.1

SEQ ID NO: 94707 - RNA, 1575 nt, Artificial Sequence; identical to SEQ ID NO: 94658
  derived and/or modified CDS sequence (opt1) from glycoprotein__RABV__AB563966.1

SEQ ID NO: 94708 - RNA, 1575 nt, Artificial Sequence; identical to SEQ ID NO: 94595
  derived and/or modified CDS sequence (opt1) from glycoprotein__RABV__AB563969.1

SEQ ID NO: 94709 - RNA, 1575 nt, Artificial Sequence
  derived and/or modified CDS sequence (opt1) from glycoprotein__RABV__AB563970.2
augaacccccaggcccugauguucgugccgcuccuggucuucagccugugcuucggcaaguuccccaucuacaccauccccgacaagcucgggcccugguccccgaucgacauccaccaccugagcugccccaacaaccuggugguggaggacgagggcugcaccaaccucuccggguucagcuacauggagcugaaggucggcuacaucuccgccaucaaggugaacggguucacgugcaccggcguggucaccgaggcggagaccuacacgaacuucgugggcuacgugaccaccaccuucaagcgcaagcacuuccggcccacgcccgacgccugccgcgccgccuacaacuggaagauggccggggacccgcgguacgaggagagccugcacaaccccuaccccgacuaccacuggcuccgcaccgucaagaccaccaaggagucccuggugaucaucagccccuccguggcggaccuggacccguacgacaagagccuccacucccgggucuuccccagcggcaagugcuccgggaucacggugagcuccaccuacugcagcaccaaccacgacuacaccaucuggaugcccgagaacccccgccugggcacguccugcgacaucuucaccaacagccgggggaagcgcgccuccaagggcagcaugaccugcggcuucguggacgagcgggggcuguacaagagccucaagggcgccugcaagcugaagcugugcgggguccucggccugcgccugauggacggcaccugggccgcgauccagacguccgacgagaccaaguggugcccgcccgaccagcucgugaaccugcacgacuuccacagcgacgagaucgagcaccugguggucgaggagcucgugaagaagcgggaggagugccuggacgcccuggaguccaucaugaccaccaagagcguguccuuccgccggcucagccaccuccgcaagcugguccccggguucggcaaggccuacacgaucuucaacaagacccugauggaggccgacgcccacuacaaguccgugcggaccuggaacgagaucauccccagcaaggggugccugcgcgugggcgggcggugccacccgcacgucaacggcguguucuucaacggcaucauccuggggcccgacggccacguccucauccccgagaugcaguccagccugcugcagcagcacauggagcuccuggaguccagcgugaucccccugaugcacccgcucgcggaccccuccaccguguucaaggacgacgacgaggccgaggacuucgucgaggugcaccuccccgacgugcacaagcaggucagcgggguggaccugggccugcccuccugggggaaguacgugcugaugagcgccggcguccugacggcccucaugcugaugaucuuccugaugaccugcugccgccgggccaaccgcgcggaguccgcccagcacagccucggcgagcgggggcgcaagguguccgugaccagccagagcggccgcgucaucuccagcugggaguccuacaagagcgggggcgagaccaagcuguga

SEQ ID NO: 94710 - RNA, 1575 nt, Artificial Sequence
  derived and/or modified CDS sequence (opt1) from glycoprotein__RABV__AB563971.1
augaacccccaggcccugauguucgugccgcuccuggucuucagccugugcuucggcaaguuccccaucuacaccauccccgacaagcucgggcccugguccccgaucgacauccaccaccugagcugccccaacaaccuggugguggaggacgagggcugcaccaaccucuccggguucagcuacauggagcugaaggucggcuacaucuccgccaucaaggugaacggguucacgugcaccggcguggucaccgaggcggagaccuacacgaacuucgugggcuacgugaccaccaccuucaagcgcaagcacuuccggcccacgcccgacgccugccgcgccgccuacaacuggaagauggccggggacccgcgguacgaggagagccugcacaaccccuaccccgacuaccacuggcuccgcaccgucaagaccaccaaggagucccuggugaucaucagccccuccguggcggaccuggacccguacgacaagagccuccacucccgggucuuccccagcggcaagugcuccgggaucacgguguucagcaccuacugcuccaccaaccacgacuacaccaucuggaugcccgagaacccccgccugggcacgagcugcgacaucuucaccaacucccgggggaagcgcgccagcaagggcuccaagaccugcggcuucguggacgagcgggggcuguacaagagccucaagggcgccugcaagcugaagcugugcgggguccucggccugcgccugauggacggcaccugggccgcgauccagacgagcgacgagaccaaguggugcccgcccgaccagcucgugaaccugcacgacuuccgguccgacgagaucgagcaccugguggucgaggagcucgugaagaagcgcgaggagugccuggacgcccuggagagcaucaugaccaccaaguccgugagcuuccggcgccucucccaccuccggaagcugguccccggguucggcaaggccuacacgaucuucaacaagacccugauggaggccgacgcccacuacaagagcgugcgcaccuggaacgagaucauccccuccaaggggugccugcgggugggcgggcgcugccacccgcacgucaacggcguguucuucaacggcaucauccuggggcccgacggccacguccucauccccgagaugcagagcucccugcugcagcagcacauggagcuccuggagagcuccgugaucccccugaugcacccgcucgcggaccccagcaccguguucaaggacgacgacgaggccgaggacuucgucgaggugcaccuccccgacgugcacaagcaggucuccgggguggaccugggccugcccagcugggggaaguacgugcugauguccgccggcguccugacggcccucaugcugaugaucuuccugaugaccugcugccggcgcgccaaccgggcggagagcgcccagcacucccucggcgagcgcgggcgcaaggugagcgugaccucccagagcggccgggucaucagcuccugggagagcuacaaguccgggggcgagaccaagcuguga

SEQ ID NO: 94711 - RNA, 1575 nt, Artificial Sequence
  derived and/or modified CDS sequence (opt1) from glycoprotein__RABV__AB563973.2
augaucccccaggcccugcuguucgugccgcugcuggucagcucccucugcuucggcaaguuccccaucuacaccauccccgacaagcuggggcccuggagcccgaucgacauccaccaccuguccugccccaacaaccucgugguggaggacgagggcugcaccaaccugagcggguucuccuacauggagcugaaggucggcuacaucagcgccaucaaggugaacggguucacgugcaccggcguggucaccgaggcggagaccuacacgaacuucgugggcuacgugaccaccaccuucaagcgcaagcacuuccggcccacgcccgacgccugccgcgccgccuacaacuggaagauggccggggacccgcgguacgaggagucccuccacaaccccuaccccgacuaccacuggcugcgcaccgucaagaccaccaaggagagccuggugaucaucucccccagcguggcggaccucgacccguacgacaagucccugcacagccgggucuuccccuccggcaagugcagcgggaucacgguguccagcaccuacugcuccaccaaccacgacuacaccaucuggaugcccgagaacccccgccugggcacgagcugcgacaucuucaccaacucccgggggaagcgcgccagcaagggcagcaagaccugcggcuucguggacgagcgggggcucuacaagucccugaagggcgccugcaagcugaagcucugcgggguccugggccugcgccucauggacggcaccugggccgcgauccagacgagcgacgagaccaaguggugcccgcccgaccagcuggugaaccugcacgacuuccgguccgacgagaucgagcaccucguggucgaggagcuggugaagaagcgcgaggagugccuggacgcccucgagagcaucaugaccaccaaguccgugagcuuccggcgccugucccaccuccggaagcucguccccggguucggcaaggccuacacgaucuucaacaagacccugauggaggccgacgcccacuacaagagcgugcgcaccuggaacgagaucauccccuccaaggggugccugcgggugggcgggcgcugccacccgcacgucaacggcguguucuucaacggcaucauccucgggcccgacggccacguccugauccccgagaugcagagcucccugcuccagcagcacauggagcugcuggagagcuccgugaucccccucaugcacccgcuggcggaccccagcaccguguucaaggacgacgacgaggccgaggacuucgucgaggugcaccuccccgacgugcacaagcaggucuccgggguggaccugggccugcccagcugggggaaguacgugcugacguccgccagcguccucaccgcccugaugcugaugaucuuccucaugaccugcugccggcgcgccaaccgggcggaguccgcccagcacagccugggcgagcgcggccgcaaggugagcgugaccucccagagcgggcgggucaucuccagcugggaguccuacaagagcggcggggagacgaagcuguga

SEQ ID NO: 94712 - RNA, 1575 nt, Artificial Sequence
  derived and/or modified CDS sequence (opt1) from glycoprotein__RABV__AB563974.1
augaucccccaggcccugcuguucgugccgcugcuggucagcucccucugcuucggcaaguuccccaucuacaccauccccgacaagcuggggcccuggagcccgaucgacauccaccaccuguccugccccaacaaccucgugguggaggacgagggcugcaccaaccugagcggguucuccuacauggagcugaaggucggcuacaucagcgccaucaaggugaacggguucacgugcaccggcguggucaccgaggcggagaccuacacgaacuucgugggcuacgugaccaccaccuucaagcgcaagcacuuccggcccacgcccgacgccugccgcgccgccuacaacuggaagauggccggggacccgcgguacgaggagucccuccacaaccccuaccccgacuaccacuggcugcgcaccgucaagaccaccaaggagagccuggugaucaucucccccagcguggcggaccucgacccguacgacaagucccugcacagccgggucuuccccuccggcaagugcagcgggaucacgguguccagcaccuacugcuccaccaaccacgacuacaccaucuggaugcccgagaacccccgccugggcacgagcugcgacaucuucaccaacucccgggggaagcgcgccagcaagggcagcaagaccugcggcuucguggacgagcgggggcucuacaagucccugaagggcgccugcaagcugaagcucugcgggguccugggccugcgccucauggacggcaccugggccgcgauccagacgagcgacgagaccaaguggugcccgcccgaccagcuggugaaccugcacgacuuccgguccgacgagaucgagcaccucguggucgaggagcuggugaagaagcgcgaggagugccuggacgcccucgagagcaucaugaccaccaaguccgugagcuuccggcgccugucccaccuccggaagcucguccccggguucggcaaggccuacacgaucuucaacaagacccugauggaggccgacgcccacuacaagagcgugcgcaccuggaacgagaucauccccuccaaggggugccugcgggugggcgggcgcugccacccgcacgucaacggcguguucuucaacggcaucauccucgggcccgacggccacguccugauccccgagaugcagagcucccugcuccagcagcacauggagcugcuggagagcuccgugaucccccucaugcacccgcuggcggaccccagcaccguguucaaggacgacgacgaggccgaggacuucgucgaggugcaccuccccgacgugcacaagcaggucuccgggguggaccugggccugcccagcugggggaaguacgugcugacguccgccggcguccucaccgcccugaugcugaugaucuuccucaugaccugcugccggcgcgccaaccgggcggagagcgcccagcacucccugggcgagcgcgggcgcaaggugagcgugaccagccaguccggccgggucaucagcuccugggagagcuacaaguccgggggcgagacgaagcuguga

SEQ ID NO: 94713 - RNA, 1575 nt, Artificial Sequence; identical to SEQ ID NO: 94712
  derived and/or modified CDS sequence (opt1) from glycoprotein__RABV__AB563975.2

SEQ ID NO: 94714 - RNA, 1575 nt, Artificial Sequence
  derived and/or modified CDS sequence (opt1) from glycoprotein__RABV__AB563976.1
augaucccccaggcccugcuguucgugccgcugcuggucuucagccucugcuucggcaaguuccccaucuacaccauccccgacaagcuggggcccugguccccgaucgacauccaccaccugagcugccccaacaaccucgugguggaggacgagggcugcaccaaccuguccggguucagcuacauggagcugaaggucggcuacaucuccgccaucaaggugaacggguucacgugcaccggcguggucaccgaggcggagaccuacacgaacuucgugggcuacgugaccaccaccuucaagcgcaagcacuuccggcccacgcccgacgccugccgcgccgccuacaacuggaagauggccggggacccgcgguacgaggagagccuccacaaccccuaccccgacuaccacuggcugcgcaccgucaagaccaccaaggagucccuggugaucaucagccccuccguggcggaccucgacccguacgacaagagccugcacucccgggucuuccccagcggcaagugcuccgggaucacggugagcuccaccuacugcagcaccaaccacgacuacaccaucuggaugcccgagaacccccgccugggcacguccugcgacaucuucaccaacagccgggggaagcgcgccuccaagggcagcaagaccugcggcuucguggacgagcgggggcucuacaagagccugaagggcgccugcaagcugaagcucugcgggguccugggccugcgccucauggacggcaccugggccgcgauccagacguccgacgagaccaaguggugcccgcccgaccagcuggugaaccugcacgacuuccggagcgacgagaucgagcaccucguggucgaggagcuggugaagaagcgcgaggagugccuggacgcccucgaguccaucaugaccaccaagagcguguccuuccggcgccugagccaccuccggaagcucguccccggguucggcaaggccuacacgaucuucaacaagacccugauggaggccgacgcccacuacaaguccgugcgcaccuggaacgagaucauccccagcaaggggugccugcgggugggcgggcgcugccacccgcacgucaacggcguguucuucaacggcaucauccucgggcccgacggccacguccugauccccgagaugcaguccagccugcuccagcagcacauggagcugcuggaguccagcgugaucccccucaugcacccgcuggcggaccccuccaccguguucaaggacgacgacgaggccgaggacuucgucgaggugcaccuccccgacgugcacaagcaggucagcgggguggaccugggccugcccuccugggggaaguacgugcugaugagcgccggcguccucacggcccugaugcugaugaucuuccucaugaccugcugccggggcaccaaccgcgccgaguccgcgcagcacagccugggggagcggggccgcaagguguccgugaccagccagagcgggcgcgucaucuccagcugggaguccuacaagagcggcggggagacgaagcuguga

SEQ ID NO: 94715 - RNA, 1575 nt, Artificial Sequence
  derived and/or modified CDS sequence (opt1) from glycoprotein__RABV__AB563977.1
augaucccccaggcccugcuguucgugccgcugcuggucuucagccucugcuucggcaaguuccccaucuacaccauccccgacaagcuggggcccugguccccgaucgacauccaccaccugagcugccccaacaaccucgugguggaggacgagggcugcaccaaccuguccggguucagcuacauggagcugaaggucggcuacaucuccgccaucaaggugaacggguucacgugcaccggcguggucaccgaggcggagaccuacacgaacuucgugggcuacgugaccaccaccuucaagcgcaagcacuuccggcccacgcccgacgccugccgcgccgccuacaacuggaagauggccggggacccgcgguacgaggagagccuccacaaccccuaccccgacuaccacuggcugcgcaccgucaagaccaccaaggagucccuggugaucaucagccccuccguggcggaccucgacccguacgacaagagccugcacucccgggucuuccccagcggcaagugcuccgggaucacggugagcuccaccuacugcagcaccaaccacgacuacaccaucuggaugcccgagaacccccgccugggcacguccugcgacaucuucaccaacagccgggggaagcgcgccuccaagggcagcaagaccugcggcuucguggacgagcgggggcucuacaagagccugaagggcgccugcaagcugaagcucugcgggguccugggccugcgccucauggacggcaccugggccgcgauccagacguccgacgagaccaaguggugcccgcccgaccagcuggugaaccugcacgacuuccggagcgacgagaucgagcaccucguggucgaggagcuggugaagaagcgcgaggagugccuggacgcccucgaguccaucaugaccaccaagagcguguccuuccggcgccugagccaccuccggaagcucguccccggguucggcaaggccuacacgaucuucaacaagacccugauggaggccgacgcccacuacaaguccgugcgcaccuggaacgagaucauccccagcaaggggugccugcgggugggcgggcgcugccacccgcacgucaacggcguguucuucaacggcaucauccucgggcccgacggccacguccugauccccgagaugcaguccagccugcuccagcagcacauggagcugcuggaguccagcgugaucccccucaugcacccgcuggcggaccccuccaccguguucaaggacgacgacgaggccgaggacuucgucgaggugcaccuccccgacgugcacaagcaggucagcgggguggaccugggccugcccuccugggggcgguacgugcugaugagcgccggcguccucacggcccugaugcugaugaucuuccucacgaccugcugccgccgggccaaccgcgcggaguccgcccagcacagccugggcgagcgcgggcggaagguguccgugaccagccagagcggccgcgucaucuccagcugggaguccuacaagagcgggggcgagaccaagcuguga

SEQ ID NO: 94716 - RNA, 1575 nt, Artificial Sequence; identical to SEQ ID NO: 94675
  derived and/or modified CDS sequence (opt1) from glycoprotein__RABV__AB563979.1

SEQ ID NO: 94717 - RNA, 1575 nt, Artificial Sequence
  derived and/or modified CDS sequence (opt1) from glycoprotein__RABV__AB563981.1
augaucccccaggcccugcuguucgugccgcugauggucuucagccugugcuucggcaaguuccccaucuacaccauccccgacaagcucgggcccugguccccgaucgacauccaccaccugagcugccccaacaaccuggugguggaggacgagggcugcaccaaccucuccggguucagcuacauggagcugaaggucggcuacaucuccgccaucaaggugaacggguucacgugcaccggcguggucaccgaggcggagaccuacacgaacuucgugggcuacgugaccaccaccuucaagcgcaagcacuuccggcccacgcccgacgccugccgcgccgccuacaacuggaagauggccggggacccgcgguacgaggagagccugcacaaccccuaccccgacuaccacuggcuccgcaccgucaagaccaccaaggagucccuggugaucaucagccccuccguggcggaccuggacccguacgacaagagccuccacucccgggucuuccccagcggcaagugcuccgggaucacggugagcuccaccuacugcagcaccaaccacgacuacaccaucuggaugcccgagaacccccgccugggcacguccugcgacaucuucaccaacagccgggggaagcgcgccuccaagggcagcaagaccugcggcuucguggacgagcgggggcuguacaagagccucaagggcgccugcaagcugaagcugugcgggguccucggccugcgccugauggacggcaccugggccgcgauccagacguccgacgagaccaaguggugcccgcccgaccagcucgugaaccugcacgacuuccggagcgacgagaucgagcaccugguggucgaggagcucgugaagaagcgcgaggagugccuggacgcccuggaguccaucaugaccaccaagagcguguccuuccggcgccucagccaccuccggaagcugguccccggguucggcaaggccuacacgaucuucaacaagacccucauggaggccgacgcccacuacaaguccgugcgcaccuggaacgagaucauccccagcaaggggugccugcgggugggcgggcgcugccacccgcacgucaacggcguguucuucaacggcaucauccuggggcccgacggccacguccucauccccgagaugcaguccagccugcugcagcagcacauggagcuccuggaguccagcgugaucccccugaugcacccgcucgcggaccccuccaccguguucaaggacgacgacgaggccgaggacuucgucgaggugcaccuccccgacgugcacaagcaggucagcgggguggaccugggccugcccuccugggggaaguacgugcugaugagcgccggcguccugacggcccucaugcugaugaucuuccugaugaccugcugccggcgcaccaaccgggccgaguccgcgcagcacagccucggcgagcgcgggcgcaagguguccgugaccagccagagcggccggaucaucuccagcugggaguccuacaagagcgggggcgagacgaagcuguga

SEQ ID NO: 94718 - RNA, 1575 nt, Artificial Sequence
  derived and/or modified CDS sequence (opt1) from glycoprotein__RABV__AB563983.1
augaucccccaggcccugcuguucgugccgcugcuggucuucagccucugcuucggcaaguuccccaucuacaccauccccgacaagcuggggcccugguccccgaucgacauccaccaccugagcugccccaacaaccucgugguggaggacgagggcugcaccaaccuguccggguucagcuacauggagcugaaggucggcuacaucuccgccaucaaggugaacggguucacgugcaccggcguggucaccgaggcggagaccuacacgaacuucgugggcuacgugaccaccaccuucaagcgcaagcacuuccggcccacgcccgacgccugccgcgccgccuacaacuggaagauggccggggacccgcgguacgaggagagccuccacaaccccuaccccgacuaccacuggcugcgcaccgucaagaccaccaaggagucccuggugaucaucagccccuccguggcggaccucgacccguacgacaagagccugcacucccgggucuuccccagcggcaagugcuccgggaucacggugagcuccaccuacugcagcaccaaccacgacuacaccaucuggaugcccgagaacccccgccugggcacguccugcgacaucuucaccaacagccgggggaagcgcgccuccaagggcagcaagaccugcggcuucguggacgagcgggggcucuacaagagccugaagggcgccugcaagcugaagcucugcgggguccugggccugcgccucauggacggcaccugggccgcgauccagacguccgacgagaccaaguggugcccgcccgaccagcuggugaaccugcacgacuuccggagcgacgagauggagcaccucguggucgaggagcuggugaagaagcgcgaggagugccuggacgcccucgaguccaucaugaccaccaagagcguguccuuccggcgccugagccaccuccggaagcucguccccggguucggcaaggccuacacgaucuucaacaagacccugauggaggccgacgcccacuacaaguccgugcgcaccuggaacgagaucauccccaccaaggggugccugcgggugggcgggcgcugccacccgcacgucaacggcguguucuucaacggcaucauccucgggcccgacggccacguccugauccccgagaugcagagcucccugcuccagcagcacauggagcugcuggagagcuccgugaucccccucaugcacccgcuggcggaccccagcacgguguucaaggacgacgacgaggccgaggacuucgucgaggugcaccuccccgacgugcacaagcaggucuccgggguggaccugggccugcccagcugggggaaguacgugcugauguccgccggcguccucaccgcccugaugcugaugaucuuccucacgaccugcugccggcgcgccgaccgggcggagagcgcccagcacucccugggcgagcgcgggcgcaaggugagcgugaccucccagagcggccgggucaucagcuccugggagagcuacaaguccgggggcgagaccaagcuguga

SEQ ID NO: 94719 - RNA, 1575 nt, Artificial Sequence; identical to SEQ ID NO: 94626
  derived and/or modified CDS sequence (opt1) from glycoprotein__RABV__AB563985.1

SEQ ID NO: 94720 - RNA, 1575 nt, Artificial Sequence
  derived and/or modified CDS sequence (opt1) from glycoprotein__RABV__AB563986.1
augaucccccaggcccugcuguucgugccgcugcuggucuucagccucugcuucggcaaguuccccaucuacaccauccccgacaagcuggggcccugguccccgaucgacauccaccaccugagcugccccaacaaccucgugguggaggacgagggcugcaccaaccuguccggguucagcuacauggagcugaaggucggcuacaucuccgccaucaaggugaacggguucacgugcaccggcguggucaccgaggcggagaccuacacgaacuucgugggcuacgugaccaccaccuucaagcgcaagcacuuccggcccacgcccgacgccugccgcgccgccuacaacuggaagauggccggggacccgcgguacgaggagagccuccacaaccccuaccccgacuaccacuggcugcgcaccgucaagaccaccaaggagucccuggugaucaucagccccuccgugccggaccucgaccccuacgacaagagccugcacucccgggucuuccccagcggcaagugcuccgggaucacggugagcuccaccuacugcagcaccaaccacgacuacaccaucuggaugcccgagaacccgcgccugggcacguccugcgacaucuucaccaacagccgggggaagcgcgcguccaagggcagcaagaccugcggcuucguggacgagcgggggcucuacaagagccugaagggcgccugcaagcugaagcucugcgggguccugggccugcgccucauggacggcaccugggccgccauccagacguccgacgagaccaaguggugcccgcccgaccagcuggugaaccugcacgacuuccggagcgacgagaucgagcaccucguggucgaggagcuggugaagaagcgcgaggagugccuggacgcgcucgaguccaucaugaccaccaagagcguguccuuccggcgccugagccaccuccggaagcucguccccggguucggcaaggccuacacgaucuucaacaagacccugauggaggccgacgcccacuacaaguccgugcgcaccuggaacgagaucauccccagcaaggggugccugcgggugggcgggcgcugccacccccacgucaacggcguguucuucaacggcaucauccucgggcccgacggccacguccugauccccgagaugcaguccagccugcuccagcagcacauggagcugcuggaguccagcgugaucccgcucaugcacccccuggccgaccccuccaccguguucaaggacgacgacgaggcggaggacuucgucgaggugcaccuccccgacgugcacaagcaggucagcgggguggaccugggccugccguccugggggaaguacgugcugaugagcgccggcguccucacggcccugaugcugaugaucuuccucaugaccugcugccggcgcaccaaccgggccgaguccgcccagcacagccugggcgagcgcgggcgcaagguguccgugaccagccagagcggccgggucaucuccagcugggaguccuacaagagcgggggcgagacgaagcuguga

SEQ ID NO: 94721 - RNA, 1575 nt, Artificial Sequence
  derived and/or modified CDS sequence (opt1) from glycoprotein__RABV__AB563987.1
augaucccccaggcccugcuguucgugccgcugcuggucuucagccucugcuucggcaaguuccccaucuacaccauccccgacaagcuggggcccugguccccgaucgacauccaccaccugagcugccccaacaaccucgugguggaggacgagggcugcaccaaccuguccggguucagcuacauggagcugaaggucggcuacaucuccgccaucaaggugaacggguucacgugcaccggcguggucaccgaggcggagaccuacacgaacuucgugggcuacgugaccaccaccuucaagcgcaagcacuuccggcccacgcccgacgccugccgcgccgccuacaacuggaagauggccggggacccgcgguacgaggagagccuccacaaccccuaccccgacuaccacuggcugcgcaccgucaagaccaccaaggagucccuggugaucaucagccccuccguggcggaccucgacccguacgacaagagccugcacucccgggucuuccccagcggcaagugcuccgggaucacggugagcuccaccuacugcagcaccaaccacgacuacaccaucuggaugcccgagaacccccgccugggcacguccugcgacaucuucaccaacagccgggggaagcgcgccuccaagggcagcaagaccugcggcuucguggacgagcgggggcucuacaagagccugaagggcgccugcaagcugaagcucugcgggguccugggccugcgccucauggacggcaccugggccgcgauccagacguccgacgagaccaaguggugcccgcccgaccagcuggugaaccugcacgacuuccggagcgacgagaucgagcaccucguggucgaggagcuggugaagaagcgcgaggagugccuggacgcccucgaguccaucaugaccaccaagagcguguccuuccggcgccugagccaccuccggaagcucguccccggguucggcaaggccuacacgaucuucaacaagacccugauggaggccgacgcccacuacaaguccgugcgcaccuggaacgagaucauccccagcaaggggugccugcgggugggcgggcgcugccacccgcacgucaacggcguguucuucaacggcaucauccucgggcccgacggccacguccugauccccgagaugcaguccagccugcuccagcagcacauggagcugcuggaguccagcgugaucccccucaugcacccgcuggcggaccccuccaccguguucaaggacgacgacgaggccgaggacuucgucgaggugcaccuccccgacgugcacaagcaggucagcgggguggaccugggccugcccuccugggggaaguacgugcugaugagcgccggcguccucacggcccugaugcugaugaucuuccucacgaccugcugccggcgcgccaacaaggcggaguccgcccagcacagccugggcgagcgggggcgcaagguguccgugaccagccagagcggccgcgucaucuccagcugggaguccuacaagagcgggggcgagaccaagcuguga

SEQ ID NO: 94722 - RNA, 1575 nt, Artificial Sequence; identical to SEQ ID NO: 94712
  derived and/or modified CDS sequence (opt1) from glycoprotein__RABV__AB563988.1

SEQ ID NO: 94723 - RNA, 1575 nt, Artificial Sequence
  derived and/or modified CDS sequence (opt1) from glycoprotein__RABV__AB563989.1
augaucccccaggcccugcuguucgugccgcugcuggucuucagccucugcuucggcaaguuccccaucuacaccauccccgacaagcuggggcccugguccccgaucgacauccaccaccugagcugccccaacaaccucgugguggaggacgagggcugcaccaaccuguccggguucagcuacauggagcugaaggucggcuacaucuccgccaucaaggugaacggguucacgugcaccggcguggucaccgaggcggagaccuacacgaacuucgugggcuacgugaccaccaccuucaagcgcaagcacuuccggcccacgcccgacgccugccgcgccgccuacaacuggaagauggccggggacccgcgguacgaggagagccuccacaaccccuaccccgacuaccacuggcugcgcaccgucaagaccaccaaggagucccuggugaucaucagccccuccguggcggaccucgacccguacgacaagagccugcacucccgggucuuccccagcggcaagugcuccgggaucacggugagcuccaccuacugcagcaccaaccacgacuacaccaucuggaugcccgagaacccccgccugggcacguccugcgacaucuucaccaacagccgggggaagcgcgccuccaagggcagcaagaccugcggcuucguggacgagcgggggcucuacaagagccugaagggcgccugcaagcugaagcucugcgggguccugggccugcgccucauggacggcaccugggccgcgauccagacguccgacgagaccaaguggugcccgcccgaccagcuggugaaccugcacgacuuccggagcgacgagaucgagcaccucguggucgaggagcuggugaagaagcgcgaggagugcaucgacgcccuggaguccaucaugaccaccaagagcguguccuuccggcgccucagccaccuccggaagcugguccccggguucggcaaggccuacacgaucuucaacaagacccucauggaggccgacgcccacuacaaguccgugcgcaccuggaacgagaucauccccagcaaggggugccugcgggugggcgggcgcugccacccgcacgucaacggcguguucuucaacggcaucauccuggggcccgacggccacguccucauccccgagaugcaguccagccugcugcagcagcacauggagcuccuggaguccagcgugaucccccugaugcacccgcucgcggaccccuccaccguguucaaggacgacgacgaggccgaggacuucgucgaggugcaccuccccgacgugcacaagcaggucagcgggguggaccugggccugcccuccugggggaaguacgugcugaugagcgccggcguccugacggcccucaugcugaugaucuuccugaugaccugcugccggcgcaccaaccgggccgaguccgcgcagcacagccucggcgagcgcgggcgcaagguguccgugaccagccagagcggccgggucaucuccagcugggaguccuacaagagcgggggcgagacgaagcuguga

SEQ ID NO: 94724 - RNA, 1575 nt, Artificial Sequence
  derived and/or modified CDS sequence (opt1) from glycoprotein__RABV__AB563990.1
augaucccccaggcccugcuguucgugccgcugcuggucuucagccucugcuucggcaaguuccccaucuacaccauccccgacaagcuggggcccugguccccgaucgacauccaccaccugagcugccccaacaaccucgugguggaggacgagggcugcaccaaccuguccggguucagcuacauggagcugaaggucggcuacaucuccgccaucaaggugaacggguucacgugcaccggcguggucaccgaggcggagaccuacacgaacuucgugggcuacgugaccaccaccuucaagcgcaagcacuuccggcccacgcccgacgccugccgcgccgccuacaacuggaagauggccggggacccgcgguacgaggagagccuccacaaccccuaccccgacuaccacuggcugcgcaccgucaagaccaccaaggagucccuggugaucaucagccccuccguggcggaccucgacccguacgacaagagccugcacucccgggucuuccccagcggcaagugcuccgggaucacggugagcuccaccuacugcagcaccaaccacgacuacaccaucuggaugcccgagaacccccgccugggcacguccugcgacaucuucaccaacagccgggggaagcgcgccuccaagggcagcaagaccugcggcuucguggacgagcgggggcucuacaagagccugaagggcgccugcaagcugaagcucugcgggauccugggccugcgccucauggacggcaccugggccgcgauccagacguccgacgagaccaaguggugcccgcccgaccagcuggucaaccugcacgacuuccggagcgacgagaucgagcaccucgugguggaggagcuggucaagaagcgcgaggagugccuggacgcccucgaguccaucaugaccaccaagagcguguccuuccggcgccugagccaccuccggaagcucgugcccggguucggcaaggccuacacgaucuucaacaagacccugauggaggccgacgcccacuacaaguccguccgcaccuggaacgagaucauccccagcaaggggugccugcgggugggcgggcgcugccacccgcacgugaacggcgucuucuucaacggcaucauccucgggcccgacggccacgugcugauccccgagaugcaguccagccugcuccagcagcacauggagcugcuggaguccagcgucaucccccucaugcacccgcuggcggaccccuccaccguguucaaggacgacgacgaggccgaggacuucguggagguccaccuccccgacgugcacaagcaggucagcgggguggaccugggccugcccuccugggggaaguacgugcugaugagcgccggcgugcucacggcccugaugcugaugaucuuccucaugaccugcugccggcgcgccaaccgggcggaguccgcccagcacagccugggcgagcgcgggcgcaaggucuccgugaccagccagagcggccgggugaucuccagcugggaguccuacaagagcgggggcgagaccaagcuguga

SEQ ID NO: 94725 - RNA, 1575 nt, Artificial Sequence
  derived and/or modified CDS sequence (opt1) from glycoprotein__RABV__AB563991.1
augaucccccaggcccugcuguucgugccgcugcuggucuucagccucugcuucggcaaguuccccaucuacaccauccccgacaagcuggggcccugguccccgaucgacauccaccaccugagcugccccaacaaccucgugguggaggacgagggcugcaccaaccuguccggguucagcuacauggagcugaaggucggcuacaucuccgccaucaaggugaacggguucacgugcaccggcguggucaccgaggcggagaccuacacgaacuucgugggcuacgugaccaccaccuucaagcgcaagcacuuccggcccacgcccgacgccugccgcgccgccuacaacuggaagauggccggggacccgcgguacgaggagagccuccacaaccccuaccccgacuaccacuggcugcgcaccgucaagaccaccaaggagucccuggugaucaucagccccuccguggcggaccucgacccguacgacaagagccugcacucccgggucuuccccagcggcaagugcuccgggaucacggugagcuccaccuacugcagcaccaaccacgacuacaccaucuggaugcccgagaacccccgccugggcacguccugcgacaucuucaccaacagccgggggaagcgcgccuccaagggcagcaagaccugcggcuucguggacgagcgggggcucuacaagagccugaagggcgccugcaagcugaagcucugcgggguccugggccugcgccucauggacggcaccugggccgcgauccagacguccgacgagaccaaguggugcccgcccgaccagcuggugaaccugcacgacuuccggagcgacgagaucgagcaccucguggucgaggagcuggugcgcaagcgggaggagugccuggacgcccucgaguccaucaugaccaccaagagcguguccuuccgccggcugagccaccuccgcaagcucguccccggguucggcaaggccuacacgaucuucaacaagacccugauggaggccgacgcccacuacaaguccgugcggaccuggaacgagaucauccccagcaaggggugccugcgcgugggcgggcggugccacccgcacgucaacggcguguucuucaacggcaucauccucgggcccgacggccacguccugauccccgagaugcaguccagccugcuccagcagcacauggagcugcuggaguccagcgugaucccccucaugcacccgcuggcggaccccuccaccguguucaaggacgacgacgaggccgaggacuucgucgaggugcaccuccccgacgugcacaagcaggucagcgggguggaccugggccugcccuccugggggaaguacgugcugaugagcgccggcguccucacggcccugaugcugaugaucuuccucaugaccugcugccgccggaccaaccgcgccgaguccgcgcagcacagccugggcgagcgcgggcggaagguguccgugaccagccagagcggccgcgucaucuccagcugggaguccuacaagagcgggggcgagacgaagcuguga

SEQ ID NO: 94726 - RNA, 1575 nt, Artificial Sequence; identical to SEQ ID NO: 94712
  derived and/or modified CDS sequence (opt1) from glycoprotein__RABV__AB563992.1

SEQ ID NO: 94727 - RNA, 1575 nt, Artificial Sequence; identical to SEQ ID NO: 94712
  derived and/or modified CDS sequence (opt1) from glycoprotein__RABV__AB563993.1

SEQ ID NO: 94728 - RNA, 1575 nt, Artificial Sequence; identical to SEQ ID NO: 94595
  derived and/or modified CDS sequence (opt1) from glycoprotein__RABV__AB563994.1

SEQ ID NO: 94729 - RNA, 1575 nt, Artificial Sequence; identical to SEQ ID NO: 94596
  derived and/or modified CDS sequence (opt1) from glycoprotein__RABV__AB563996.1

SEQ ID NO: 94730 - RNA, 1575 nt, Artificial Sequence
  derived and/or modified CDS sequence (opt1) from glycoprotein__RABV__AB563997.1
augaucccccaggcccugcuguucgugccgauccuggucuucagccugugcuucggcaaguuccccaucuacaccauccccgacaagcucgggcccugguccccgaucgacauccaccaccugagcugccccaacaaccuggugguggaggacgagggcugcaccaaccucuccggguucagcuacauggagcugaaggucggcuacaucuccgccaucaaggugaacggguucacgugcaccggcguggucaccgaggcggagaccuacacgaacuucgugggcuacgugaccaccaccuucaagcgcaagcacuuccggcccacgcccgacgccugccgcgccgccuacaacuggaagauggccggggacccgcgguacgaggagagccugcacaaccccuaccccgacuaccacuggcuccgcaccgucaagaccaccaaggagucccuggugaucaucagccccuccguggcggaccuggacccguacgacaagagccuccacucccgggucuuccccagcggcaagugcuccgggaucacggugagcuccaccuacugcagcaccaaccacgacuacaccaucuggaugcccgagaacccccgccugggcacguccugcgacaucuucaccaacagccgggggaagcgcgccuccaagggcagcaagaccugcggcuucguggacgagcgggggcuguacaagagccucaagggcgccugcaagcugaagcugugcgggguccucggccugcgccugauggacggcaccugggccgcgauccagacguccgacgagaccaaguggugcccgcccgaccagcucgugaaccugcacgacuuccggagcgacgagaucgagcaccugguggucgaggagcucgugaagaagcgcgaggagugccuggacgcccuggaguccaucaugaccaccaagagcguguccuuccggcgccucagccaccuccggaagcugguccccggguucggcaaggccuacacgaucuucaacaagacccucauggaggccgacgcccacuacaaguccgugcgcaccuggaacgagaucauccccagcaaggggugccugcgggugggcgggcgcugccacccgcacgucaacggcguguucuucaacggcaucauccuggggcccgacggccacguccucauccccgagaugcaguccagccugcugcagcagcacauggagcuccuggaguccagcgugaucccccugaugcacccgcucgcggaccccuccaccguguucaaggacgacgacgaggccgaggacuucgucgaggugcaccuccccgacgugcacaagcaggucagcgggguggaccugggccugcccuccugggggaaguacgugcugaugagcgccggcguccugacggcccucaugcugaugaucuuccugaugaccugcugccggcgcgccucccggguggagagcgcgcagcacucccucggcgagcgcgggcgcaaggugagcgucaccagccaguccggccgggugaucagcuccugggagagcuacaaguccgggggcgagaccaagcuguga

SEQ ID NO: 94731 - RNA, 1575 nt, Artificial Sequence
  derived and/or modified CDS sequence (opt1) from glycoprotein__RABV__AB563998.1
augaucccccaggcccugcuguucgugccgcugcuggucuucagccucugcuucggcaaguuccccaucuacaccauccccgacaagcuggggcccugguccccgaucgacauccaccaccugagcugccccaacaaccucgugguggaggacgagggcugcaccaaccuguccggguucagcuacauggagcugaaggucggcuacaucuccgccaucaaggugaacggguucacgugcaccggcguggucaccgaggcggagaccuacacgaacuucgugggcuacgugaccaccaccuucaagcgcaagcacuuccggcccacgcccgacgccugccgcgccgccuacaacuggaagauggccggggacccgcgguacgaggagagccuccacaagcccuaccccgacuaccacuggcugcgcaccgucaagaccaccaaggagucccuggugaucaucagccccuccguggcggaccucgacccguacgacaagagccugcacucccgggucuuccccaacggcaagugcagcgggaucacgguguccagcaccuacugcuccaccaaccacgacuacaccaucuggaugcccgagaacccccgccugggcacgagcugcgacaucuucaccaacucccgggggaagcgcgccagcaagggcuccaagaccugcggcuucguggacgagcgggggcucuacaagagccugaagggcgccugcaagcugaagcucugcgggguccugggccugcgccucauggacggcaccugggccgcgauccagacgagcgacgagaccaaguggugcccgcccgaccagcuggugaaccugcacgacuuccgguccgacgagaucgagcaccucguggucgaggagcuggugaagaagcgcgaggagugccuggacgcccucgagagcaucaugaccaccaaguccgugagcuuccggcgccugucccaccuccggaagcucguccccggguucggcaaggccuacacgaucuucaacaagacccugauggaggccgacgcccacuacaagagcgugcgcaccuggaacgagaucauccccuccaaggggugccugcgggugggcgggcgcugccacccgcacgucaacggcguguucuucaacggcaucauccucgggcccgacggccacguccugauccccgagaugcagagcucccugcuccagcagcacauggagcugcuggagagcuccgugaucccccucaugcacccgcuggcggaccccagcaccguguucaaggacgacgacgaggccgaggacuucgucgaggugcaccuccccgacgugcacaagcaggucuccgggguggaccugggccugcccagcugggggaaguacgugcugauguccgccggcguccucacggcccugaugcugaugaucuuccucaugaccugcugccggcgcgccaaccgggcggagagcgcccagcacucccugggcgagcgcgggcgcaaggugagcgugaccucccagagcggccgggucaucagcuccugggagagcuacaaguccgggggcgagaccaagcuguga

SEQ ID NO: 94732 - RNA, 1575 nt, Artificial Sequence
  derived and/or modified CDS sequence (opt1) from glycoprotein__RABV__AB563999.1
augaucccccaggcccugcuguucgugccgcugcuggucagcucccucugcuucggcaaguuccccaucuacaccauccccgacaagcuggggcccuggagcccgaucgacauccaccaccuguccugccccaacaaccucgugguggaggacgagggcugcaccaaccugagcggguucuccuacauggagcugaaggucggcuacaucagcgccaucaaggugaacggguucacgugcaccggcguggucaccgaggcggagaccuacacgaacuucgugggcuacgugaccaccaccuucaagcgcaagcacuuccggcccacgcccgacgccugccgcgccgccuacaacuggaagauggccggggacccgcgguacgaggagucccuccacaaccccuaccccgacuaccacuggcugcgcaccgucaagaccaccaaggagagccuggugaucaucucccccagcguggcggaccucgacccguacgacaagucccugcacagccgggucuuccccuccggcaagugcagcgggaucacgguguccagcaccuacugcuccaccaaccacgacuacaccaucuggaugcccgagaacccccgccugggcacgagcugcgacaucuucaccaacucccgggggaagcgcgccagcaagggcagcaagaccugcggcuucguggacgagcgggggcucuacaagucccugaagggcgccugcaagcugaagcucugcgggguccugggccugcgccucauggacggcaccugggccgcgauccagacgagcgacgagaccaaguggugcccgcccgaccagcuggugaaccugcacgacuuccgguccgacgagaucgagcaccucguggucgaggagcuggugaagaagcgcgaggagugccuggacgcccucgagagcaucaugaccaccaaguccgugagcuuccggcgccugucccaccuccggaagcucguccccggguucggcaaggccuacacgaucuucaacaagacccugauggaggccgacgcccacuacaagagcgugcgcaccuggaacgagaucauccccuccaaggggugccugcgggugggcgggcgcugccacccgcacgucaacggcguguucuucaacggcaucauccucgggcccgacggccacguccugauccccgagaugcagagcucccugcuccagcagcacauggagcugcuggagagcuccgugaucccccucaugcacccgcuggcggaccccagcaccguguucaaggacgacgacgaggccgaggacuucgucgaggugcaccuccccgacgugcacaagcaggucuccgggguggaccugggccugcccagcugggggaaguacgugcugacguccgccggcguccucaccgcccugaugcugaugaucuuccucaugaccugcugccggcgcgccaaccgggcggagagcgcccagcacucccugggcgagcgcgggcgcaaggugagcgugaccagccagucccggcgcgucaucagcuccugggagagcuacaaguccggcggggagacgaagcuguga

SEQ ID NO: 94733 - RNA, 1575 nt, Artificial Sequence
  derived and/or modified CDS sequence (opt1) from glycoprotein__RABV__AB564001.1
augaucccccaggcccugauguucgugccgcuccuggucuucagccugugcuucggcaaguuccccaucuacaccauccccgacaagcucgggcccugguccccgaucgacauccaccaccugagcugccccaacaaccuggugguggaggacgagggcugcaccaaccucuccggguucagcuacauggagcugaaggucggcuacaucuccgccaucaaggugaacggguucacgugcaccggcguggucaccgaggcggagaccuacacgaacuucgugggcuacgugaccaccaccuucaagcgcaagcacuuccggcccaugcccgacgccugccgcgccgccuacaacuggaagauggccggggacccgcgguacgaggagagccugcacaaccccuaccccgacuaccacuggcuccgcacggucaagaccaccaaggagucccuggugaucaucagccccuccguggcggaccuggacccguacgacaagagccuccacucccgggucuuccccagcggcaagugcuccgggaugaccgugagcuccacguacugcagcaccaaccacgacuacaccaucuggaugcccgagaacccccgccugggcaccuccugcgacaucuucacgaacagccgggggaagcgcgccuccaagggcagcaagaccugcggcuucguggacgagcgggggcuguacaagagccucaagggcgccugcaagcugaagcugugcgggguccucggccugcgccugauggacggcaccugggccgcgauccagaccuccgacgagacgaaguggugcccgcccgaccagcucgugaaccugcacgacuuccggcuggacgagaucgagcaccucguggucgaggagcuggugaagaagcgcgaggagugccuggacgcccucgagagcaucaugaccaccaaguccgugagcuuccggcgccugucccaccuccggaagcugguccccggguucggcaaggccuacaccaucuucaacaagacgcugauggaggccgacgcccacuacaagagcgugcgcaccuggaacgagaucauccccuccaaggggugccugcgggugggcgggcgcugccacccgcacgucaacggcguguucuucaacggcaucauccucgggcccgacggccacguccugauccccgagaugcagagcucccugcuccagcagcacauggagcugcuggagagcuccgugaucccccucaugcacccgcuggcggaccccagcaccguguucaagggggacgacgaggccgaggacuucgucgaggugcaccuccccgacgugcacaagcaggucuccggcguggaccuggggcugcccagcuggggcaaguacgugcugauguccgccggcguccucaccgcccugaugcugaugaucuuccucaugacgugcugcaagcgggccaaccgcgcggagagcgcccaccacucccugggggagcggggccgcaaggugagcgugaccucccagagcgggcgcgucaucagcuccugggagagcuacaaguccggcggggagaccaagcuguga

SEQ ID NO: 94734 - RNA, 1575 nt, Artificial Sequence
  derived and/or modified CDS sequence (opt1) from glycoprotein__RABV__AB564002.1
augaucccccgcgcccugauguucgugccgcuccuggucuucagccugugcuucggcaaguuccccaucuacaccauccccgacaagcucgggcccugguccccgaucgacauccaccaccugagcugccccaacaaccuggugguggaggacgagggcugcaccaaccucuccggguucagcuacauggagcugaaggucggcuacaucuccgccaucaaggugaacggguucacgugcaccggcguggucaccgaggcggagaccuacacgaacuucgugggcuacgugaccaccaccuucaagcggaagcacuuccgccccaugcccgacgccugccgggccgccuacaacuggaagauggccggggacccgcgcuacgaggagagccugcacaaccccuaccccgacuaccacuggcuccggacggucaagaccaccaaggagucccuggugaucaucagccccuccguggcggaccuggacccguacgacaagagccuccacucccgcgucuuccccagcggcaagugcuccgggaugaccgugagcuccacguacugcagcaccaaccacgacuacaccaucuggaugcccgagaacccccggcugggcaccuccugcgacaucuucacgaacagccgcgggaagcgggccuccaagggcagcaagaccugcggcuucguggacgagcgcgggcuguacaagagccucaagggcgccugcaagcugaagcugugcgggguccucggccugcggcugauggacggcaccugggccgcgauccagaccuccgacgagacgaaguggugcccgcccgaccagcucgugaaccugcacgacuuccgcagcgacgagaucgagcaccugguggucgaggagcucgugaagaagcgggaggagugccuggacgcccuggaguccaucaugaccaccaagagcguguccuuccgccggcucagccaccuccgcaagcugguccccggguucggcaaggccuacaccaucuucaacaagacgcugauggaggccgacgcccacuacaaguccgugcggaccuggaacgagaucauccccagcaaggggugccugcgcgugggcgggcggugccacccgcacgucaacggcguguucuucaacggcaucauccuggggcccgacggccacguccucauccccgagaugcaguccagccugcugcagcagcacauggagcuccuggaguccagcgugaucccccugaugcacccgcucgcggaccccuccaccguguucaagggggacgacgaggccgaggacuucgucgaggugcaccuccccgacgugcacaagcaggucagcggcguggaccuggggcugcccuccuggggcaaguacgugcugaugagcgccggcguccugaccgcccucaugcugaugaucuuccugaugacgugcugcaagcgcgccaaccgggcggaguccgcccaccacaaccucggggagcgcggccgcaaggugagcgugaccucccagagcgggcgggucaucagcuccugggagagcuacaaguccggcggggagaccaagcuguga

SEQ ID NO: 94735 - RNA, 1575 nt, Artificial Sequence
  derived and/or modified CDS sequence (opt1) from glycoprotein__RABV__AB564004.1
augaucccccaggcccugauguucgugccgcuccuggucuucagccugugccucggcaaguuccccaucuacaccauccccgacaagcuggggcccugguccccgaucgacauccaccaccugagcugccccaacaaccucgugguggaggacgagggcugcaccaaccuguccggguucagcuacauggagcugaaggucggcuacaucuccgccaucaaggugaacggguucacgugcaccggcguggucaccgaggcggagaccuacacgaacuucgugggcuacgugaccaccaccuucaagcgcaagcacuuccggcccaugcccgacgccugccgcgccgccuacaacuggaagauggccggggacccgcgguacgaggagagccuccacaaccccuaccccgacuaccacuggcugcgcacggucaagaccaccaaggagucccuggugaucaucagccccuccguggcggaccucgacccguacgacaagagccugcacucccgggucuuccccggcgggaagugcagcggcaugaccguguccagcacguacugcuccaccaaccacgacuacaccaucuggaugcccgagaacccccgccuggggaccagcugcgacaucuucacgaacucccggggcaagcgcgccagcaagggcuccaagaccugcggguucguggacgagcggggccucuacaagagccugaagggggccugcaagcugaagcucugcggcguccugggccugcgccucauggacgggaccugggccgcgauccagaccagcgacgagacgaaguggugcccgcccgaccagcuggugaaccugcacgacuuccgguccgacgagaucgagcaccucguggucgaggagcuggugaagaagcgcgaggagugccuggacgcccucgagagcaucaugaccaccaaguccgugagcuuccggcgccugucccaccuccggaagcugguccccggcuucgggaaggccuacaccaucuucaacaagacgcugauggaggccgacgcccacuacaagagcgugcgcaccuggaacgagaucauccccuccaagggcugccugcgggucgggggccgcugccacccgcacgugaacggcguguucuucaacgggaucauccucggccccgacgggcacguccugauccccgagaugcagagcucccugcuccagcagcacauggagcugcuggagagcuccgugaucccccucaugcacccgcuggcggaccccagcaccguguucaagggcgacgacgaggccgaggacuucgucgaggugcaccuccccgacgugcacaagcaggucuccgggguggaccugggccugcccagcuggggcaaguacgugcugauguccgccgggguccucaccgcccugaugcugaugaucuuccucaugacgugcugcaagcgggccaaccgcgcggagagcgcccaccacucccugggcgagcgggggcgcaaggugagcgugaccucccagagcggccgcgucaucagcuccugggagagcuacaaguccgggggcgagaccaagcuguga

SEQ ID NO: 94736 - RNA, 1575 nt, Artificial Sequence; identical to SEQ ID NO: 94663
  derived and/or modified CDS sequence (opt1) from glycoprotein__RABV__AB564005.1

SEQ ID NO: 94737 - RNA, 1575 nt, Artificial Sequence; identical to SEQ ID NO: 94663
  derived and/or modified CDS sequence (opt1) from glycoprotein__RABV__AB564006.1

SEQ ID NO: 94738 - RNA, 1575 nt, Artificial Sequence
  derived and/or modified CDS sequence (opt1) from glycoprotein__RABV__AB564007.1
augaucccccaggcccugauguucgugccgcuccuggucuucagccugugcuucggcaaguuccccaucuacaccauccccgacaagcucgggcccugguccccgaucgacauccaccaccugagcugccccaacaaccuggugguggaggacgagggcugcaccaaccucuccggguucagcuacauggagcugaaggucggcuacaucuccgccaucaaggugaacggguucacgugcaccggcguggucaccgaggcggagaccuacacgaacuucgugggcuacgugaccaccaccuucaagcgcaagcacuuccggcccaugcccgacgccugccgcgccgccuacaacuggaagauggccggggacccgcgguacgaggagagccugcacaaccccuaccccgacuaccacuggcuccgcacggucaagaccaccaaggagucccuggugaucaucagccccuccguggcggaccuggacccguacgacaagagccuccacucccgggucuuccccggcgggaagugcagcggcaugaccguguccagcacguacugcuccaccaaccacgacuacaccaucuggaugcccgagaacccccgccuggggaccagcugcgacaucuucacgaacucccggggcaagcgcgccagcaagggcuccaagaccugcggguucguggacgagcggggccuguacaagagccucaagggggccugcaagcugaagcugugcggcguccucggccugcgccugauggacgggaccugggccgcgauccagaccagcgacgagacgaaguggugcccgcccgaccagcucgugaaccugcacgacuuccgguccgacgagaucgagcaccugguggucgaggagcucgugaagaagcgcgaggagugccuggacgcccuggagagcaucaugaccaccaaguccgugagcuuccggcgccucucccaccuccggaagcugguccccggcuucgggaaggccuacaccaucuucaacaagacgcugauggaggccgacgcccacuacaagagcgugcgcaccuggaacgagaucauccccuccaagggcugccugcgggucgggggccgcugccacccgcacgugaacggcguguucuucaacgggaucauccugggccccgacgggcacguccucauccccgagaugcagagcucccugcugcagcagcacauggagcuccuggagagcuccgugaucccccugaugcacccgcucgcggaccccagcaccguguucaagggcgacgacgaggccgaggacuucgucgaggugcaccuccccgacgugcacaagcaggucuccgggguggaccugggccugcccagcuggggcaaguacgugcugauguccgccgggguccugaccgcccucaugcugaugaucuuccugaugacgugcugcaagcgggccaaccgcgccaagagcgcgcaccacucccucggcgagcgggggcgcaaggugagcgugaccucccagagcggccgcgucaucagcuccugggagagcuacaaguccgggggcgagaccaagcuguga

SEQ ID NO: 94739 - RNA, 1575 nt, Artificial Sequence; identical to SEQ ID NO: 94625
  derived and/or modified CDS sequence (opt1) from glycoprotein__RABV__AB564008.1

SEQ ID NO: 94740 - RNA, 1575 nt, Artificial Sequence
  derived and/or modified CDS sequence (opt1) from glycoprotein__RABV__AB564009.1
augaacccccaggcccugauguucgugccgcuccuggucuucagccugugcuucggcaaguuccccaucuacaccauccccgacaagcucgggcccugguccccgaucgacauccaccaccugagcugccccaacaaccuggugguggaggacgagggcugcaccaaccucuccggguucagcuacauggagcugaaggucggcuacaucuccgccaucaaggugaacggguucacgugcaccggcguggucaccgaggcggagaccuacacgaacuucgugggcuacgugaccaccaccuucaagcgcaagcacuuccggcccacgcccgacgccugccgcgccgccuacaacuggaagauggccggggacccgcgguacgaggagagccugcacaaccccuaccccgacuaccacuggcuccgcaccgucaagaccaccaaggagucccuggugaucaucagccccuccguggcggaccuggacccguacgacaagagccuccacucccgggucuuccccagcggcaagugcuccgggaucacggugagcuccaccuacugcagcaccaaccacgacuacaccaucuggaugcccgagaacccccgccugggcacguccugcgacaucuucaccaacagccgggggaagcgcgccuccaagggcagcaagaccugcggcuucguggacgagcgggggcuguacaagagccucaagggcgccugcaagcugaagcugugcgggguccucggccugcgccugauggacggcaccugggccgcgauccagacguccgacgagaccaaguggugcccgcccgaccagcucgugaaccugcacgacuuccggagcgacgagaucgagcaccugguggucgaggagcucgugaagaagcgcgaggagugccuggacgcccuggaguccaucaugaccaccaagagcguguccuuccggcgccucagccaccuccggaagcugguccccggguucggcaaggccuacacgaucuucaacaagacccugauggaggccgacgcccacuacaaguccgugcgcaccuggaacgagaucauccccagcaaggggugccugcgggugggcgggcgcugccacccgcacgucaacggcguguucuucaacggcaucauccuggggcccgacggccacguccucauccccgagaugcaguccagccugcugcagcagcacguggagcuccuggaguccagcgugaucccccugaugcacccgcucgcggaccccuccaccgucuucaaggacgacgacgaggccgaggacuucguggaggugcaccuccccgacguccacaagcaggucagcgggguggaccugggccugcccuccugggggaaguacgugcugaugagcgccggcgugcugacggcccucaugcugaugaucuuccugaugaccugcugccggcgcgccaaccgggcggaguccgcccagcacagccucggcgagcgcgggcgcaagguguccaucaccagccagagcggccgggucaucuccagcugggaguccuacaagagcgggggcgagaccaagcuguga

SEQ ID NO: 94741 - RNA, 1575 nt, Artificial Sequence; identical to SEQ ID NO: 94625
  derived and/or modified CDS sequence (opt1) from glycoprotein__RABV__AB564010.1

SEQ ID NO: 94742 - RNA, 1575 nt, Artificial Sequence; identical to SEQ ID NO: 94625
  derived and/or modified CDS sequence (opt1) from glycoprotein__RABV__AB564011.1

SEQ ID NO: 94743 - RNA, 1575 nt, Artificial Sequence
  derived and/or modified CDS sequence (opt1) from glycoprotein__RABV__AB564012.1
augaacccccaggcccugauguucgugccgcuccuggucuucagccugugcuucggcaaguuccccaucuacaccauccccgacaagcucgggcccugguccccgaucgacauccaccaccugagcugccccaacaaccuggugguggaggacgagggcugcaccaaccucuccggguucagcuacauggagcugaaggucggcuacaucuccgccaucaaggugaacggguucacgugcaccggcguggucaccgaggcggagaccuacacgaacuucgugggcuacgugaccaccaccuucaagcgcaagcacuuccggcccacgcccgacgccugccgcgccgccuacaacuggaagauggccggggacccgcgguacgaggagagccugcacaaccccuaccccgacuaccacuggcuccgcaccgucaagaccaccaaggagucccuggugaucaucagccccuccguggcggaccuggacccguacgacaagagccuccacucccgggucuuccccagcggcaagugcuccgggaucacggugagcuccaccuacugcagcaccaaccacgacuacaccaucuggaugcccgagaacccccgccugggcacguccugcgacaucuucaccaacagccgggggaagcgcgccuccaagggcagcaagaccugcggcuucguggacgagcgggggcuguacaagagccucaagggcgccugcaagcugaagcugugcgggguccucggccugcgccugauggacggcaccugggccgcgauccagacguccgacgagaccaaguggugcccgcccgaccagcucgugaaccugcacgacuuccacagcgacgagaucgagcaccugguggucgaggagcucgugaagaagcgggaggagugccuggacgcccuggaguccaucaugaccaccaagagcguguccuuccgccggcucagccaccuccgcaagcugguccccggguucggcaaggccuacacgaucuucaacaagacccugauggaggccgacgcccacuacaaguccgugcggaccuggaacgagaucauccccagcaaggggugccugcgcgugggcgggcggugccacccgcacgucaacggcguguucuucaacggcaucauccuggggcccgacggccacguccucauccccgagaugcaguccagccugcugcagcagcacauggagcuccuggaguccagcgugaucccccugaugcacccgcucgcggaccccuccaccguguucaaggacgacgacgaggccgaggacuucgucgaggugcaccuccccgacgugcacaagcaggucagcgggguggaccugggccugcccuccugggggaaguacgugcugaugagcgccggcguccugacggcccucaugcugaugaucuuccugaugaccugcugccgccgggccaaccgcgcggaguccgcccagcacagccucggcgagcgggggcgcaagguguccgugaccagccagagcggccgcgucaucuccagcugggaguccuacaagagcgggggcgagaccaagcuguga

SEQ ID NO: 94744 - RNA, 1575 nt, Artificial Sequence
  derived and/or modified CDS sequence (opt1) from glycoprotein__RABV__AB564015.1
augaacccccaggcccugauguucgugccgcuccuggucuucagccugugcuucggcaaguuccccaucuacaccauccccgacaagcucgggcccugguccccgaucgacauccaccaccugagcugccccaacaaccuggugguggaggacgagggcugcaccaaccucuccggguucagcuacauggagcugaaggucggcuacaucuccgccaucaaggugaacggguucacgugcaccggcguggucaccgaggcggagaccuacacgaacuucgugggcuacgugaccaccaccuucaagcgcaagcacuuccggcccacgcccgacgccugccgcgccgccuacaacuggaagauggccggggacccgcgguacgaggagagccugcacaaccccuaccccgacuaccacuggcuccgcaccgucaagaccaccaaggagucccuggugaucaucagccccuccguggcggaccuggacccguacgacaagagccuccacucccgggucuuccccagcggcaagugcuccgggaucacggugagcuccaccuacugcagcaccaaccacgacuacaccaucuggaugcccgagaacccccgccugggcacguccugcgacaucuucaccaacagccgggggaagcgcgccuccaagggcagcaagaccugcggcuucguggacgagcgggggcuguacaagagccucaagggcgccugcaagcugaagcugugcgggguccucggccugcgccugauggacggcaccugggccgcgauccagacguccgacgagaccaaguggugcccgcccgaccagcucgugaaccugcacgacuuccggagcgacgagaucgagcaccugguggucgaggagcucgugaagaagcgcgaggagugccuggacgcccuggaguccaucaugaccaccaagagcguguccuuccggcgccucagccaccuccggaagcugguccccggguucggcaaggccuacacgaucuucaacaagacccugauggaggccgacgcccacuacaaguccgugcgcaccuggaacgagaucauccccagcaaggggugccugcgggugggcgggcgcugccacccgcacgucaacggcguguucuucaacggcaucauccuggggcccgacggccacguccucauccccgagcggcaguccagccugcugcagcagcacauggagcuccuggaguccagcgugaucccccugaugcacccgcucgcggaccccuccaccguguucaaggacgacgacgaggccgaggacuucgucgaggugcaccuccccgacgugcacaagcaggucagcgggguggaccugggccugcccuccugggggaaguacgugcugaugagcgccggcguccugacggcccucaugcugaugaucuuccugaugaccugcugccgccgggccaaccgcgcggaguccgcccagcacagccucggcgagcgcgggcggaagguguccgugaccagccagagcggccgcgucaucuccagcugggaguccuacaagagcgggggcgagaccaagcuguga

SEQ ID NO: 94745 - RNA, 1575 nt, Artificial Sequence
  derived and/or modified CDS sequence (opt1) from glycoprotein__RABV__AB564016.1
augaacccccaggcccugauguucgugccgcuccugggcuucagccugugcuucgggaaguuccccaucuacaccauccccgacaagcucggccccugguccccgaucgacauccaccaccugagcugccccaacaaccuggucguggaggacgaggggugcaccaaccucuccggcuucagcuacauggagcugaaggugggguacaucuccgccaucaaggucaacggcuucacgugcaccggcguggugaccgaggcggagaccuacacgaacuucgucggguacgugaccaccaccuucaagcgcaagcacuuccggcccacgcccgacgccugccgcgccgccuacaacuggaagauggccggcgacccgcgguacgaggagagccugcacaaccccuaccccgacuaccacuggcuccgcaccgugaagaccaccaaggagucccuggucaucaucagccccuccguggcggaccuggacccguacgacaagagccuccacucccggguguuccccagcgggaagugcuccggcaucacggucagcuccaccuacugcagcaccaaccacgacuacaccaucuggaugcccgagaacccccgccuggggacguccugcgacaucuucaccaacagccggggcaagcgcgccuccaagggcagcaagaccugcggguucguggacgagcggggccuguacaagagccucaagggggccugcaagcugaagcugugcggcgugcucggccugcgccugauggacgggaccugggccgcgauccagacguccgacgagaccaaguggugcccgcccgaccagcucgucaaccugcacgacuuccggagcgacgagaucgagcaccuggugguggaggagcucgucaagaagcgcgaggagugccuggacgcccuggaguccaucaugaccaccaagagcguguccuuccggcgccucagccaccuccggaagcuggugcccggcuucgggaaggccuacacgaucuucaacaagacccugauggaggccgacgcccacuacaaguccguccgcaccuggaacgagaucauccccagcaagggcugccugcgggucgggggccgcugccacccgcacgugaacggcguguucuucaacgggaucauccugggccccgacgggcacgugcucauccccgagaugcaguccagccugcugcagcagcacauggagcuccuggaguccagcgucaucccccugaugcacccgcucgcggaccccuccaccguguucaaggacgacgacgaggccgaggacuucguggagguccaccuccccgacgugcacaagcaggucagcggcguggaccuggggcugcccuccuggggcaaguacgugcugaugagcgccggcgugcugacggcccucaugcugaugaucuuccugaugaccugcugccggcgcgccaaccgggcggaguccgcccagcacagccucggggagcgcggccgcaaggucuccgugaccagccagagcgggcgggugaucuccagcugggaguccuacaagagcggcggggagaccaagcuguga

SEQ ID NO: 94746 - RNA, 1575 nt, Artificial Sequence
  derived and/or modified CDS sequence (opt1) from glycoprotein__RABV__AB564017.1
augaacccccaggcccugauguucgugccgcuccuggucuucagccugugcuucggcaaguuccccaucuacaccauccccgacaagcucgggcccugguccccgaucgacauccaccaccugagcugccccaacaaccuggugguggaggacgagggcugcaccaaccucuccggguucagcuacauggagcugaaggucggcuacaucuccgccaucaaggugaacggguucacgugcaccggcguggucaccgaggcggagaccuacacgaacuucgugggcuacgugaccaccaccuucaagcgcaagcacuuccggcccacgcccgacgccugccgcgccgccuacaacuggaagauggccggggacccgcgguacgaggagagccugcacaaccccuaccccgacuaccacuggcuccgcaccgucaagaccaccaaggagucccuggugaucaucagccccuccguggcggaccuggacccguacgacaagagccuccacucccgggucuuccccagcggcaagugcuccgggaucacggugagcuccaccuacugcagcaccaaccacgacuacaccaucuggaugcccgagaacccccgccugggcacguccugcgacaucuucaccaacagccgggggaagcgcgccuccgagggcagcaagaccugcggcuucguggacgagcgggggcuguacaagagccucaagggcgccugcaagcugaagcugugcgggguccucggccugcgccugauggacggcaccugggccgcgauccagacguccgacgagaccaaguggugcccgcccgaccagcucgugaaccugcacgacuuccggagcgacgagaucgagcaccugguggucgaggagcucgugaagaagcgcgaggagugccuggacgcccuggaguccaucaugaccaccaagagcguguccuuccggcgccucagccaccuccggaagcugguccccggguucggcaaggccuacacgaucuucaacaagacccugauggaggccgacgcccacuacaaguccgugcgcaccuggaacgagaucauccccagcaaggggugccugcgggugggcgggcgcugccacccgcacgucaacggcguguucuucaacggcaucauccuggggcccgacggccacguccucauccccgagaugcaguccagccugcugcagcagcacauggagcuccuggaguccagcgugaucccccugaugcacccgcucgcggaccccuccaccguguucaaggacgacgacgaggccgaggacuucgucgaggugcaccuccccgacgugcacaagcaggucagcgggguggaccugggccugcccuccugggggaaguacgugcugaugagcgccggcguccugacggcccucaugcugaugaucuuccugaugaccugcugccggcgcgccaaccgggcggaguccgcccagcacagccucggcgagcgcgggcgcaagguguccgugaccagccagagcggccgggucaucuccagcugggaguccuacaagagcgggggcgagaccaagcuguga

SEQ ID NO: 94747 - RNA, 1575 nt, Artificial Sequence
  derived and/or modified CDS sequence (opt1) from glycoprotein__RABV__AB569299.1
auggugccccaggcccugcuguucgucccgcugcugguguucagccucugcuucggcaaguuccccaucuacaccauccccgacaagcuggggcccugguccccgaucgacauccaccaccugagcugccccaacaaccucguggucgaggacgagggcugcaccaaccuguccggguucagcuacauggagcugaaggugggcuacaucuccgccaucaaggugaacggguucacgugcaccggcgucgugaccgaggcggagaccuacacgaacuucgugggcuacgucaccaccaccuuccgccggaagcacuuccgccccacgcccgacgccugccgggccgccuacaacuggaagauggccggggacccgcgcuacgaggagagccuccacaaccccuaccccgacuaccacuggcugcggaccgugaagaccaccaaggagucccuggugaucaucagccccuccgucgcggaccucgacccguacgacaagagccugcacucccgcguguuccccggcgggaagugcagcggcaucacgguguccagcaccuacugcuccaccaaccacgacuacaccaucuggaugcccgagaacccccggcuggggacgagcugcgacaucuucgucaacucccgcggcaagcgggccagcaagggcgggaagaccugcggcuucguggacgagcgcgggcucuacaagucccugaagggcgccugcaagcugaagcucugcggcgugccggggcugcggcugauggacggcaccugggucgccauccagaccagcgacgagacgaaguggugcccgcccgaccagcucgugaaccugcacgacuuccgcagcgacgagaucgagcaccugguggucgaggagcucgugaagaagcgggaggagugccuggacgcgcuggaguccaucaugaccaccaagagcguguccuuccgccggcucagccaccuccgcaagcugguccccggguucggcaaggccuacaccaucuucaacaagacgcucauggaggccgacgcccacuacaaguccgugcggaccuggaacgagaucauccccagcaaggggugccugcgcgucggcggccggugccacccccacgugaacgggguguucuucaacggcaucauccuggggcccgacggccacguccucauccccgagaugcaguccagccugcugcagcagcacauggagcuccuggaguccagcgugaucccgcugaugcacccccucgccgaccccuccaccguguucaaggacggggacgaggcggaggacuucgucgaggugcaccuccccgacgugcacaagcugaucagcggcgucgaccugggccugccguccugggggaaguacgugcugaugagcgccggcauccucaucacccugaugcugaugaucuuccucaugacgugcugccgccgggugaaccaggccggguccaagcagcacggccuggagggggccggccgcaaggucagcgugaccucccagaacggccgcgugaucagcuccugggagagcuacaagaacgggggcgagacccggcuguga

SEQ ID NO: 94748 - RNA, 1575 nt, Artificial Sequence
  derived and/or modified CDS sequence (opt1) from glycoprotein__RABV__AB608731.1
augaucccccaggcccugcuguucgugccgcugcugauccccagccucugcaucggcgaguuccccaucuacaccauccccgacaagcuggggccguggacccccaucgacauccaccaccuguccugccccaacaaccucgucgccgagaacgacggcugcacgagccuguccggguucagcuacauggagcugaaggugggcuacaucuccgcgaucaaggugaacggguucacgugcaccggcgucgugaccgaggccgagaccuacaccaacuucgugggcuacgucaccaccacguucaagcgcaagcacuuccggcccaugccggacgccugccgcgccgcccacgacuggaagauggcgggggacccccgguacgaggacagccuccagaaccccuaccccgacuaccacuggcugcgcaccgugaagaccaccaaggagucccuggugaucaucagcccguccgucgccgaccucgaccccuacgacaagagccugcacucccggguguuccccagcggcaagugccuggggaucacgguguccagcaccuacugcuccaccaaccacgacuacaccaucuggaugcccgucgagccgcgccucggcacgagcugcgacaucuucaccaacucccgggggaagaaggccagcaagggcggccgcgugugcggguucguggacgagcggggccuguacaagucccugaagggggccugcaagcucaagcugugcggcguccccggcauccgccugauggacgggaccugggugagcauccagaccagcgaggacaucaaguggugcccgcccgaccggcucgugaaccugcacgacuuccacuccgacgagcuggagcaccucgucguggaggagcugaucaagcgccgggagaacugccuggacgcgcucgagagcaucgugacgaccaaguccgucagcuuccgccggcugucccaccuccgcaagcucgugcccggcuucgggaaggccuacaccaucuucaacaagacccugauggaggccgacgcccacuacaagagcgugaagacguggaacgaggucauccccuccaagggcugccuggaggucgggggcaagugccacccgcccgugaacggcguguucuucaacgggaucauccucggccccgacgggaacgugcugauccccgagaugcagagcucccugcuccagcagcacauggagcugcuggagagcuccgucaucccccucaugcacccccuggccgacccgagcaccguguucaaggagggcgacgaggcggaggacuucguggagguccaccuccccgacgugcacaagcaggucuccgacguggaccuggggcugcccagcuggggcaaguaccugcucauguccgccggcgcccuggccauccugauccucgccaucgugcugaucaucugcugccggcgcgugaacaagaccgggagcacccagcggggccaccgcgagucccgggggaagaugagcgucgcgccgcagaacggcaagaucaucuccagcugggagcuguacaagagcgaguccgagacggggcuguga

SEQ ID NO: 94749 - RNA, 1575 nt, Artificial Sequence
  derived and/or modified CDS sequence (opt1) from glycoprotein__RABV__AB635373.1
auggugccccaggcccugcuguucgucccgcugcugguguucagccugugcuucggcaaguuccccaucuacaccauccccgacaagcuggggcccugguccccgaucgacauccaccaccugagcugccccaacaaccucguggucgaggacgagggcugcaccaaccuguccggguucagcuacauggagcugaaggugggcuacaucuccgccaucaaggugaacggguucacgugcaccggcgucgugaccgaggcggagaccuacacgaacuucgugggcuacgucaccaccaccuuccgccggaagcacuuccgccccacgcccgacgccugccgggccgccuacaacuggaagauggccggggacccgcgcuacgaggagagccuccacaaccccuaccccgacuaccacuggcugcggaccgugaagaccaccaaggagucccuggugaucaucagccccuccgucgcggaccucgacccguacgacaagagccugcacucccgcguguuccccggcgggaagugcagcggcaucacgguguccagcaccuacugcuccaccaaccacgacuacaccaucuggaugcccgagaacccccggcuggggacgagcugcgacaucuucaucaacucccgcggcaagcgggccagcaagggcgggaagaccugcggcuucgucgacgagcgcgggcucuacaagucccugaagggcgccugcaagcugaagcucugcggcgugccggggcugcggcugauggacggcaccuggguggccauccagaccagcgacgagacgaaguggugcccgcccgaccagcucgucaaccugcacgacuuccacagcgacgagaucgagcaccuggugguggaggagcucgucaagaagcgcgaggagugccuggacgcgcuggaguccaucaugaccaccaagagcguguccuuccggcgccucagccaccuccggaagcuggugcccggguucggcaaggccuacaccaucuucaacaagacgcucauggaggccgacgcccacuacaaguccguccgcaccuggaacgagaucauccccagcaaggggugccugcgggugggcggccgcugccacccccacgucaacgggguguucuucaacggcaucauccuggggcccgacggccacgugcucauccccgagaugcaguccagccugcugcagcagcacauggagcuccuggaguccagcgucaucccgcugaugcacccccucgccgaccccuccaccguguucaaggacggggacgaggcggaggacuucguggagguccaccuccccgacgugcacaagcugaucagcggcguggaccugggccugccguccugggggaaguacguccugaugagcgccggcauccucaccacgcugaugcugaugaucuuccucaugaucugcugccggcgcgugaaccagaccggguccaagcagcacggccucgggggcgccggccggaaggugagcgucaccucccagaacgggcgcgugaucagcuccugggagagcuacaagagcggcggggagacccgccuguga

SEQ ID NO: 94750 - RNA, 1575 nt, Artificial Sequence
  derived and/or modified CDS sequence (opt1) from glycoprotein__RABV__AB645847.1
auggugccccaggcccugcucgucgugccgcugcugggcuucagccucugcuucgggaaguuccccaucuacaccauccccgacaagcugggccccugguccccgaucgacauccaccaccugagcugccccaacaaccucguggucgaggacgaggggugcaccaaccuguccggcuucagcuacauggagcugaaggugggguacaucuccgccaucaaggugaacggcuucacgugcaccggcgucgugaccgaggcggagaccuacacgaacuucgugggguacgucaccaccaccuucaagcgcaagcacuuccggcccacgcccgacgagugccgcgccgccuacaacuggaagauggccggcgacccgcgguacgaggagagccuccacaaccccuaccccgacuaccacuggcugcgcaccgugaagaccaccaaggagucccuggugaucaucagccccuccgucgccgaccucgacccguacgacaagagccugcacucccggguguuccccagcgggaagugcuccggcaucacggugagcuccaccuacugcagcaccaaccacgacuacaccaucuggaugcccgagaacccccgccuggggacguccugcgacaucuucaccaacagccggggcaagcgcgcguccaagggcagcaagaccugcggguucgucgacgagcggggccucuacaagagccugaagggggccugcaagcugaagcucugcggcgugcugggccugaagcucauggacgggaccuggguggccaugcagacguccgacgagaccaaguggugcccgcccgaccagcuggucaaccugcacgacuuccgcagcgacgagaucgagcaccucgugguggaggaccuggucaagaagcgggaggagugccuggacgcccucgaguccaucaugaccaccaagagcguguccuuccgccggcugagccaccuccgcaagcuggugcccggcuucgggaaggcguacacgaucuucaacaagacccugauggaggccgacgcccacuacaaguccguccggaccuggaacgaggugauccccagcaagggcugccugaaggucgggggccgcugccacccgcacgugaacggcguguucuucaacggggucauccucggccccgacgggcacgugcugauccccgagaugcaguccagccugcuccggcagcacauggagcugcuggaguccagcgugaucccccucaugcacccgcuggccgaccccuccaccgucuucaaggacggcgacgaggccgaggacuucguggaggugcaccuccccgacguccacaagcaggucagcgggguggaccugggccugcccaacuggggcaaguacgugucccugagcgcgggggcccucaucgcccugaugcugaugaucuuccucaugacgugcugccgcaaggugaaccggccggagcccacccagcgcucccuggagggcaaggggcggaaggugagcgucaccucccagagcggcaaggugaucagcuccugggagagcuacaaguccgggggcgagaccagccuguga

SEQ ID NO: 94751 - RNA, 1575 nt, Artificial Sequence
  derived and/or modified CDS sequence (opt1) from glycoprotein__RABV__AB683584.1
augaucccccaggcccugcuguucgugccgcugcuggucuucagccucugcuucggcaaguuccccaucuacaccauccccgacaagcuggggcccugguccccgaucgacauccaccaccugagcugccccaacaaccucgugguggaggacgagggcugcaccaaccuguccggguucagcuacauggagcugaaggucggcuacaucuccgccaucaaggugaacggguucacgugcaccggcguggucaccgaggcggagaccuacacgaacuucgugggcuacgugaccaccaccuucaagcgcaagcacuuccggcccacgcccgacgccugccgcgccgccuacaacuggaagauggccggggacccgcgguacgaggagagccuccacaaccccuaccccgacuaccacuggcugcgcaccgucaagaccaccaaggagucccuggugaucaucagccccuccguggcggaccucgacccguacgacaagagccugcacucccgggucuuccccagcggcaagugcuccgggaucacggugagcuccaccuacugcagcaccaaccacgacuacaccaucuggaugcccgagaacccccgccugggcacguccugcgacaucuucaccaacagccgggggaagcgcgccuccaagggcagcaagaccugcggcuucguggacgagcgggggcucuacaagagccugaagggcgccugcaagcugaagcucugcgggguccugggccugcgccucauggacggcaccugggccgcgauccagacguccgacgagaccaaguggugcccgcccgaccagcuggugaaccugcacgacuuccggagcgacgagaucgagcaccucguggucgaggagcuggugaagaagcgcgaggagugccuggacgcccucgaguccaucaugaccaccaagagcguguccuuccggcgccugagccaccuccggaagcucguccccggguucggcaaggccuacacgaucuucaacaagacccugauggaggccgacgcccacuacaaguccgugcgcaccuggaacgagaucauccccagcaaggggugccugcgggugggcgggcgcugccacccgcacgucaacggcguguucuucaacggcaucauccucgggcccgacggccacguccugauccccgagaugcaguccagccugcuccagcagcacauggagcugcuggaguccagcgugaucccccucaugcacccgcuggcggaccccuccaccguguucaaggacgacgacgaggccgaggaguucgucgaggugcaccuccccgacgugcacaagcaggucagcgggguggaccugggccugcccuccugggggaaguacgugcugaugagcgccggcguccucacggcccugaugcugaugaucuuccucaugaccugcugccggcgcgccaaccggguggaguccgcgcagcacagccugggcgagcgcgggcgcaagguguccgucaccagccagagcggccgggugaucuccagcugggaguccuacaagagcgggggcgagaccaagcuguga

SEQ ID NO: 94752 - RNA, 1575 nt, Artificial Sequence; identical to SEQ ID NO: 94649
  derived and/or modified CDS sequence (opt1) from glycoprotein__RABV__AB683585.1

SEQ ID NO: 94753 - RNA, 1575 nt, Artificial Sequence
  derived and/or modified CDS sequence (opt1) from glycoprotein__RABV__AB683586.1
augaucccccaggcccugcuguucgugccgcugcuggucuucagccucugcuucggcaaguuccccaucuacaccauccccgacaagcuggggcccugguccccgaucgacauccaccaccugagcugccccaacaaccucgugguggaggacgagggcugcaccaaccuguccggguucagcuacauggagcugaaggucggcuacaucuccgccaucaaggugaacggguucacgugcaccggcguggucaccgaggcggagaccuacacgaacuucgugggcuacgugaccaccaccuucaagcgcaagcacuuccggcccacgcccgacgccugccgcgccgccuacaacuggaagauggccggggacccgcgguacgaggagagccuccacaaccccuaccccgacuaccacuggcugcgcaccgucaagaccaccaaggagucccuggugaucaucagccccuccguggcggaccucgacccguacgacaagagccugcacucccgggucuuccccagcggcaagugcuccgggaucacggugagcuccaccuacugcagcaccaaccacgacuacaccaucuggaugcccgagaacccccgccugggcacguccugcgacaucuucaccaacagccgggggaagcgcgccuccaagggcagcaagaccugcggcuucguggacgagcgggggcucuacaagagccugaagggcgccugcaagcugaagcucugcgggguccugggccugcgccucauggacggcaccugggccgcgauccagacguccgacgagaccaaguggugcccgcccgaccagcuggugaaccugcacgacuuccggagcgacgagaucgagcaccucguggucgaggagcuggugaagaagcgcgaggagugccuggacgcccucgaguccaucaugaccaccaagagcguguccuuccggcgccugagccaccuccggaagcucguccccggguucggcaaggccuacacgauccugaacaagacccugauggaggccgacgcccacuacaaguccgugcgcaccuggaacgagaucauccccagcaaggggugccuccgggugggcgggcgcugccacccgcacgucaacggcguguucuucaacggcaucauccuggggcccgacggccacguccugauccccgagaugcaguccagccuccugcagcagcacauggagcugcucgaguccagcgugaucccccugaugcacccgcuggcggaccccuccaccguguucaaggacgacgacgaggccgaggacuucgucgaggugcaccuccccgacgugcacaagcaggucagcgggguggaccugggccugcccuccugggggaaguacgugcucaugagcgccggcguccugacggcccugaugcucaugaucuuccugaugaccugcugccggcgcgccaaccgggcggaguccgcccagcacagccugggcgagggggagcgcaagguguccgugaccagccagagcggccgcgucaucuccagcugggaguccuacaagagcgggggcgagaccaagcuguga

SEQ ID NO: 94754 - RNA, 1575 nt, Artificial Sequence
  derived and/or modified CDS sequence (opt1) from glycoprotein__RABV__AB683587.1
augaucccccaggcccugcuguucgugccgcugcuggucuucagccucugcuucggcaaguuccccaucuacaccauccccgacaagcuggggcccugguccccgaucgacauccaccaccugagcugccccaacaaccucgugguggaggacgagggcugcaccaaccuguccggguucagcuacauggagcugaaggucggcuacaucuccgccaucaaggugaacggguucacgugcaccggcguggucaccgaggcggagaccuacacgaacuucgugggcuacgugaccaccaccuucaagcgcaagcacuuccggcccacgcccgacgccugccgcgccgccuacaacuggaagauggccggggacccgcgguacgaggagagccuccacaaccccuaccccgacuaccacuggcugcgcaccgucaagaccaccaaggagucccuggugaucaucagccccuccguggcggaccucgacccguacgacaagagccugcacucccgggucuuccccagcggcaagugcuccgggaucacggugagcuccaccuacugcagcaccaaccacgacuacaccaucuggaugcccgagaacccccgccugggcacguccugcgacaucuucaccaacagccgggggaagcgcgccuccaagggcagcaagaccugcggcuucguggacgagcgggggcucuacaagagccugaagggcgccugcaagcugaagcucugcgggguccugggccugcgccucauggacggcaccugggccgcgauccagacguccgacgagaccaaguggugcccgagcgaccagcuggugaaccugcacgacuuccgguccgacgagaucgagcaccucguggucgaggagcuggugaagaagcgcgaggagugccuggacgcccucgagagcaucaugaccaccaaguccgugagcuuccggcgccugucccaccuccggaagcucguccccggguucggcaaggccuacacgaucuucaacaagacccugauggaggccgacgcccacuacaagagcgugcgcaccuggaacgagaucauccccuccaaggggugccugcgggugggcgggcgcugccacccccacgucaacggcguguucuucaacggcaucauccucgggccggacggccacguccugauccccgagaugcagagcucccugcuccagcagcacauggagcugcuggagagcuccgugaucccccucaugcacccccuggcggacccgagcaccguguucaaggacgacgacgaggccgaggacuucgucgaggugcaccuccccgacgugcacaagcaggucuccgggguggaccugggccugcccagcugggggaaguacgugcugauguccgccggcguccucacggcccugaugcugaugaucuuccucaugaccugcugccggcgcgccaaccgggcggagagcgcccagcacucccugggcgagcgcgggcgcaaggugagcgugaccagccaguccggccgggucaucagcuccugggagagcuacaaguccgggggcgagaccaagcuguga

SEQ ID NO: 94755 - RNA, 1575 nt, Artificial Sequence
  derived and/or modified CDS sequence (opt1) from glycoprotein__RABV__AB683589.1
augaacccccaggcccugauguucgugccgcuccuggucuucagccugugcuucggcaaguuccccaucuacaccauccccgacaagcucgggcccugguccccgaucgacauccaccaccugagcugccccaacaaccuggugguggaggacgagggcugcaccaaccucuccggguucagcuacauggagcugaaggucggcuacaucuccgccaucaaggugaacggguucacgugcaccggcguggucaccgaggcggagaccuacacgaacuucgugggcuacgugaccaccaccuucaagcgcaagcacuuccggcccaugcccgacgccugccgcgccgccuacaacuggaagauggccggggacccgcgguacgaggagagccugcacaaccccuaccccgacuaccacuggcuccgcacggucaagaccaccaaggagucccuggugaucaucagccccuccguggcggaccuggacccguacgacaagagccuccacucccgggucuuccccagcggcaagugcuccgggaucaccgugagcuccacguacugcagcaccaaccacgacuacaccaucuggaugcccgagaacccccgccugggcaccuccugcgacaucuucacgaacagccgggggaagcgcgccuccaagggcagcaagaccugcggcuucguggacgagcgggggcuguacaagagccucaagggcgccugcaagcugaagcugugcgggguccucggccugcgccugauggacggcaccugggccgcgauccagaccuccgacgagacgaaguggugcccgcccgaccagcucgugaaccugcacgacuuccggagcgacgagaucgagcaccugguggucgaggagcucgugaagaagcgcgaggagugccuggacgcccuggaguccaucaugaccaccaagagcguguccuuccggcgccucagccaccuccggaagcugguccccggguucggcaaggccuacaccaucuucaacaagacgcugauggaggccgacgcccacuacaaguccgugcgcaccuggaacgagaucauccccagcaaggggugccugcgggugggcgggcgcugccacccgcacgucaacggcguguucuucaacggcaucauccuggggcccgacggccacguccucauccccgagaugcaguccagccugcugcagcagcacauggagcuccuggaguccagcgugaucccccugaugcacccgcucgcggaccccuccaccguguucaaggacgacgacgaggccgaggacuucgucgaggugcaccuccccgacgugcacaagcaggucagcgggguggaccugggccugcccuccugggggaaguacgugcugaugagcgccggcguccugaccgcccucaugcugaugaucuuccugaugacgugcugccggcgcgccaaccgggcggaguccgcccagcacagccucggcgagcgcgggcgcaagguguccgugaccagccagagcggccgggucaucuccagcugggaguccuacaagagcgggggcgagaccaagcuguga

SEQ ID NO: 94756 - RNA, 1575 nt, Artificial Sequence; identical to SEQ ID NO: 94625
  derived and/or modified CDS sequence (opt1) from glycoprotein__RABV__AB683591.1

SEQ ID NO: 94757 - RNA, 1575 nt, Artificial Sequence
  derived and/or modified CDS sequence (opt1) from glycoprotein__RABV__AB699208.1
auggugccccagguccugcuguucgugccgcugcugguguucagcaugugcuucggcaaguuccccaucuacaccauccccgacaagcucgggcccugguccccgaucgacauccaccaccugagcugccccaacaaccuggucguggaggacgagggcugcaccaaccucuccggguucagcuacauggagcugaaggugggcuacaucuccgccaucaaggucaacggguucacgugcaccggcguggugaccgaggccgagaccuacacgaacuucgucggcuacgugaccaccaccuucaagcgcaagcacuuccggcccacgcccgacgcgugccgcgccgccuacaacuggaagauggccggggacccgcgguacgaggagagccugcacaaccccuaccccgacuaccacuggcuccgcaccgugaagaccaccaaggagucccuggucaucaucagccccuccguggccgaccuggacccguacaacaagagccuccacucccggguguuccccagcggcaagugcuccgggaucacgaucagcuccaccuacugcgcgaccaaccacgacuacaccaucuggaugcccgagaacccccgccugggcacgagcugcgacaucuucaccaacucccgggggaagcgcgccagcaagggcggcaagaccugcggguucgucgacgagcggggccuguacaagucccucaagggggccugcaagcugaagcugugcggcgugcucggccugcgccugauggacgggaccuggguggccaugcagacgagcgacgagaccaaguggugcccgcccgaccagcucgucaaccugcacgacuuccggagcgacgagaucgagcaccuggugguggaggagcucgucaagaagcgcgaggagugccuggacgcgcuggaguccaucaugaccaccaagagcguguccuuccggcgccucagccaccuccggaagcuggugcccggcuucgggaaggccuacacgaucuucaacaagacccucauggaggccgacgcccacuacaaguccauccgcaccuggaacgagaucauccccagcaagggcugccugcgggucgggggccgcugccacccgcacgugaacggcgucuucuucaacgggaucauccugggccccgacgggcacgugcucauccccgagaugcaguccagccugcugcagcagcacauggagcuccuggaguccagcgugaucccccugaugcacccgcucgccgaccccuccaccgucuucaaggacggcgacgaggcggaggacuucguggaggugcaccuccccgacguccacaagcagaucagcgggguggaccugggccugcccuccuggggcaaguacgugcuggucagcgccggggugcuggugguccucaugcugacgaucuucaucaugaccugcugcggccgggugcgccggccgaaguccacccagcacagccucgggggcgccgggcgcaagguguccgucaccagccaguccggcaaggugaucagcagcugggaguccuacaagaacggcggggagacgcgccuguga

SEQ ID NO: 94758 - RNA, 1575 nt, Artificial Sequence
  derived and/or modified CDS sequence (opt1) from glycoprotein__RABV__AB699209.1
auggugccgcagguccugagcuucgugccgcugcugguguucuccacgugcuucggcaaguuccccaucuacaccauccccgacaagcuggggcccuggagcccgaucgacauccaccaccucuccugccccaacaaccuggucguggaggacgagggcugcaccaaccugagcggguucuccuacauggagcucaaggugggcuacaucagcgccaucaaggucaacggguucacgugcaccggcguggugaccgaggccgagaccuacaccaacuucgucggcuacgugaccaccacguucaagcgcaagcacuuccggcccacccccgacgcgugccgcgccgccuacaacuggaagauggccggggacccgcgguacgaggagucccugcacaaccccuaccccgacuaccacuggcugcgcaccgugaagaccacgaaggagagccucgucaucaucucccccaacguggccgaccuggacccguacaacaagagccugcacucccggguguuccccagcggcaagugcuccgggaucaccaucagcuccaccuacugcagcaccaaccacgacuacacgaucuggaugcccgagaacccccgccucggcaccuccugcgacaucuucaccaacagccgggggaagcgcgcguccaagggcggcaagaccugcggguucgucgacgagcggggccuguacaagagccugaagggggccugcaagcucaagcugugcggcgugcugggccuccgccugauggacgggacguggguggccaugcagaccagcgacgagaccaaguggugcccgcccgaccagcuggucaaccuccacgacuuccgguccgacgagaucgagcaccuggugguggaggagcuggucaagaagcgcgaggagugccucgacgcccuggagagcaucaugaccacgaaguccgugagcuuccggcgccugucccaccuccggaagcuggugcccggcuucgggaaggcguacaccaucuucaacaagacccugauggaggccgacgcccacuacaagagcguccgcaccuggaacgagaucauccccuccaagggcugccuccgggucgggggccgcugccacccgcacgugaacggcguguucuucaacgggaucauccugggccccgacgggcacgugcugauccccgagaugcagagcucccuccugcagcagcacauggagcugcucgagagcuccgucaucccccugaugcacccgcuggccgaccccagcacgguguucaaggacggcgacgaggccgaggacuucguggagguccaccuccccgacgugcacaagcagaucuccgggguggaccugggccugcccagcuggggcaaguacguccucguguccgcgggggugcuggucgugcugaugcucaccaucuucaucaugaccugcugcggcaaggugcggcgccccaagagcacccagcacucccucgggggcacggggcggaaggucagcgugaccucccagagcggcaaggugaucagcuccugggagagcuacaaguccggcggggagacccgccuguga

SEQ ID NO: 94759 - RNA, 1575 nt, Artificial Sequence
  derived and/or modified CDS sequence (opt1) from glycoprotein__RABV__AB699210.1
auggugccccagguccugagcuucgugccgcugcugguguucuccacgugcuucggcaaguuccccaucuacaccauccccgacaagcuggggcccuggagcccgaucgacauccaccaccucuccugccccaacaaccuggucguggaggacgagggcugcacgaaccugagcggguucuccuacauggagcucaaggugggcuacaucagcgccaucaaggucaacggguucacgugcaccggcguggugaccgaggccgagaccuacaccaacuucgucggcuacgugaccaccacguucaagcgcaagcacuuccggcccacccccgacgcgugccgcgccgccuacaacuggaagauggccggggacccgcgguacgaggagucccugcacaaccccuaccccgacuaccacuggcugcgcaccgugaagaccacgaaggagagccucgucaucaucucccccagcguggccgaccuggacccguacaacaagucccugcacagccggguguuccccuccggcaagugcagcgggaucaccaucuccagcaccuacugcuccaccaaccacgacuacacgaucuggaugcccgagaacccccgccucggcaccagcugcgacaucuucaccaacucccgggggaagcgcgcgagcaagggcggcaagaccugcggguucgucgacgagcggggccuguacaagagccugaagggggccugcaagcucaagcugugcggcgugcugggccuccgccugauggacgggacguggguggccaugcagaccuccgacgagaccaaguggugcccgcccgaccagcuggucaaccuccacgacuuccggagcgacgagaucgagcaccuggugguggaggagcuggucaagaagcgcgaggagugccucgacgcccuggaguccaucaugaccaccaagagcguguccuuccggcgccugagccaccuccggaagcuggugcccggcuucgggaaggcguacaccaucuucaacaagacccugauggaggccgacgcccacuacaaguccguccgcaccuggaacgagaucauccccagcaagggcugccuccgggucgggggccgcugccacccgcacgugaacggcguguucuucaacgggaucauccugggccccgacgggcacgugcugauccccgagaugcaguccagccuccugcagcagcacauggagcugcucgaguccagcgucaucccccugaugcacccgcuggccgaccccuccacgguguucaaggacggcgacgaggccgaggacuucguggagguccaccuccccgacgugcacaagcagaucagcgggguggaccugggccugcccuccuggggcaaguacguccucgugagcgcgggggugcuggucgugcugaugcucaccaucuucaucaugaccugcugcggccgggugcgccggccgaaguccacccagcacagccucgggggcacggggcgcaaggucuccgugaccagccagagcggcaaggugaucuccagcugggaguccuacaagagcggcggggagacccgccuguga

SEQ ID NO: 94760 - RNA, 1575 nt, Artificial Sequence
  derived and/or modified CDS sequence (opt1) from glycoprotein__RABV__AB699212.1
auggugccccagguccugagcuucgugccgcugcugguguucuccacgugcuucggcaaguuccccaucuacaccauccccgacaagcuggggcccuggagcccgaucgacauccaccaccucuccugccccaacaaccuggucguggaggacgagggcugcacgaaccugagcggguucuccuacauggagcucaaggugggcuacaucagcgccaucaaggucaacggguucacgugcaccggcguggugaccgaggccgagaccuacaccaacuucgucggcuacgugaccaccacguucaagcgcaagcacuuccggcccacccccgacgcgugccgcgccgccuacaacuggaagauggccggggacccgcgguacgaggagucccugcacaaccccuaccccgacuaccacuggcugcgcaccgugaagaccacgaaggagagccucgucaucaucucccccagcguggccgaccuggacccguacgacaagucccugcacagccggguguuccccuccggcaagugcagcgggaucaccaucuccagcacgugcugcuccaccaaccacgacuacaccaucuggaugcccgagaacccccgccucggcaccagcugcgacaucuucaccaacucccgggggaagcgcgcgagcaagggcggcaagaccugcggguucgucgacgagcggggccuguacaagagccugaagggggccugcaagcucaagcugugcggcgugcugggccuccgccugauggacgggacguggguggccaugcagaccuccgacgagaccaaguggugcccgcccgaccagcuggucaaccuccacgacuuccggagcgacgagaucgagcaccuggugguggaggagcuggucaagaagcgcgaggagugccucgacgcccuggaguccaucaugaccaccaagagcguguccuuccggcgccugagccaccuccggaagcuggugcccggcuucgggaaggcguacaccaucuucaacaagacccugauggaggccgacgcccacuacaaguccguccgcaccuggaacgagaucauccccagcaagggcugccuccgggucgggggccgcugccacccgcacgugaacggcguguucuucaacgggaucauccugggccccgacgggcacgugcugauccccgagaugcaguccagccuccugcagcagcacauggagcugcucgaguccagcgucaucccccugaugcacccgcuggccgaccccuccacgguguucaaggacggcgacgaggccgaggacuucguggagguccaccuccccgacgugcacaagcagaucagcgggguggaccugggccugcccuccuggggcaaguacguccucgugagcgcgggggugcuggucgugcugaugcucaccaucuucaucaugaccugcugcggccgggugcgccggccgaaguccacccagcacagccucgggggcacggggcgcaaggucuccgugaccagccagagcggcaaggugaucuccagcugggaguccuacaagagcggcggggagacccgccuguga

SEQ ID NO: 94761 - RNA, 1575 nt, Artificial Sequence; identical to SEQ ID NO: 94759
  derived and/or modified CDS sequence (opt1) from glycoprotein__RABV__AB699213.1

SEQ ID NO: 94762 - RNA, 1575 nt, Artificial Sequence
  derived and/or modified CDS sequence (opt1) from glycoprotein__RABV__AB733961.1
augaucccccaggcccuccuguucgugccgcugcuggucagcucccucugcuucggcaaguuccccaucuacaccauccccgacaagcuggggcccuggagcccgaucgacauccaccaccuguccugccccaacaaccucgugguggaggacgagggcugcaccaaccugagcggguucuccuacauggagcugaaggucggcuacaucagcgccaucaaggugaacggguucacgugcaccggcguggucaccgaggcggagaccuacacgaacuucgugggcuacgugaccaccaccuucaagcgcaagcacuuccggcccacgcucgacgccugccgcgccgccuacaacuggaagauggccggggacccccgguacgaggagucccugcacaacccguaccccgacuaccacuggcugcgcaccgucaagaccaccaaggagagccucgugaucaucucccccagcguggcggaccuggaccccuacgacaagucccugcacagccgggucuucccguccggcaagugcagcgggaucacgguguccagcaccuacugcuccaccaaccacgacuacaccaucuggaugcccgagaacccccgccucggcacgagcugcgacaucuucaccaacucccgggggaagcgcgccagcaagggcagcaagaccugcggcuucguggacgagcgggggcuguacaagucccugaagggcgccugcaagcucaagcugugcgggguccugggccuccgccugauggacggcaccugggccgcgauccagacgagcgacgagaccaaguggugcccgcccgaccagcuggugaaccuccacgacuuccgguccgacgagaucgagcaccugguggucgaggagcuggugaagaagcgcgaggagugccucgacgcccuggagagcaucaugaccaccaaguccgugagcuuccggcgccugucccaccuccggaagcugguccccggguucggcaaggccuacacgaucuucaacaagacccugauggaggccgacgcccacuacaagagcgugcgcaccuggaacgagaucauccccuccaaggggugccuccgggugggcgggcgcugccacccccacgucaacggcguguucuucaacggcaucauccuggggccggacggccacguccugauccccgagaugcagagcucccuccugcagcagcacauggagcugcucgagagcuccgugaucccccugaugcacccccuggcggacccgagcaccguguucaaggacgacgacgaggccgaggacuucgucgaggugcaccuccccgacgugcacaagcaggucuccgggguggaccugggccugcccagcugggggaaguacgugcucacguccgccggcguccugaccgcccugaugcucaugaucuuccugaugaccugcugccggcgcgccaaccgggcggagagcgcccagcacucccugggcgagcgcgggcgcaaggugagcgugaccagccaguccggccgggucaucagcuccugggagagcuacaaguccgggggcgagacgaagcuguga

SEQ ID NO: 94763 - RNA, 1575 nt, Artificial Sequence
  derived and/or modified CDS sequence (opt1) from glycoprotein__RABV__AB733962.1
augaucccccaggcccuccuguucgugccgcugcuggucuucagccucugccugggcaaguuccccaucuacaccauccccgacaagcuggggcccugguccccgaucgacauccaccaccucagcugccccaacaaccuggugguggaggacgagggcugcaccaaccuguccggguucagcuacauggagcucaaggucggcuacaucuccgccaucaaggugaacggguucacgugcaccggcguggucaccgaggcggagaccuacacgaacuucgugggcuacgugaccaccaccuucaagcgcaagcacuuccggcccacgcccgacgccugccgcgccgccuacaacuggaagauggccggggacccgcgguacgaggagagccugcacaaccccuaccccgacuaccacuggcugcgcaccgucaagaccaccaaggagucccucgugaucaucagccccuccguggcggaccuggacccguacgacaagagccugcacucccgggucuuccccagcggcaagugcuccgggaucacggugagcuccaccuacugcagcaccaaccacgacuacaccaucuggaugcccgagaacccccgccucggcacguccugcgacaucuucaccaacagccgggggaagcgcgccuccaagggcagcaagaccugcggcuucguggacgagcgggggcuguacaagagccugaagggcgccugcaagcucaagcugugcgggguccugggccuccgccugauggacggcaccugggccgcgauccagacguccgacgagaucaaguggugcccgcccgaccagcuggugaaccuccacgacuuccggagcgacgagaucgagcaccugguggucgaggagcuggugaagaagcgcgaggagugccucgacgcccuggaguccaucaugaccaccaagagcguguccuuccggcgccugagccaccuccggaagcugguccccggguucggcaaggccuacaccaucuucaacaagacgcugauggaggccgacgcccacuacaaguccgugcgcaccuggaacgagaucauccccagcaaggggugccuccgggugggcgggcgcugccacccgcacgucaacggcguguucuucaacggcaucauccuggggcccgacggccacguccugauccccgagaugcaguccagccuccugcagcagcacauggagcugcucgaguccagcgugaucccccugaugcacccgcuggcggaccccuccaccguguucaaggacgacgacgaggccgaggacuucgucgaggugcaccuccccgacgugcacaagcaggucagcgggguggaccugggccugcccuccugggggaaguacgugcucaugagcgccggcguccugaccgcccugaugcucaugaucuuccugacgaccugcugccggcgcgccaaccgggcggaguccgcccagcacagccugggcgagcgcgggcgcaagguguccgugaccagccagagcggccgggucaucuccagcugggaguccuacaagagcgggggcgagaccaagcuguga

SEQ ID NO: 94764 - RNA, 1575 nt, Artificial Sequence; identical to SEQ ID NO: 94595
  derived and/or modified CDS sequence (opt1) from glycoprotein__RABV__AB733963.1

SEQ ID NO: 94765 - RNA, 1575 nt, Artificial Sequence
  derived and/or modified CDS sequence (opt1) from glycoprotein__RABV__AB733964.1
augaucccccaggcccuccuguucgugccgcugcuggucuucagccucugccugggcaaguuccccaucuacaccauccccgacaagcuggggcccugguccccgaucgacauccaccaccucagcugccccaacaaccuggugguggaggacgagggcugcaccaaccuguccggguucagcuacauggagcucaaggucggcuacaucuccgccaucaaggugaacggguucacgugcaccggcguggucaccgaggcggagaccuacacgaacuucgugggcuacgugaccaccaccuucaagcgcaagcacuuccggcccacgcccgacgccugccgcgccgccuacaacuggaagauggccggggacccgcgguacgaggagagccugcacaaccccuaccccgacuaccacuggcugcgcaccgucaagaccaccaaggagucccucgugaucaucagccccuccguggcggaccuggacccguacgacaagagccugcacucccgggucuuccccagcggcaagugcuccgggaucacggugagcuccaccuacugcagcaccaaccacgacuacaccaucuggaugcccgagaacccccgccucggcacguccugcgacaucuucaccaacagccgggggaagcgcgccuccaagggcagcaagaccugcggcuucguggacgagcgggggcuguacaagagccugaagggcgccugcaagcucaagcugugcgggguccugggccuccgccugauggacggcaccugggccgcgauccagacguccgacgagaccaaguggugcccgcccgaccagcuggugaaccuccacgacuuccacagcgacgagaucgagcaccugguggucgaggagcuggugaagaagcgggaggagugccucgacgcccuggaguccaucaugaccaccaagagcguguccuuccgccggcugagccaccuccgcaagcugguccccggguucggcaaggccuacacgaucuucaacaagacccugauggaggccgacgcccacuacaaguccgugcggaccuggaacgagaucauccccaccaaggggugccuccgcgugggcgggcggugccacccgcacgucaacggcguguucuucaacggcaucauccuggggcccgacggccacguccugauccccgagaugcagagcucccuccugcagcagcacauggagcugcucgagagcuccgugaucccccugaugcacccgcuggcggaccccagcacgguguucaaggacgacgacgaggccgaggacuucgucgaggugcaccuccccgacgugcacaagcaggucuccgggguggaccugggccugcccagcugggggaaguacgugcucauguccgccggcguccugaccgcccugaugcucaugaucuuccugacgaccugcugccgccgggccgaccgcgcggagagcgcccagcacucccugggcgagcgggggcgcaaggugagcgugaccucccagagcggccgcgucaucagcuccugggagagcuacaaguccgggggcgagaccaagcuguga

SEQ ID NO: 94766 - RNA, 1575 nt, Artificial Sequence; identical to SEQ ID NO: 94626
  derived and/or modified CDS sequence (opt1) from glycoprotein__RABV__AB733965.1

SEQ ID NO: 94767 - RNA, 1575 nt, Artificial Sequence
  derived and/or modified CDS sequence (opt1) from glycoprotein__RABV__AB733966.1
augaucccccaggcccugcuguucgugccgcugcuggucuucagccucugcuucggcaaguuccccaucuacaccauccccgacaagcuggggcccugguccccgaucgacauccaccaccugagcugccccaacaaccucgugguggaggacgagggcugcaccaaccuguccggguucagcuacauggagcugaaggucggcuacaucuccgccaucaaggugaacggguucacgugcaccggcguggucaccgaggcggagaccuacacgaacuucgugggcuacgugaccaccaccuucaagcgcaagcacuuccggcccacgcccgacgccugccgcgccgccuacaacuggaagauggccggggacccgcgguacgaggagagccuccacaaccccuaccccgacuaccacuggcugcgcaccgucaagaccaccaaggagucccuggugaucaucagccccuccguggcggaccucgacccguacgacaagagccugcacucccgggucuuccccagcggcaagugcuccgggaucacggugagcuccaccuacugcagcaccaaccacgacuacaccaucuggaugcccgagaacccccgccugggcacguccugcgacaucuucaccaacagccgggggaagcgcgccuccaagggcagcaagaccugcggcuucguggacgagcgggggcucuacaagagccugaagggcgccugcaagcugaagcucugcgggguccugggccugcgccucauggacggcaccugggccgcgauccagacguccgacgagaccaaguggugcccgcccgaccagcuggugaaccugcacgacuuccacagcgacgagaucgagcaccucguggucgaggagcuggugaagaagcgggaggagugccuggacgcccucgaguccaucaugaccaccaagagcguguccuuccgccggcugagccaccuccgcaagcucguccccggguucggcaaggccuacacgaucuucaacaagacccugauggaggccgacgcccacuacaaguccgugcggaccuggaacgagaucauccccagcaaggggugccugcgcgugggcgggcggugccacccgcacgucaacggcguguucuucaacggcaucauccucgggcccgacggccacguccugauccccgagaugcaguccagccugcuccagcagcacauggagcugcuggaguccagcgugaucccccucaugcacccgcuggcggaccccuccaccguguucaaggacgacgacgaggccgaggacuucgucgaggugcaccuccccgacgugcacaagcaggucagcgggguggaccugggccugcccuccugggggaaguacgugcugaugagcgccggcguccucacggcccugaugcugaugaucuuccucacgaccugcugccgccgggccaaccgcgcggaguccgcccagcacagccugggcgagcgggggcgcaagguguccgugaccagccagagcggccgcgucaucuccagcugggaguccuacaagagcgggggcgagaccaagcuguga

SEQ ID NO: 94768 - RNA, 1575 nt, Artificial Sequence; identical to SEQ ID NO: 94724
  derived and/or modified CDS sequence (opt1) from glycoprotein__RABV__AB733967.1

SEQ ID NO: 94769 - RNA, 1575 nt, Artificial Sequence
  derived and/or modified CDS sequence (opt1) from glycoprotein__RABV__AB733968.1
augaucccccaggcccugcuguucgugccgcugcuggucuucagccucugcuucggcaaguuccccaucuacaccauccccgacaagcuggggcccugguccccgaucgacauccaccaccugagcugccccaacaaccucgugguggaggacgagggcugcaccaaccuguccggguucagcuacauggagcugaaggucggcuacaucuccgccaucaaggugaacggguucacgugcaccggcguggucaccgaggcggagaccuacacgaacuucgugggcuacgugaccaccaccuucaagcgcaagcacuuccggcccacgcccgacgccugccgcgccgccuacaacuggaagauggccggggacccgcgguacgaggagagccuccacaaccccuaccccgacuaccacuggcugcgcaccgucaagaccaccaaggagucccuggugaucaucagccccuccguggcggaccucgacccguacgacaagagccugcacucccgggucuuccccagcggcaagugcuccgggaucacggugagcuccaccuacugccccaccaaccacgacuacaccaucuggaugcccgagaacccgcgccugggcacgagcugcgacaucuucaccaacucccgggggaagcgcgccagcaagggcuccaagaccugcggcuucguggacgagcgggggcucuacaagagccugaagggcgccugcaagcugaagcucugcgggguccugggccugcgccucauggacggcaccugggccgcgauccagacgagcgacgagaccaaguggugcccgcccgaccagcuggugaaccugcacgacuuccgguccgacgagaucgagcaccucguggucgaggagcuggugaagaagcgcgaggagugccuggacgcccucgagagcaucaugaccaccaaguccgugagcuuccggcgccugucccaccuccggaagcucguccccggguucggcaaggccuacacgaucuucaacaagacccugauggaggccgacgcccacuacaagagcgugcgcaccuggaacgagaucauccccuccaaggggugccugcgggugggcgggcgcugccacccccacgucaacggcguguucuucaacggcaucauccucgggcccgacggccacguccugauccccgagaugcagagcucccugcuccagcagcacauggagcugcuggagagcuccgugaucccgcucaugcacccccuggcggaccccagcaccguguucaaggacgacgacgaggccgaggacuucgucgaggugcaccuccccgacgugcacaagcaggucuccgggguggaccugggccugccgagcugggggaaguacgugcugauguccgccggcguccucacggcccugaugcugaugaucuuccucacgaccugcugccggcgcgccgaccgggcggagagcgcccagcacucccugggcgagcgcgggcgcaaggugagcgugaccucccagagcggccgggucaucagcuccugggagagcuacaaguccgggggcgagaccaagcuguga

SEQ ID NO: 94770 - RNA, 1575 nt, Artificial Sequence; identical to SEQ ID NO: 94623
  derived and/or modified CDS sequence (opt1) from glycoprotein__RABV__AB733969.1

SEQ ID NO: 94771 - RNA, 1575 nt, Artificial Sequence; identical to SEQ ID NO: 94712
  derived and/or modified CDS sequence (opt1) from glycoprotein__RABV__AB733970.1

SEQ ID NO: 94772 - RNA, 1575 nt, Artificial Sequence
  derived and/or modified CDS sequence (opt1) from glycoprotein__RABV__AB733971.1
augaucccccaggcccugcuguucgugccgcugcuggucagcucccucugcuucggcaaguuccccaucuacaccauccccgacaagcuggggcccuggagcccgaucgacauccaccaccuguccugccccaacaaccucgugguggaggacgagggcugcaccaaccugagcggguucuccuacauggagcugaaggucggcuacaucagcgccaucaaggugaacggguucacgugcaccggcguggucaccgaggcggagaccuacacgaacuucgugggcuacgugaccaccaccuucaagcgcaagcacuuccggcccacgcccgacgccugccgcgccgccuacaacuggaagauggccggggacccgcgguacgaggagucccuccacaaccccuaccccgacuaccacuggcugcgcaccgucaagaccaccaaggagagccuggugaucaucucccccagcguggcggaccucgacccguacgacaagucccugcacagccgggucuuccccuccggcaagugcagcgggaucacgguguccagcaccuacugcuccaccaaccacgacuacaccaucuggaugcccgagaacccccgccugggcacgagcugcgacaucuucaccaacucccgggggaagcgcgccagcaagggcagcaagaccugcggcuucgugaacgagcgggggcucuacaagucccugaagggcgccugcaagcugaagcucugcgggguccugggccugaagcucauggacggcaccugggccgcgauccagacgagcaacgagaccaaguggugcccgcccgaccagcuggugaaccugcacgacuuccgcuccgacgagaucgagcaccucguggucgaggagcuggugaagaagcgggaggagugccuggacgcccucgagagcaucaugaccaccaaguccgugagcuuccgccggcugucccaccuccgcaagcucguccccggguucggcaaggccuacacgaucuucaacaagacccugauggaggccgacgcccacuacaagagcgugcggaccuggaacgagaucauccccuccaaggggugccugcgcgugggcgggcggugccacccgcacgucaacggcguguucuucaacggcaucauccucgggcccgacggccacguccugauccccgagaugcagagcucccugcuccagcagcacauggagcugcuggagagcuccgugaucccccucaugcacccgcuggcggaccccagcaccguguucaaggacgacgacgaggccgaggacuucgucgaggugcaccuccccgacgugcacaagcaggucuccgggguggaccugggccugcccagcugggggaaguacgugcugacguccgccggcguccucaccgcccugaugcugaugaucuuccucaugaccugcugccgccgggccaaccgcgcggagagcgcccagcacucccugggcgagcgggggcgcaaggugagcgugaccagccaguccggccgcgucaucagcuccugggagagcuacaaguccgggggcgagacgaagcuguga

SEQ ID NO: 94773 - RNA, 1575 nt, Artificial Sequence
  derived and/or modified CDS sequence (opt1) from glycoprotein__RABV__AB733972.1
augaucccccaggcccugcuguucgugccgcugcuggucuucagccucugcuucggcaaguuccccaucuacaccauccccgacaagcuggggcccugguccccgaucgacauccaccaccugagcugccccaacaaccucgugguggaggacgagggcugcaccaaccuguccggguucagcuacauggagcugaaggucggcuacaucuccgccaucaaggugaacggguucacgugcaccggcguggucaccgaggcggagaccuacacgaacuucgugggcuacgugaccaccaccuucaagcgcaagcacuuccggcccacgcccgacgccugccgcgccgccuacaacuggaagauggccggggacccgcgguacgaggagagccuccacaaccccuaccccgacuaccacuggcugcgcaccgucaagaccaccaaggagucccuggugaucaucagccccuccguggcggaccucgacccguacgacaagagccugcacucccgggucuuccccagcggcaagugcuccgggaucacggugagcuccaccuacugcagcaccaaccacgacuacaccaucuggaugcccgagaacccccgccugggcacguccugcgacaucuucaccaacagccgggggaagcgcgccuccaagggcagcaagaccugcggcuucguggacgagcgggggcucuacaagagccugaagggcgccugcaagcugaagcucugcgggguccugggccugcgccucauggacggcaccugggccgcgauccagacguccgacgagaccaaguggugcccgcccgaccagcuggugaaccugcacgacuuccggagcgacgagaucgagcaccucguggucgaggagcuggugaagaagcgcgaggagugccuggacgcccucgaguccaucaugaccaccaagagcguguccuuccggcgccugagccaccuccggaagcucguccccggguucggcaaggccuacacgaucuucaacaagacccugauggaggccgacgcccacuacaaguccgugcgcaccuggaacgagaucauccccagcaaggggugccugcgggugggcgggcgcugccacccgcacgucaacggcguguucuucaacggcaucauccucgggcccgacggccacguccugauccccgagaugcaguccagccugcuccagcagcacauggagcugcuggaguccagcgugaucccccucaugcacccgcuggcggaccccuccaccguguucaagaacgacgacgaggccgaggacuucgucgaggugcaccuccccgacgugcacaagcaggucagcgggguggaccugggccugcccuccugggggaaguacgugcugaugagcgccggcguccucacggcccugaugcugaugaucuuccucaugaccugcugccggcgcaccaaccgggccgaguccgcgcagcacagccugggcgagcgcgggcgcaagguguccgugaccagccagagcggccgggucaucuccagcugggaguccuacaagagcgggggcgagacgaagcuguga

SEQ ID NO: 94774 - RNA, 1575 nt, Artificial Sequence; identical to SEQ ID NO: 94769
  derived and/or modified CDS sequence (opt1) from glycoprotein__RABV__AB733973.1

SEQ ID NO: 94775 - RNA, 1575 nt, Artificial Sequence
  derived and/or modified CDS sequence (opt1) from glycoprotein__RABV__AB733974.1
augaucccccaggcccugcuguucgugccgcugcuggucuucagccucugcuucggcaaguuccccaucuacaccauccccgacaagcuggggcccugguccccgaucgacauccaccaccugagcugccccaacaaccucgugguggaggacgagggcugcaccaaccuguccggguucagcuacauggagcugaaggucggcuacaucuccgccaucaaggugaacggguucacgugcaccggcguggucaccgaggcggagaccuacacgaacuucgugggcuacgugaccaccaccuucaagcgcaagcacuuccggcccacgcccgacgccugccgcgccgccuacaacuggaagauggccggggacccgcgguacgaggagagccuccacaaccccuaccccgacuaccacuggcugcgcaccgucaagaccaccaaggagucccuggugaucaucagccccuccguggcggaccucgacccguacgacaagagccugcacucccgggucuuccccagcggcaagugcuccgggaucacggugagcuccaccuacugcagcaccaaccacgacuacaccaucuggaugcccgagaacccccgccugggcacguccugcgacaucuucaccaacagccgggggaagcgcgccuccaagggcagcaagaccugcggcuucguggacgagcgggggcucuacaagagccugaagggcgccugcaagcugaagcucugcgggguccugggccugaagcucauggacggcaccugggccgcgauccagacguccaacgagaccaaguggugcccgcccgaccagcuggugaaccugcacgacuuccgcagcgacgagaucgagcaccucguggucgaggagcuggugaagaagcgggaggagugccuggacgcccucgaguccaucaugaccaccaagagcguguccuuccgccggcugagccaccuccgcaagcucguccccggguucggcaaggccuacacgaucuucaacaagacccugauggaggccgacgcccacuacaaguccgugcggaccuggaacgagaucauccccagcaaggggugccugcgcgugggcgggcggugccacccgcacgucaacggcguguucuucaacggcaucauccucgggcccgacggccacguccugauccccgagaugcaguccagccugcuccagcagcacauggagcugcuggaguccagcgugaucccccucaugcacccgcuggcggaccccuccaccguguucaaggacgacgacgaggccgaggacuucgucgaggugcaccuccccgacgugcacaagcaggucagcgggguggaccugggccugcccuccugggggaaguacgugcugaugagcgccggcguccucacggcccugaugcugaugaucuuccucaugaccugcugccgccgggccaaccgcgcggaguccgcccagcacagccugggcgagcgggggcgcaagguguccgugaccagccagagcggccgcgucaucuccagcugggaguccuacaagagcgggggcgagaccaagcuguga

SEQ ID NO: 94776 - RNA, 1575 nt, Artificial Sequence; identical to SEQ ID NO: 94775
  derived and/or modified CDS sequence (opt1) from glycoprotein__RABV__AB733975.1

SEQ ID NO: 94777 - RNA, 1575 nt, Artificial Sequence; identical to SEQ ID NO: 94596
  derived and/or modified CDS sequence (opt1) from glycoprotein__RABV__AB733976.1

SEQ ID NO: 94778 - RNA, 1575 nt, Artificial Sequence; identical to SEQ ID NO: 94657
  derived and/or modified CDS sequence (opt1) from glycoprotein__RABV__AB733977.1

SEQ ID NO: 94779 - RNA, 1575 nt, Artificial Sequence
  derived and/or modified CDS sequence (opt1) from glycoprotein__RABV__AB733979.1
augaucccccaggcccugcuguucgugccgcugcuggucuucagccucugcuucggcaaguuccccaucuacaccauccccgacaagcuggggcccugguccccgaucgacauccaccaccugagcugccccaacaaccucgugguggaggacgagggcugcaccaaccuguccggguucagcuacauggagcugaaggucggcuacaucuccgccaucaaggugaacggguucacgugcaccggcguggucaccgaggcggagaccuacacgaacuucgugggcuacgugaccaccaccuucaagcgcaagcacuuccggcccacgcccgacgccugccgcgccgccuacaacuggaagauggccggggacccgcgguacgaggagagccuccacaaccccuaccccgacuaccacuggcugcgcaccgucaagaccaccaaggagucccuggugaucaucagccccuccguggcggaccucgacccguacgacaagagccugcacucccgggucuuccccagcggcaagugcuccgggaucacggugagcuccaccuacugcagcaccaaccacgacuacaccaucuggaugcccgagaacccccgccugggcacguccugcgacaucuucaccaacagccgggggaagcgcgccuccaagggcagcaagaccugcggcuucguggacgagcgggggcucuacaagagccugaagggcgccugcaagcugaagcucugcgggguccugggccugcgccucauggacggcaccugggccgcgauccagacguccgacgagaccaaguggugcccgcccgaccagcuggugaaccugcacgacuuccggagcgacgagaucgagcaccucguggucgaggagcuggugaagaagcgcgaggagugccuggacgcccucgaguccaucaugaccaccaagagcguguccuuccggcgccugagccaccuccggaagcucguccccggguucggcaaggccuacacgaucuucaacaagacccugauggaggccgacgcccacuacaaguccgugcgcaccuggaacgagaucauccccagcaaggggugccugcgggugggcgggcgcugccacccgcacgucaacggcguguucuucaacggcaucauccucgggcccgacggccacguccugauccccgagaugcaguccagccugcuccagcagcacauggagcugcuggaguccagcgugaucccccucaugcacccgcuggcggaccccuccaccguguucaaggacgacgacgaggccgaggacuucgucgaggugcaccuccccgacgugcacaagcaggucagcgggguggaccugggccugcccuccugggggaaguacgugcugaugagcgccggcguccucacggcccugaugcugaugauccuccugaugaccugcugccggcgcgccaaccggguggaguccgcgcagcacagccugggcgagcgcgggcgcaagguguccgucaccagccagagcggccgggugaucuccagcugggaguccuacaagagcgggggcgagaccaagcuguga

SEQ ID NO: 94780 - RNA, 1575 nt, Artificial Sequence
  derived and/or modified CDS sequence (opt1) from glycoprotein__RABV__AB781935.1
auggugccccaggcccuccuguucgucccccugcugguguucccccucugcuucggcaaguuccccaucuacaccauccccgacaagcuggggccguggagccccaucgacauccaccaccuguccugccccaacaaccucguggucgaggacgagggcugcaccaaccugagcggguucuccuacauggagcugaaggugggcuacauccucgccaucaagaugaacggguucacgugcaccggcguggucaccgaggcggagaccuacacgaacuucgugggcuacgugaccaccaccuucaagcgcaagcacuuccggcccacgccggacgccugccgcgccgccuacaacuggaagauggccggggacccccgguacgaggagagccugcagaaccccuaccccgacuaccgcuggcugcggaccgucaagaccaccaaggagucccucgugaucaucagcccguccguggcggaccuggaccccuacgaccgcagccugcacucccgggucuuccccagcggcaagugcuccgggguggccgugagcuccacguacugcagcaccaaccacgacuacaccaucuggaugcccgagaacccgcgccucggcauguccugcgacaucuucaccaacagccgggggaagcgcgccuccaagggcagcgagacgugcggcuucgucgacgagcgggggcuguacaagucccugaagggcgccugcaagcucaagcugugcggggugcugggccuccgccugauggacggcaccuggguggcgaugcagaccagcaacgagaccaaguggugcccgcccgaccagcuggucaaccuccacgacuuccacagcgacgagaucgagcaccuggugguggaggagcugguccggaagcgcgaggagugccucgacgcccuggaguccaucaugacgaccaagagcguguccuuccggcgccugagccaccuccggaagcuggugcccggguucggcaaggccuacaccaucuucaacaagacccugauggaggccgacgcccacuacaaguccguccgcacguggaacgagaucauccccagcaaggggugccuccgggugggcgggcgcugccacccccacgucaacggcguguucuucaacggcaucauccuggggcccgacggcaacgugcugauccccgagaugcaguccagccuccugcagcagcacauggagcugcucgaguccagcgucaucccgcuggugcacccccuggcggaccccuccaccaucuucaaggacggggacgaggccgaggacuucguggagguccaccuccccgacgugcacaaccaggugagcggcgucgaccuggggcugccgaacuggggcaaguacgugcuccuguccgccggcgcccugaccgcccucaugcugaucaucuuccugaugaccugcugccggcgcgugaaccgcagcgagcccacgcagcacaaccugcgggggaccggccgcgaggucuccgugaccccgcagagcgggaagaucaucuccagcugggagucccacaagagcggcggggagacccggcucuga

SEQ ID NO: 94781 - RNA, 1575 nt, Artificial Sequence
  derived and/or modified CDS sequence (opt1) from glycoprotein__RABV__AB817099.1
auggugccccaggcccugcuguucgucccgcugcugguguucagccucugcuucggcaaguuccccaucuacaccauccccgacaagcuggggcccugguccccgaucgacauccaccaccugagcugccccaacaaccucguggucgaggacgagggcugcaccaaccuguccggguucagcuacauggagcugaaggugggcuacaucuccgccaucaaggugaacggguucacgugcaccggcgucgugaccgaggcggagaccuacacgaacuucgugggcuacgucaccaccaccuuccgccggaagcacuuccgccccacgcccgacgccugccgggccgccuacaacuggaagauggccggggacccgcgcuacgaggagagccuccacaaccccuaccccgacuaccacuggcugcggaccgugaagaccaccaaggagucccuggugaucaucagccccuccgucgcggaccucgacccguacgacaagagccugcacucccgcguguuccccggcgggaagugcagcggcaucacgguguccagcaccuacugcuccaccaaccacgacuacaccaucuggaugcccgagaacccccggcuggggacgagcugcgacaucuucgucaacucccgcggcaagcgggccagcaagggcgggaagaccugcggcuucguggacgagcgcgggcucuacaagucccugaagggcgccugcaagcugaagcucugcggcgugccggggcugcggcugauggacggcaccugggucgccauccagaccagcgacgagacgaaguggugcccgcccgaccagcucgugaaccugcacgacuuccgcagcgacgagaucgagcaccugguggucgaggagcucgugaagaagcgggaggagugccuggacgcgcuggaguccaucaugaccaccaagagcguguccuuccgccggcucagccaccuccgcaagcugguccccggguucggcaaggccuacaccaucuucaacaagacgcucauggaggccgacgcccacuacaaguccgugcggaccuggaacgagaucauccccagcaaggggugccugcgcgucggcggccggugccacccccacgugaacgggguguucuucaacggcaucauccuggggcccgacggccacguccucauccccgagaugcaguccagccugcugcagcagcacauggagcuccuggaguccagcgugaucccgcugaugcacccccucgccgaccccuccaccguguucaaggacggggacgaggcggaggacuucgucgaggugcaccuccccgacgugcacaagcugaucagcggcgucgaccugggccugccguccugggggaaguacgugcugaugagcgccggcauccucaccacgcugaugcugaugaucuuccucaugaccugcugccgccgggugaaccaggccggguccaagcagcacggccuggagggggccggccgcaaggucagcgugaccucccagaacggccgcgugaucagcuccugggagagcuacaagagcgggggcgagacccggcuguga

SEQ ID NO: 94782 - RNA, 1575 nt, Artificial Sequence
  derived and/or modified CDS sequence (opt1) from glycoprotein__RABV__AB817100.1
auggugccccaggcccugcuguucgucccgcugcugguguucagccucugcuucggcaaguuccccaucuacaccauccccgacaagcuggggcccugguccccgaucgacauccaccaccugagcugccccaacaaccucguggucgaggacgagggcugcaccaaccuguccggguucagcuacauggagcugaaggugggcuacaucuccgccaucaaggugaacggguucacgugcaccggcgucgugaccgaggcggagaccuacacgaacuucgugggcuacgucaccaccaccuuccgccggaagcacuuccgccccacgcccgacgccugccgggccgccuacaacuggaagauggccggggacccgcgcuacgaggagagccuccacaaccccuaccccgacuaccacuggcugcggaccgugaagaccaccaaggagucccuggugaucaucagccccuccgucgcggaccucgacccguacgacaagagccugcacucccgcguguuccccggcgggaagugcagcggcaucacgguguccagcaccuacugcuccaccaaccacgacuacaccaucuggaugcccgagaacccccggcuggggacgagcugcgacaucuucgucaacucccgcggcaagcgggccagcaagggcgggaagaccugcggcuucguggacgagcgcgggcucuacaagucccugaagggcgccugcaagcugaagcucugcggcgugccggggcugcggcugauggacggcaccugggucgccauccagaccagcgacgagacgaaguggugcccgcccgaccagcucgugaaccugcacgacuuccgcagcgacgagaucgagcaccugguggucgaggagcucgugaagaagcgggaggagugccuggacgcgcuggaguccaucaugaccaccaagagcguguccuuccgccggcucagccaccuccgcaagcugguccccggguucggcaaggccuacaccaucuucaacaagacgcucauggaggccgacgcccacuacaaguccgugcggaccuggaacgagaucauccccagcaaggggugccugcgcgucggcggccggugccacccccacgugaacgggguguucuucaacggcaucauccuggggcccgacggccacguccucauccccgagaugcaguccagccugcugcagcagcacauggagcuccuggaguccagcgugaucccgcugaugcacccccucgccgaccccuccaccguguucaaggacggggacgaggcggaggacuucgucgaggugcaccuccccgacgugcacaagcugaucagcggcgucgaccugggccugccguccugggggaaguacgugcugaugagcgccggcauccucaucacccugaugcugaugaucuuccucaugacgugcugccgccgggugaaccaggccggguccaagcagcacggccuggagggggccggccgcaaggucagcgugaccucccagaacggccgcgugaucagcuccugggagagcuacaagagcgggggcgagacccggcuguga

SEQ ID NO: 94783 - RNA, 1575 nt, Artificial Sequence
  derived and/or modified CDS sequence (opt1) from glycoprotein__RABV__AB817101.1
auggugccccaggcccugcuguucgucccgcugcugguguucagccucugcuucggcaaguuccccaucuacaccauccccgacaagcuggggcccugguccccgaucgacauccaccaccugagcugccccaacaaccucguggucgaggacgagggcugcaccaaccuguccggguucagcuacauggagcugaaggugggcuacaucuccgccaucaaggugaacggguucacgugcaccggcgucgugaccgaggcggagaccuacacgaacuucgugggcuacgucaccaccaccuuccgccggaagcacuuccgccccacgcccgacgccugccgggccgccuacaacuggaagauggccggggacccgcgcuacgaggagagccuccacaaccccuaccccgacuaccacuggcugcggaccgugaagaccaccaaggagucccuggugaucaucagccccuccgucgcggaccucgacccguacgacaagagccugcacucccgcguguuccccggcgggaagugcagcggcaucacgguguccagcaccuacugcuccaccaaccacgacuacaccaucuggaugcccgagaacccccggcuggggacgagcugcgacaucuucgucaacucccgcggcaagcgggccagcaagggcgggaagaccugcggcuucguggacgagcgcgggcucuacaagucccugaagggcgccugcaagcugaagcucugcggcgugccggggcugcggcugauggacggcaccugggucgccauccagaccagcgacgagacgaaguggugcccgcccgaccagcucgugaaccugcacgacuuccgcagcgacgagaucgagcaccugguggucgaggagcucgugaagaagcgggaggagugccuggacgcgcuggaguccaucaugaccaccaagagcguguccuuccgccggcucagccaccuccgcaagcugguccccggguucggcaaggccuacaccaucuucaacaagacgcucauggaggccgacgcccacuacaaguccgugcggaccuggaacgagaucauccccagcaaggggugccugcgcgucggcggccggugccacccccacgugaacgggguguucuucaacggcaucauccuggggcccgacggccacguccucauccccgagaugcaguccagccugcugcagcagcacauggagcuccuggaguccagcgugaucccgcugaugcacccccucgccgaccccuccaccguguucaaggacggggacgaggcggaggacuucgucgaggugcaccuccccgacgugcacaagcugaucagcggcgucgaccugggccugccguccugggggaaguacgugcugaugagcgccggcauccucaccacgcugaugcugaugaucuuccucaugaccugcugccgccgggugaaccaggccggguccaagcagcacggccuggaggggcccggccgcaaggucagcgugaccucccagaacggccgcgugaucagcuccugggagagcuacaagagcgggggcgagacccggcuguga

SEQ ID NO: 94784 - RNA, 1575 nt, Artificial Sequence
  derived and/or modified CDS sequence (opt1) from glycoprotein__RABV__AB817102.1
auggugccccagacccugcuguucgucccgcugcugguguucagccucugcuucggcaaguuccccaucuacaccauccccgacaagcuggggcccugguccccgaucgacauccaccaccugagcugccccaacaaccucguggucgaggacgagggcugcacgaaccuguccggguucagcuacauggagcugaaggugggcuacaucuccgccaucaaggugaacggguucacgugcaccggcgucgugaccgaggccgagaccuacaccaacuucgugggcuacgucaccaccacguuccgccggaagcacuuccgccccacccccgacgcgugccgggccgccuacaacuggaagauggccggggacccgcgcuacgaggagagccuccacaaccccuaccccgacuaccacuggcugcggaccgugaagaccacgaaggagucccuggugaucaucagccccuccgucgccgaccucgacccguacgacaagagccugcacucccgcguguuccccggcgggaagugcagcggcaucaccguguccagcaccuacugcuccaccaaccacgacuacacgaucuggaugcccgagaacccccggcuggggaccagcugcgacaucuucgucaacucccgcggcaagcgggcgagccgcggcgggaagaccugcggcuucguggacgagcgggggcucuacaagucccugaagggcgccugcaagcugaagcucugcggcgugccggggcugcgccugauggacggcaccugggucgccauccagacgagcgacgagaccaaguggugcccgcccgaccagcucgugaaccugcacgacuuccggagcgacgagaucgagcaccugguggucgaggagcucgugaagaagcgcgaggagugccuggacgcccuggaguccaucaugaccaccaagagcguguccuuccggcgccucagccaccuccggaagcugguccccggguucggcaaggcguacacgaucuucaacaagacccucauggaggccgacgcccacuacaaguccgugcgcaccuggaacgagaucauccccagcaaggggugccugcgggucggcggccgcugccacccccacgugaacgggguguucuucaacggcaucauccuggggcccgacggccacguccucauccccgagaugcaguccagccugcugcagcagcacauggagcuccuggaguccagcgugaucccgcugaugcacccccucgccgaccccuccaccguguucaaggacggggacgaggccgaggacuucgucgaggugcaccuccccgacgugcacaagcugaucagcggcgucgaccugggccugccguccugggggaaguacgugcugaugagcgugggcauccucacgacccugaugcugaugaucuuccucaugaccugcugccggcgcgucaaccagguggggcccaagcagcacggccuggagggggcgggccgcaagguguccgucaccagccagaacggccgggugaucuccagcugggaguccuacaagagcgggggcgagacgcgccuguga

SEQ ID NO: 94785 - RNA, 1575 nt, Artificial Sequence
  derived and/or modified CDS sequence (opt1) from glycoprotein__RABV__AB817103.1
auggugccccaggcccugcuguucgucccgcugcugguguucagccucugcuucggcaaguuccccaucuacaccauccccgacaagcuggggcccugguccccgaucgacauccaccaccugagcugccccaacaaccucguggucgaggacgagggcugcaccaaccuguccggguucagcuacauggagcugaaggugggcuacaucuccgccaucaaggugaacggguucacgugcaccggcgucgugaccgaggcggagaccuacacgaacuucgugggcuacgucaccaccaccuuccgccggaagcacuuccgccccacgcccgacgccugccgggccgccuacaacuggaagauggccggggacccgcgcuacgaggagagccuccacaaccccuaccccgacuaccacuggcugcggaccgugaagaccaccaaggagucccuggugaucaucagccccuccgucgcggaccucgacccguacgacaagagccugcacucccgcguguuccccggcgggaagugcagcggcaucacgguguccagcaccuacugcuccaccaaccacgacuacaccaucuggaugcccgagaacccccggcuggggacgagcugcgacaucuucgucaacucccgcggcaagcgggccagcaagggcgggaagaccugcggcuucguggacgagcgcgggcucuacaagucccugaagggcgccugcaagcugaagcucugcggcgugccggggcugcggcugauggacggcaccugggucgccauccagaccagcgacgagacgaaguggugcccgcccgaccagcucgugaaccugcacgacuuccgcagcgacgagaucgagcaccugguggucgaggagcucgugaagaagcgggaggagugccuggacgcgcuggaguccaucaugaccaccaagagcguguccuuccgccggcucagccaccuccgcaagcugguccccggguucggcaaggccuacaccaucuucaacaagacgcucauggaggccgacgcccacuacaaguccgugcggaccuggaacgagaucauccccagcaaggggugccugcgcgucggcggccggugccacccccacgugaacgggguguucuucaacggcaucauccuggggcccgacggccacguccucauccccgagaugcaguccagccugcugcagcagcacauggagcuccuggaguccagcgugaucccgcugaugcacccccucgccgaccccuccaccguguucaaggacggggacgaggcggaggacuucgucgaggugcaccuccccgacgugcacaagcugaucagcggcgucgaccugggccugccguccugggggaaguacgugcugaugagcgccggcauccucaccacgcugaugcugaugaucuuccucaugaccugcugccgccgggugaaccaggccggguccaagcagcacggccuggagggggccggccgcaaggucagcgugaccucccagaacggccgcaucaucagcuccugggagagcuacaagagcgggggcgagacccggcuguga

SEQ ID NO: 94786 - RNA, 1575 nt, Artificial Sequence; identical to SEQ ID NO: 94782
  derived and/or modified CDS sequence (opt1) from glycoprotein__RABV__AB817104.1

SEQ ID NO: 94787 - RNA, 1575 nt, Artificial Sequence
  derived and/or modified CDS sequence (opt1) from glycoprotein__RABV__AB817105.1
auggugccccaggcccugcuguucgucccgcugcugguguucagccucugcuucggcaaguuccccaucuacaccauccccgacaagcuggggcccugguccccgaucgacauccaccaccugagcugccccaacaaccucguggucgaggacgagggcugcaccaaccuguccggguucagcuacauggagcugaaggugggcuacaucuccgccaucaaggugaacggguucacgugcaccggcgucgugaccgaggcggagaccuacacgaacuucgugggcuacgucaccaccaccuuccgccggaagcacuuccgccccacgcccgacgccugccgggccgccuacaacuggaagauggccggggacccgcgcuacgaggagagccuccacaaccccuaccccgacuaccacuggcugcggaccgugaagaccaccaaggagucccuggugaucaucagccccuccgucgcggaccucgacccguacgacaagagccugcacucccgcguguuccccggcgggaagugcagcggcaucacgguguccagcaccuacugcuccaccaaccacgacuacaccaucuggaugcccgagaacccccggcuggggacgagcugcgacaucuucgucaacucccgcggcaagcgggccagcaagggcgggaagaccugcggcuucguggacgagcgcgggcucuacaagucccugaagggcgccugcaagcugaagcucugcggcgugccggggcugcggcugauggacggcaccugggucgccauccagaccagcgacgagacgaaguggugcccgcccgaccagcucgugaaccugcacgacuuccgcagcgacgagaucgagcaccugguggucgaggagcucgugaagaagcgggaggagugccuggacgcgcuggaguccaucaugaccaccaagagcguguccuuccgccggcucagccaccuccgcaagcugguccccggguucggcaaggccuacaccaucuucaacaagacgcucauggaggccgacgcccacuacaaguccgugcggaccuggaacgagaucauccccagcaaggggugccugcgcgucggcggccggugccacccccacgugaacgggguguucuucaacggcaucauccuggggcccgacggccacguccucauccccgagaugcaguccagccugcugcagcagcacauggagcuccuggaguccagcgugaucccgcugaugcacccccucgccgaccccuccaccguguucaaggacggggacgaggcggaggacuucgucgaggugcaccuccccgacgugcacaagcugaucagcggcgucgaccugggccugccguccugggggaaguacgugcugaugagcgccggcauccucaccacgcugaugcugaugaucuuccucaugaccugcugccgccgggugaaccaggccggguccaagcagcacggccuggagggggccggccgcaaggucagcgugaccucccagaccggccgcaucaucagcuccugggagagcuacaagagcgggggcgagacgcggcuguga

SEQ ID NO: 94788 - RNA, 1575 nt, Artificial Sequence; identical to SEQ ID NO: 94781
  derived and/or modified CDS sequence (opt1) from glycoprotein__RABV__AB817106.1

SEQ ID NO: 94789 - RNA, 1575 nt, Artificial Sequence; identical to SEQ ID NO: 94782
  derived and/or modified CDS sequence (opt1) from glycoprotein__RABV__AB817107.1

SEQ ID NO: 94790 - RNA, 1575 nt, Artificial Sequence; identical to SEQ ID NO: 94782
  derived and/or modified CDS sequence (opt1) from glycoprotein__RABV__AB817108.1

SEQ ID NO: 94791 - RNA, 1575 nt, Artificial Sequence; identical to SEQ ID NO: 94782
  derived and/or modified CDS sequence (opt1) from glycoprotein__RABV__AB817109.1

SEQ ID NO: 94792 - RNA, 1575 nt, Artificial Sequence
  derived and/or modified CDS sequence (opt1) from glycoprotein__RABV__AB817110.1
auggugccccaggcccugcuguucgucccgcugcugguguucagccucugcuucggcaaguuccccaucuacaccauccccgacaagcuggggcccugguccccgaucgacauccaccaccugagcugccccaacaaccucguggucgaggacgagggcugcaccaaccuguccggguucagcuacauggagcugaaggugggcuacaucuccgccaucaaggugaacggguucacgugcaccggcgucgugaccgaggcggagaccuacacgaacuucgugggcuacgucaccaccaccuuccgccggaagcacuuccgccccacgcccgacgccugccgggccgccuacaacuggaagauggccggggacccgcgcuacgaggagagccuccacaaccccuaccccgacuaccacuggcugcggaccgugaagaccaccaaggagucccuggugaucaucagccccuccgucgcggaccucgacccguacgacaagagccugcacucccgcguguuccccggcgggaagugcagcggcaucacgguguccagcaccuacugcuccaccaaccacgacuacaccaucuggaugcccgagaacccccggcuggggacgagcugcgacaucuucgucaacucccgcggcaagcgggccagcaagggcgggaagaccugcggcuucguggacgagcgcgggcucuacaagucccugaagggcgccugcaagcugaagcucugcggcgugccggggcugcggcugauggacggcaccugggucgccauccagaccagcgacgagacgaaguggugcccgcccgaccagcucgugaaccugcacgacuuccgcagcgacgagaucgagcaccugguggucgaggagcucgugaagaagcgggaggagugccuggacgcgcuggaguccaucaugaccaccaagagcguguccuuccgccggcucagccaccuccgcaagcugguccccggguucggcaaggccuacaccaucuucaacaagacgcucauggaggccgacgcccacuacaaguccgugcggaccuggaacgagaucauccccagcaaggggugccugcgcgucggcggccggugccacccccacgugaacgggguguucuucaacggcaucauccuggggcccgacggccacguccucauccccgagaugcaguccagccugcugcagcagcacauggagcuccuggaguccagcgugaucccgcugaugcacccccucgccgaccccuccaccguguucaaggacggggacgaggcggaggacuucgucgaggugcaccuccccgacgugcacaagcugaucagcggcgucgaccugggccugccguccugggggaaguacgugcugaucagcgccggcauccucaucacccugaugcugaugaucuuccucaugacgugcugccgccgggugaaccaggccggguccaagcagcacggccuggagggggccggccgcaaggucagcgugaccucccagaacggccgcgugaucagcuccugggagagcuacaagaacgggggcgagacccggcuguga

SEQ ID NO: 94793 - RNA, 1575 nt, Artificial Sequence
  derived and/or modified CDS sequence (opt1) from glycoprotein__RABV__AB817111.1
auggugccccaggcccugcuguucgucccgcugcugguguucagccucugcuucggcaaguuccccaucuacaccauccccgacaagcuggggcccugguccccgaucgacauccaccaccugagcugccccaacaaccucguggucgaggacgagggcugcaccaaccuguccggguucagcuacauggagcugaaggugggcuacaucuccgccaucaaggugaacggguucacgugcaccggcgucgugaccgaggcggagaccuacacgaacuucgugggcuacgucaccaccaccuuccgccggaagcacuuccgccccacgcccgacgccugccgggccgccuacaacuggaagauggccggggacccgcgcuacgaggagagccuccacaaccccuaccccgacuaccacuggcugcggaccgugaagaccaccaaggagucccuggugaucaucagccccuccgucgcggaccucgacccguacgacaagagccugcacucccgcguguuccccggcgggaagugcagcggcaucacgguguccagcaccuacugcuccaccaaccacgacuacaccaucuggaugcccgagaacccccggcuggggacgagcugcgacaucuucgucaacucccgcggcaagcgggccagcaagggcgggaagaccugcggcuucguggacgagcgcgggcucuacaagucccugaagggcgccugcaagcugaagcucugcggcgugccggggcugcggcugauggacggcaccugggucgccauccagaccagcgacgagacgaaguggugcccgcccgaccagcucgugaaccugcacgacuuccgcagcgacgagaucgagcaccugguggucgaggagcucgugaagaagcgggaggagugccuggacgcgcuggaguccaucaugaccaccaagagcguguccuuccgccggcucagccaccuccgcaagcugguccccggguucggcaaggccuacaccaucuucaacaagacgcucauggaggccgacgcccacuacaaguccgugcggaccuggaacgagaucauccccagcaaggggugccugcgcgucggcggccggugccacccccacgugaacgggguguucuucaacggcaucauccuggggcccgacggccacguccucauccccgagaugcaguccagccugcugcagcagcacauggagcuccuggaguccagcgugaucccgcugaugcacccccucgccgaccccuccaccguguucaaggacggggacgaggcggaggacuucgucgaggugcaccuccccgacgugcacaagcugaucagcggcgucgaccugggccugccguccugggggaaguacgugcugaugagcgccggcauccucaucacccugaugcugaugaucuuccucaugacgugcugccgccgggugaaccaggccgggucccgccagcacgagcuggagggcgccgggcgcaaggucagcgugaccucccagaacggccgggugaucagcuccugggagagcuacaagagcggcggggagacccgccuguga

SEQ ID NO: 94794 - RNA, 1575 nt, Artificial Sequence; identical to SEQ ID NO: 94792
  derived and/or modified CDS sequence (opt1) from glycoprotein__RABV__AB817112.1

SEQ ID NO: 94795 - RNA, 1575 nt, Artificial Sequence
  derived and/or modified CDS sequence (opt1) from glycoprotein__RABV__AB817113.1
auggugccccaggcccugcuguucgucccgcugcugguguucagccucugcuucggcaaguuccccaucuacaccauccccgacaagcuggggcccugguccccgaucgacgugcaccaccugagcugccccaacaaccucgucguggaggacgagggcugcaccaaccuguccggguucagcuacauggagcugaaggugggcuacaucuccgccaucaaggucaacggguucacgugcaccggcguggugaccgaggcggagaccuacacgaaccucgucggcuacgugaccaccaccuuccgccggaagcacuuccgccccacgcccgacgccugccgggccagcuacaacuggaagauggccggggacccgcgcuacgaggagucccugcacaaccccuaccccgacuaccacuggcugcggaccgugaagaccaccaaggagagccucgucaucaucucccccagcguggccgaccuggacccguacgacaagucccugcacagccgcguguuccccggcgggaagugcuccggcaucacggucagcuccaccuacugcagcaccaaccacgacuacaccaucuggaugcccgagaacccccggcucgggacguccugcgacaucuucgugaacagccgcggcaagcgggcguccaagggcgggaagaccugcggcuucguggacgagcgcgggcuguacaagagccugaagggcgccugcaagcucaagcugugcggcgucccggggcugcggcucauggacggcaccuggguggccauccagaccagcgacgagacgaaguggugcccgcccgaccagcuggugaaccugcacgacuuccgcuccgacgagaucgagcaccucgucguggaggagcuggugaagaagcgggaggagugccuggacgcccucgagagcaucaugaccaccaaguccgucagcuuccgccggcugucccaccuccgcaagcucgugcccggguucggcaaggcguacaccaucuucaacaagacgcugauggaggccgacgcccacuacaagagcguccggaccuggaacgagaucauccccuccaaggggugccugcgcgugggcggccggugccacccccacgugaacggggucuucuucaacggcaucauccucgggcccgacggccacgugcugauccccgagaugcagagcucccugcuccagcagcacauggagcugcuggagagcuccgugaucccgcucaugcacccccuggccgaccccagcaccgucuucaaggacggggacgaggccgaggacuucguggaggugcaccuccccgacguccacaagcugaucuccggcguggaccugggccugccgagcugggggaaguacgugcucauguccgcgggcauccugaccacgcugaugcucaugaucuuccugaugaccugcugccgccgggucaaccaggccgggagcaagcagcacggccuggagggggccggccgcaagguguccgugaccagccagaacggccgcgucaucuccagcugggagagcuacaaguccgggggcgagacccggcuguga

SEQ ID NO: 94796 - RNA, 1575 nt, Artificial Sequence
  derived and/or modified CDS sequence (opt1) from glycoprotein__RABV__AB817114.1
auggugccccaggcccugcuguucgucccgcugcugguguucagccucugcuucggcaaguuccccaucuacaccauccccgacaagcuggggcccugguccccgaucgacauccaccaccugagcugccccaacaaccucguggucgaggacgagggcugcaccaaccuguccggguucagcuacauggagcugaaggugggcuacaucuccgccaucaaggugaacggguucacgugcaccggcgucgugaccgaggcggagaccuacacgaacuucgugggcuacgucaccaccaccuuccgccggaagcacuuccgccccacgcccgacgccugccgggccgccuacaacuggaagauggccggggacccgcgcuacgaggagagccuccacaaccccuaccccgacuaccacuggcugcggaccgugaagaccaccaaggagucccuggugaucaucagccccuccgucgcggaccucgacccguacgacaagagccugcacucccgcguguuccccggcgggaagugcagcggcaucacgguguccagcaccuacugcuccaccaaccacgacuacaccaucuggaugcccgagaacccccggcuggggacgagcugcgacaucuucgucaacucccgcggcaagcgggccagcaagggcgggaagaccugcggcuucguggacgagcgcgggcucuacaagucccugaagggcgccugcaagcugaagcucugcggcgugccggggcugcggcugauggacggcaccugggucgccauccagaccagcgacgagacgaaguggugcccgcccgaccagcucgugaaccugcacgacuuccgcagcgacgagaucgagcaccugguggucgaggagcucgugaagaagcgggaggagugccuggacgcgcuggaguccaucaugaccaccaagagcguguccuuccgccggcucagccaccuccgcaagcugguccccggguucggcaaggccuacaccaucuucaacaagacgcucauggaggccgacgcccacuacaaguccgugcggaccuggaacgagaucauccccagcaaggggugccugcgcgucggcggccggugccacccccacgugaacgggguguucuucaacggcaucauccuggggcccgacggccacguccucauccccgagaugcaguccagccugcugcagcagcacauggagcuccuggaguccagcgugaucccgcugaugcacccccucgccgaccccuccaccguguucaaggacggggacgaggcggaggacuucgucgaggugcaccuccccgacgugcacaagcugaucagcggcgucgaccugggccugccguccugggggaaguacgugcugaugagcgccggcauccucaccacgcugaugcugaugaucuuccucaugaccugcugccgccgggugaaccaggccggguccaagcagcacggccuggagcgcgccgggcgcaaggucagcgugaccucccagaacggccgggugaucagcuccugggagagcuacaagagcggcggggagacccgccuguga

SEQ ID NO: 94797 - RNA, 1575 nt, Artificial Sequence
  derived and/or modified CDS sequence (opt1) from glycoprotein__RABV__AB817115.1
auggugccccaggcccugcuguucgucccgcugcugguguucagccucugcuucggcaaguuccccaucuacaccauccccgacaagcuggggcccugguccccgaucgacauccaccaccugagcugccccaacaaccucguggucgaggacgagggcugcaccaaccuguccggguucagcuacauggagcugaaggugggcuacaucuccgccaucaaggugaacggguucacgugcaccggcgucgugaccgaggcggagaccuacacgaacuucgugggcuacgucaccaccaccuuccgccggaagcacuuccgccccacgcccgacgccugccgggccgccuacaacuggaagauggccggggacccgcgcuacgaggagagccuccacaaccccuaccccgacuaccacuggcugcggaccgugaagaccaccaaggagucccuggugaucaucagccccuccgucgcggaccucgacccguacgacaagagccugcacucccgcguguuccccggcgggaagugcagcggcaucacgguguccagcaccuacugcuccaccaaccacgacuacaccaucuggaugcccgagaacccccggcuggggacgagcugcgacaucuucgucaacucccgcggcaagcgggccagcaagggcgggaagaccugcggcuucguggacgagcgcgggcucuacaagucccugaagggcgccugcaagcugaagcucugcggcgugccggggcugcggcugauggacggcaccugggucgccauccagaccagcgacgagacgaaguggugcccgcccgaccagcucgugaaccugcacgacuuccgcagcgacgagaucgagcaccugguggucgaggagcucgugaagaagcgggaggagugccuggacgcgcuggaguccaucaugaccaccaagagcguguccuuccgccggcucagccaccuccgcaagcugguccccggguucggcaaggccuacaccaucuucaacaagacgcucauggaggccgacgcccacuacaaguccgugcggaccuggaacgagaucauccccagcaaggggugccugcgcgucggcggccggugccacccccacgugaacgggguguucuucaacggcaucauccuggggcccgacggccacguccucauccccgagaugcaguccagccugcugcagcagcacauggagcuccuggaguccagcgugaucccgcugaugcacccccucgccgaccccuccaccguguucaaggacggggacgaggcggaggacuucgucgaggugcaccuccccgacgugcacaagcugaucagcggcgucgaccugggccugccgggguggggcaaguacgugcugauguccgccgggauccucaccacgcugaugcugaugaucuuccucaugaccugcugccgccgggugaaccaggccggcagcaagcagcacgggcuggagggcgccggccgcaaggucuccgugaccagccagaacgggcgcgugaucuccagcugggaguccuacaagagcggcggggagacccggcuguga

SEQ ID NO: 94798 - RNA, 1575 nt, Artificial Sequence; identical to SEQ ID NO: 94782
  derived and/or modified CDS sequence (opt1) from glycoprotein__RABV__AB817116.1

SEQ ID NO: 94799 - RNA, 1575 nt, Artificial Sequence; identical to SEQ ID NO: 94787
  derived and/or modified CDS sequence (opt1) from glycoprotein__RABV__AB817117.1

SEQ ID NO: 94800 - RNA, 1575 nt, Artificial Sequence; identical to SEQ ID NO: 94782
  derived and/or modified CDS sequence (opt1) from glycoprotein__RABV__AB817118.1

SEQ ID NO: 94801 - RNA, 1575 nt, Artificial Sequence; identical to SEQ ID NO: 94781
  derived and/or modified CDS sequence (opt1) from glycoprotein__RABV__AB817119.1

SEQ ID NO: 94802 - RNA, 1575 nt, Artificial Sequence; identical to SEQ ID NO: 94782
  derived and/or modified CDS sequence (opt1) from glycoprotein__RABV__AB817120.1

SEQ ID NO: 94803 - RNA, 1575 nt, Artificial Sequence; identical to SEQ ID NO: 94782
  derived and/or modified CDS sequence (opt1) from glycoprotein__RABV__AB817121.1

SEQ ID NO: 94804 - RNA, 1575 nt, Artificial Sequence; identical to SEQ ID NO: 94785
  derived and/or modified CDS sequence (opt1) from glycoprotein__RABV__AB817122.1

SEQ ID NO: 94805 - RNA, 1575 nt, Artificial Sequence
  derived and/or modified CDS sequence (opt1) from glycoprotein__RABV__AB817123.1
auggugccccaggcccugcuguucgucccgcugcugguguucagccucugcuucggcaaguuccccaucuacaccauccccgacaagcuggggcccugguccccgaucgacauccaccaccugagcugccccaacaaccucguggucgaggacgagggcugcaccaaccuguccggguucagcuacauggagcugaaggugggcuacaucuccgccaucaaggugaacggguucacgugcaccggcgucgugaccgaggcggagaccuacacgaacuucgugggcuacgucaccaccaccuuccgccggaagcacuuccgccccacgcccgacgccugccgggccgccuacaacuggaagauggccggggacccgcgcuacgaggagagccuccacaaccccuaccccgacuaccacuggcugcggaccgugaagaccaccaaggagucccuggugaucaucagccccuccgucgcggaccucgacccguacgacaagagccugcacucccgcguguuccccggcgggaagugcagcggcaucacgguguccagcaccuacugcuccaccaaccacgacuacaccaucuggaugcccgagaacccccggcuggggacgagcugcgacaucuucgucaacucccgcggcaagcgggccagcaagggcgggaagaccugcggcuucguggacgagcgcgggcucuacaagucccugaagggcgccugcaagcugaagcucugcggcgugccggggcugcggcugauggacggcaccugggucgccauccagaccagcgacgagacgaaguggugcccgcccgaccagcucgugaaccugcacgacuuccgcagcgacgagaucgagcaccugguggucgaggagcucgugaagaagcgggaggagugccuggacgcgcuggaguccaucaugaccaccaagagcguguccuuccgccggcucagccaccuccgcaagcugguccccggguucggcaaggccuacaccaucuucaacaagacgcucauggaggccgacgcccacuacaaguccgugcggaccuggaacgagaucauccccagcaaggggugccugcgcgucggcggccggugccacccccacgugaacgggguguucuucaacggcaucauccuggggcccgacggccacguccucauccccgagaugcaguccagccugcugcagcagcacauggagcuccuggaguccagcgugaucccgcugaugcacccccucgccgaccccuccaccguguucaaggacggggacgaggcggaggaguucgucgaggugcaccuccccgacgugcacaagcugaucagcggcgucgaccugggccugccguccugggggaaguacgugcugaugagcgccggcauccucaucacccugaugcugaugaucuuccucaugacgugcugccgccgggugaaccaggccggguccaagcagcacggccuggagggggccggccgcaaggucagcgugaccucccagaacggccgcgugaucagcuccugggagagcuacaagagcgggggcgagacccggcuguga

SEQ ID NO: 94806 - RNA, 1575 nt, Artificial Sequence; identical to SEQ ID NO: 94782
  derived and/or modified CDS sequence (opt1) from glycoprotein__RABV__AB817124.1

SEQ ID NO: 94807 - RNA, 1575 nt, Artificial Sequence; identical to SEQ ID NO: 94785
  derived and/or modified CDS sequence (opt1) from glycoprotein__RABV__AB817125.1

SEQ ID NO: 94808 - RNA, 1575 nt, Artificial Sequence
  derived and/or modified CDS sequence (opt1) from glycoprotein__RABV__AB817128.1
auggugccccaggcccugcuguucgucccgcugcuggccuucagccucugcuucggcaaguuccccaucuacaccauccccgacaagcuggggcccugguccccgaucgacauccaccaccugagcugccccaacaaccucgugguggaggacgagggcugcaccaaccuguccggguucagcuacauggagcugaaggucggcuacaucuccgcgaucaaggugaacggguucacgugcaccggcguggucaccgaggccgagaccuacacgaacuucgugggcuacgugaccaccaccuuccgccggaagcacuuccgccccacgcccgacgccugccgggccgccuacaacuggaagauggcgggggacccgcgcuacgaggagagccuccacaaccccuaccccgacuaccacuggcugcggaccgucaagaccaccaaggagucccuggugaucaucagccccuccguggccgaccucgacccguacgacaagagccugcacucccgcgucuuccccggcgggaagugcagcggcaucacgguguccagcaccuacugcuccaccaaccacgacuacaccaucuggaugcccgagaacccccggcuggggacgagcugcgacaucuucgugaacucccgcggcaagcgggccagcaagggcgggaagaccugcggcuucgucgacgagcgcgggcucuacaagucccugaagggcgccugcaagcugaagcucugcggcgugccggggcugcggcugauggacggcaccuggguggcgauccagaccagcgacgagacgaaguggugcccgcccgaccagcucgucaaccugcacgacuuccgcagcgacgagaucgagcaccuggugguggaggagcucgucaagaagcgggaggagugccuggacgcccuggaguccaucaugaccaccaagagcguguccuuccgccggcucagccaccuccgcaagcuggugcccggguucggcaaggccuacaccaucuucaacaagacgcucauggaggccgacgcccacuacaaguccguccggaccuggaacgagaucauccccagcaaggggugccugcgcgugggcggccggugccacccccacgucaacgggguguucuucaacggcaucauccuggggcccgacggccacgugcucauccccgagaugcaguccagccugcugcagcagcacauggagcuccuggaguccagcgucaucccgcugaugcacccccucgcggaccccuccaccguguucaaggacggggacgaggccgaggacuucguggagguccaccuccccgacgugcacaagcugaucagcggcguggaccugggccugccguccugggggaaguacguccugaugagcgccggcauccucaucacccugaugcugaugaucuuccucaugacgugcugccgccgggugaaccaggccggguccaagcagcacggccuggagggggccggccgcaaggugagcgucuccagccagaacggccgcgugaucuccagcugggagagcuacaaguccgggggcgagacccggcuguga

SEQ ID NO: 94809 - RNA, 1575 nt, Artificial Sequence
  derived and/or modified CDS sequence (opt1) from glycoprotein__RABV__AB817129.1
auggugccccaggcccugcuguucgucccgcugcugguguucagccucugcuucggcaaguuccccaucuacaccauccccgacaagcuggggcccugguccccgaucgacauccaccaccugagcugccccaacaaccucguggucgaggacgagggcugcaccaaccuguccggguucagcuacauggagcugaaggugggcuacaucuccgccaucaaggugaacggguucacgugcaccggcgucgugaccgaggcggagaccuacacgaacuucgugggcuacgucaccaccaccuuccgccggaagcacuuccgccccacgcccgacgccugccgggccgccuacaacuggaagauggccggggacccgcgcuacgaggagagccuccacaaccccuaccccgacuaccacuggcugcggaccgugaagaccaccaaggagucccuggugaucaucagccccuccgucgcggaccucgacccguacgacaagagccugcacucccgcguguuccccggcgggaagugcagcggcaucacgguguccagcaccuacugcuccaccaaccacgacuacaccaucuggaugcccgagaacccccggcuggggacgagcugcgacaucuucgucaacucccgcggcaagcgggccagcaagggcgggaagaccugcggcuucguggacgagcgcgggcucuacaagucccugaagggcgccugcaagcugaagcucugcggcgugccggggcugcggcugauggacggcaccugggucgccauccagaccagcgacgagacgaaguggugcccgcccgaccagcucgugaaccugcacgacuuccgcagcgacgagaucgagcaccugguggucgaggagcucgugaagaagcgggaggagugccuggacgcgcuggaguccaucaugaccaccaagagcguguccuuccgccggcucagccaccuccgcaagcugguccccggguucggcaaggccuacaccaucuucaacaagacgcucauggaggccgacgcccacuacaaguccgugcggaccuggaacgagaucauccccagcaaggggugccugcgcgucggcggccggugccacccccacgugaacgggguguucuucaacggcaucauccuggggcccgacggccacguccucauccccgagaugcaguccagccugcugcagcagcacauggagcuccuggaguccagcgugaucccgcugaugcacccccucgccgaccccuccaccguguucaaggacggggacgaggcggaggacuucgucgaggugcaccuccccgacgugcacaagcugaucagcggcgucgaccugggccugccguccugggggaaguacgugcugaugagcgccggcauccucaucacccugaugcugaugaucuuccucaugacgugcugccgccgggugaaccaggccggguccaagcagcacggccuggagggggccggccgcaaggucagcguguccagccagaacggccgcgugaucuccagcugggagagcuacaaguccgggggcgagacccggcuguga

SEQ ID NO: 94810 - RNA, 1575 nt, Artificial Sequence; identical to SEQ ID NO: 94782
  derived and/or modified CDS sequence (opt1) from glycoprotein__RABV__AB817130.1

SEQ ID NO: 94811 - RNA, 1575 nt, Artificial Sequence; identical to SEQ ID NO: 94782
  derived and/or modified CDS sequence (opt1) from glycoprotein__RABV__AB817131.1

SEQ ID NO: 94812 - RNA, 1575 nt, Artificial Sequence; identical to SEQ ID NO: 94782
  derived and/or modified CDS sequence (opt1) from glycoprotein__RABV__AB817132.1

SEQ ID NO: 94813 - RNA, 1575 nt, Artificial Sequence
  derived and/or modified CDS sequence (opt1) from glycoprotein__RABV__AB817133.1
auggugccccaggcccugcuguucgucccgcugcugguguucagccucugcuucggcaaguuccccaucuacaccauccccgacaagcuggggcccugguccccgaucgacauccaccaccugagcugccccaacaaccucguggucgaggacgagggcugcaccaaccuguccggguucagcuacauggagcugaaggugggcuacaucuccgccaucaaggugaacggguucacgugcaccggcgucgugaccgaggcggagaccuacacgaacuucgugggcuacgucaccaccaccuuccgccggaagcacuuccgccccacgcccgacgccugccgggccgccuacaacuggaagauggccggggacccgcgcuacgaggagagccuccacaaccccuaccccgacuaccacuggcugcggaccgugaagaccaccaaggagucccuggugaucaucagccccuccgucgcggaccucgacccguacgacaagagccugcacucccgcguguuccccggcgggaagugcagcggcaucacgguguccagcaccuacugcuccaccaaccacgacuacaccaucuggaugcccgagaacccccggcuggggacgagcugcgacaucuucgucaacucccgcggcaagcgggccagcaagggcgggaagaccugcggcuucguggacgagcgcgggcucuacaagucccugaagggcgccugcaagcugaagcucugcggcgugccggggcugcggcugauggacggcaccugggucgccauccagaccagcgacgagacgaaguggugcccgcccgaccagcucgugaaccugcacgacuuccgcagcgacgagaucgagcaccugguggucgaggagcucgugaagaagcgggaggagugccuggacgcgcuggaguccaucaugaccaccaagagcguguccuuccgccggcucagccaccuccgcaagcugguccccggguucggcaaggccuacaccaucuucaacaagacgcucauggaggccgacgcccacuacaaguccgugcggaccuggaacgagaucauccccagcaaggggugccugcgcgucggcggccggugccacccccacgugaacgggguguucuucaacggcaucauccuggggcccgacggccacguccucauccccgagaugcaguccagccugcugcagcagcacauggagcuccuggaguccagcgugaucccgcugaugcacccccucgccgaccccuccaccguguucaaggacggggacgaggcggaggacuucgucgaggugcaccuccccgacgugcacaagcugaucagcggcgucgaccugggccugccguccugggggaaguacgcccugaugagcgccggcgugcucaccacgcugaugcugaugaucuuccucaugaccugcugccgccgggugaaccaggccggguccaagcagcacggccuggagggggccggccgcaaggucagcgugaccucccagaacggccgcgugaucagcuccugggagagcuacaagagcgggggcgagacccggcuguga

SEQ ID NO: 94814 - RNA, 1575 nt, Artificial Sequence
  derived and/or modified CDS sequence (opt1) from glycoprotein__RABV__AB817134.1
auggugccccaggcccugcuguucgucccgcugcugguguucagccucugcuucggcaaguuccccaucuacaccauccccgacaagcuggggcccugguccccgaucgacauccaccaccugagcugccccaacaaccucguggucgaggacgagggcugcaccaaccuguccggguucagcuacauggagcugaaggugggcuacaucuccgccaucaaggugaacggguucacgugcaccggcgucgugaccgaggcggagaccuacacgaacuucgugggcuacgucaccaccaccuuccgccggaagcacuuccgccccacgcccgacgccugccgggccgccuacaacuggaagauggccggggacccgcgcuacgaggagagccuccacaaccccuaccccgacuaccacuggcugcggaccgugaagaccaccaaggagucccuggugaucaucagccccuccgucgcggaccucgacccguacgacaagagccugcacucccgcguguuccccggcgggaagugcagcggcaucacgguguccagcaccuacugcuccaccaaccacgacuacaccaucuggaugcccgagaacccccggcuggggacgagcugcgacaucuucgucaacucccgcggcaagcgggccagcaagggcgggaagaccugcggcuucguggacgagcgcgggcucuacaagucccugaagggcgccugcaagcugaagcucugcggcgugccggggcugcggcugauggacggcaccugggucgccauccagaccagcgacgagacgaaguggugcacccccgaccagcucgugaaccugcacgacuuccgcagcgacgagaucgagcaccugguggucgaggagcucgugaagaagcgggaggagugccuggacgcgcuggaguccaucaugaccaccaagagcguguccuuccgccggcucagccaccuccgcaagcugguccccggguucggcaaggccuacacgaucuucaacaagacccucauggaggccgacgcccacuacaaguccgugcggaccuggaacgagaucauccccagcaaggggugccugcgcgucggcggccggugccacccgcacgugaacgggguguucuucaacggcaucauccuggggcccgacggccacguccucauccccgagaugcaguccagccugcugcagcagcacauggagcuccuggaguccagcgugaucccccugaugcacccgcucgccgaccccuccaccguguucaaggacggggacgaggcggaggacuucgucgaggugcaccuccccgacgugcacaagcugaucagcggcgucgaccugggccugcccuccugggggaaguacgugcugaugagcgccggcauccucaucacgcugaugcugaugaucuuccucaugaccugcugccgccgggugaaccaggccggguccaagcagcacggccuggagggggccggccgcaaggucagcgugaccucccagaacggccgcgugaucagcuccugggagagcuacaagagcgggggcgagacccggcuguga

SEQ ID NO: 94815 - RNA, 1575 nt, Artificial Sequence
  derived and/or modified CDS sequence (opt1) from glycoprotein__RABV__AB817135.1
auggugccccaggcccugcuguucgucccgcugcugguguucagccucugcuucggcaaguuccccaucuacaccauccccgacaagcuggggcccugguccccgaucgacauccaccaccugagcugccccaacaaccucguggucgaggacgagggcugcaccaaccuguccggguucagcuacauggagcugaaggugggcuacaucuccgccaucaaggugaacggguucacgugcaccggcgucgugaccgaggcggagaccuacacgaacuucgugggcuacgucaccaccaccuuccgccggaagcacuuccgccccacgcccgacgccugccgggccgccuacaacuggaagauggccggggacccgcgcuacgaggagagccuccacaaccccuaccccgacuaccacuggcugcggaccgugaagaccaccaaggagucccuggugaucaucagccccuccgucgcggaccucgacccguacgacaagagccugcacucccgcguguuccccggcgggaagugcagcggcaucacgguguccagcaccuacugcuccaccaaccacgacuacaccaucuggaugcccgagaacccccggcuggggacgagcugcgacaucuucgucaacucccgcggcaagcgggccagcaagggcgggaagaccugcggcuucguggacgagcgcgggcucuacaagucccugaagggcgccugcaagcugaagcucugcggcgugccggggcugcggcugauggacggcaccugggucgccauccagaccagcgacgagacgaaguggugcccgcccgaccagcucgugaaccugcacgacuuccgcagcgacgagaucgagcaccugguggucgaggagcucgugaagaagcgggaggagugccuggacgcgcuggaguccaucaugaccacccgcagcguguccuuccggcgccucagccaccuccggaagcugguccccggguucggcaaggccuacaccaucuucaacaagacgcucauggaggccgacgcccacuacaaguccgugcgcaccuggaacgagaucauccccagcaaggggugccugcgggucggcggccgcugccacccccacgugaacgggguguucuucaacggcaucauccuggggcccgacggccacguccucauccccgagaugcaguccagccugcugcagcagcacauggagcuccuggaguccagcgugaucccgcugaugcacccccucgccgaccccuccaccguguucaaggacggggacgaggcggaggacuucgucgaggugcaccuccccgacgugcacaagcugaucagcggcgucgaccugggccugccguccugggggaaguacgugcugaugagcgccggcauccucaucacccugaugcugaugaucuuccucaugacgugcugccggcgcgugaaccaggccggguccaagcagcacggccuggagggggccggccgcaaggucagcgugaccucccagaacggccgggugaucagcuccugggagagcuacaagagcgggggcgagacccgccuguga

SEQ ID NO: 94816 - RNA, 1575 nt, Artificial Sequence; identical to SEQ ID NO: 94781
  derived and/or modified CDS sequence (opt1) from glycoprotein__RABV__AB817136.1

SEQ ID NO: 94817 - RNA, 1575 nt, Artificial Sequence; identical to SEQ ID NO: 94781
  derived and/or modified CDS sequence (opt1) from glycoprotein__RABV__AB817137.1

SEQ ID NO: 94818 - RNA, 1575 nt, Artificial Sequence
  derived and/or modified CDS sequence (opt1) from glycoprotein__RABV__AB817138.1
auggugccccaggcccugcuguucgucccgcugcugguguucagccucugcuucggcaaguuccccaucuacaccauccccgacaagcuggggcccugguccccgaucgacauccaccaccugagcugccccaacaaccucguggucgaggacgagggcugcaccaaccuguccggguucagcuacauggagcugaaggugggcuacaucuccgccaucaaggugaacggguucacgugcaccggcgucgugaccgaggcggagaccuacacgaacuucgugggcuacgucaccaccaccuuccgccggaagcacuuccgccccacgcccgacgccugccgggccgccuacaacuggaagauggccggggacccgcgcuacgaggagagccuccacaaccccuaccccgacuaccacuggcugcggaccgugaagaccaccaaggagucccuggugaucaucagccccuccgucgcggaccucgacccguacgacaagagccugcacucccgcguguuccccggcgggaagugcagcggcaucacgguguccagcaccuacugcuccaccaaccacgacuacaccaucuggaugcccgagaaccagcggcuggggacgagcugcgacaucuucgucaacucccgcggcaagcgggccagcaagggcgggaagaccugcggcuucguggacgagcgcgggcucuacaagucccugaagggcgccugcaagcugaagcucugcggcgugcccgggcugcggcugauggacggcaccugggucgccauccagaccagcgacgagacgaaguggugcccgcccgaccagcucgugaaccugcacgacuuccgcagcgacgagaucgagcaccugguggucgaggagcucgugaagaagcgggaggagugccuggacgcgcuggaguccaucaugaccaccaagagcguguccuuccgccggcucagccaccuccgcaagcugguccccggguucggcaaggccuacaccaucuucaacaagacgcucauggaggccgacgcccacuacaaguccgugcggaccuggaacgagaucauccccagcaaggggugccugcgcgucggcggccggugccacccgcacgugaacgggguguucuucaacggcaucauccuggggcccgacggccacauccucauccccgagaugcaguccagccugcugcagcagcacauggagcuccuggaguccagcgucaucccccugaugcacccgcucgccgaccccuccaccguguucaaggacggggacgaggcggaggacuucguggagguccaccuccccgacgugcacaagcugaucagcggcguggaccugggccugcccuccugggggaaguacguccugaugagcgccggcauccucaccacgcugaugcugaugaucuuccucaugaccugcugccgccgggugaaccgcgugggguccaagcagcacggccuggagggggccggccgcaaggucagcgugaccucccagaacggccgggugaucagcuccugggagagcuacaagagcgggggcgagacccgccuguga

SEQ ID NO: 94819 - RNA, 1575 nt, Artificial Sequence; identical to SEQ ID NO: 94747
  derived and/or modified CDS sequence (opt1) from glycoprotein__RABV__AB817140.1

SEQ ID NO: 94820 - RNA, 1575 nt, Artificial Sequence; identical to SEQ ID NO: 94792
  derived and/or modified CDS sequence (opt1) from glycoprotein__RABV__AB817141.1

SEQ ID NO: 94821 - RNA, 1575 nt, Artificial Sequence
  derived and/or modified CDS sequence (opt1) from glycoprotein__RABV__AB817142.1
auggugccccagguccugcuguucgugccgcugcugguguucagccucugcuucggcaaguuccccaucuacaccauccccgacaagcuggggcccugguccccgaucgacauccaccaccugagcugccccaacaaccucgucguggaggacgagggcugcaccaaccuguccggguucagcuacauggagcugaaggugggcuacaucuccgccaucaaggucaacggguucacgugcaccggcguggugaccgaggccgagaccuacacgaacuucgucggcuacgugaccaccaccuuccgccggaagcacuuccgccccacgcccgacgcgugccgggccgccuacaacuggaagauggccggggacccgcgcuacgaggagagccuccacaaccccuaccccgacuaccacuggcugcggaccgugaagaccaccaaggagucccuggucaucaucagccccuccguggccgaccucgacccguacgacaagagccugcacucccgcguguuccccggcgggaagugcagcggcaucacggucuccagcaccuacugcuccaccaaccacgacuacaccaucuggaugcccgagaacccccggcuggggacgagcugcgacaucuucgugaacucccgcggcaagcgggcgagcaagggcgggaagaccugcggcuucguggacgagcgcgggcucuacaagucccugaagggcgccugcaagcugaagcucugcggcgucccggggcugcggcugauggacggcaccuggguggccauccagaccagcgacgagacgaaguggugcccgcccgaccagcucgugaaccugcacgacuuccgcagcgacgagaucgagcaccuggucguggaggagcucgugaagaagcgggaggagugccuggacgcccuggaguccaucaugaccaccaagagcgucuccuuccgccggcucagccaccuccgcaagcuggugcccggguucggcaaggcguacaccaucuucaacaagacgcucauggaggccgacgcccacuacaaguccguccggaccuggaacgagaucauccccagcaaggggugccugcgcgugggcggccggugccacccccacgugaacggggucuucuucaacggcaucauccuggggcccgacggccacgugcucauccccgagaugcaguccagccugcugcagcagcacauggagcuccuggaguccagcgugaucccgcugaugcacccccucgccgaccccuccaccgucuucaaggacggggacgaggccgaggacuucguggaggugcaccuccccgacguccacaagcugaucagcggcguggaccugggccugccguccugggggaaguacgugcugaugagcgcgggcauccucaccacgcugaugcugaugaucuuccucaugaccugcugccgccgggucaaccaggccggguccaagcagcacggccuggagggggccggccgcaaggugagcgugaccucccagaacggccgcgucaucagcuccugggagagcuacaagagcgggggcgagacccggcuguga

SEQ ID NO: 94822 - RNA, 1575 nt, Artificial Sequence
  derived and/or modified CDS sequence (opt1) from glycoprotein__RABV__AB817143.1
auggugccccaggcccugcuguucgucccgcugcugguguucagccucugcuucggcaaguuccccaucuacaccauccccgacaagcuggggcccugguccccgaucgacauccaccaccugagcugccccaacaaccucguggucgaggacgagggcugcaccaaccuguccggguucagcuacauggagcugaaggugggcuacaucuccgccaucaaggugaacggguucacgugcaccggcgucgugaccgaggcggagaccuacacgaacuucgugggcuacgucaccaccaccuuccgccggaagcacuuccgccccacgcccgacgccugccgggccgccuacaacuggaagauggccggggacccgcgcuacgaggagagccuccacaaccccuaccccgacuaccacuggcugcggaccgugaagaccaccaaggagucccuggugaucaucagccccuccgucgcggaccucgacccguacgacaagagccugcacucccgcguguuccccggcgggaagugcagcggcaucacgguguccagcaccuacugcuccaccaaccacgacuacaccaucuggaugcccgagaacccccggcuggggacgagcugcgacaucuucgucaacucccgcggcaagcgggccagcaagggcgggaagaccugcggcuucguggacgagcgcgggcucuacaagucccugaagggcgccugcaagcugaagcucugcggcgugccggggcugcggcugauggacggcaccugggucgccauccagaccagcgacgagacgaaguggugcccgcccgaccagcucgugaaccugcacgacuuccgcagcgacgagaucgagcaccugguggucgaggagcucgugaagaagcgggaggagugccuggacgcgcuggaguccaucaugaccaccaagagcguguccuuccgccggcucagccaccuccgcaagcugguccccggguucggcaaggccuacaccaucuucaacaagacgcucauggaggccgacgcccacuacaaguccgugcggaccuggaacgagaucauccccagcaaggggugccugcgcgucggcggccggugccacccccacgugaacgggguguucuucaacggcaucauccuggggcccgacggccacguccucauccccgagaugcaguccagccugcugcagcagcacauggagcuccuggaguccagcgugaucccgcugaugcacccccucgccgaccccuccaccguguucaaggacggggacgaggcggaggacuucgucgaggugcaccuccccgacgugcacaagcugaucagcggcgucgaccugggccugccguccugggggaaguacgugcugaugagcgccggcauccucaucacccugaugcugaugaucuuccucaugacgugcugccgccgggugaaccaggccggguccaagcagcacggccuggaggggaccggccgcaaggucagcgugaccucccagaacggccgcgugaucagcuccugggagagcuacaagagcgggggcgagacccggcuguga

SEQ ID NO: 94823 - RNA, 1575 nt, Artificial Sequence; identical to SEQ ID NO: 94782
  derived and/or modified CDS sequence (opt1) from glycoprotein__RABV__AB817144.1

SEQ ID NO: 94824 - RNA, 1575 nt, Artificial Sequence; identical to SEQ ID NO: 94785
  derived and/or modified CDS sequence (opt1) from glycoprotein__RABV__AB817146.1

SEQ ID NO: 94825 - RNA, 1575 nt, Artificial Sequence
  derived and/or modified CDS sequence (opt1) from glycoprotein__RABV__AB838709.1
augaucccccaggcccugcuguucgugccgcugcuggucuucagccucugcuucggcaaguuccccaucuacaccauccccgacaagcuggggcccugguccccgaucgacauccaccaccugagcugccccaacaaccucgugguggaggacgagggcugcaccaaccuguccggguucagcuacauggagcugaaggucggcuacaucuccgccaucaaggugaacggguucacgugcaccggcguggucaccgaggcggagaccuacacgaacuucgugggcuacgugaccaccaccuucaagcgcaagcacuuccggcccacgcccgacgccugccgcgccgccuacaacuggaagauggccggggacccgcgguacgaggagagccuccacaaccccuaccccgacuaccacuggcugcgcaccgucaagaccaccaaggagucccuggugaucaucugccccagcguggcggaccucgacccguacgacaagucccugcacagccgggucuuccccuccggcaagugcagcgggaucacgguguccagcaccuacugcuccaccaaccacgacuacaccaucuggaugcccgagaacccccgccugggcacgagcugcgacaucuucaccaacucccgggggaagcgcgccagcaagggcuccaagaccugcggcuucguggacgagcgggggcucuacaagagccugaagggcgccugcaagcugaagcucugcgggguccugggccugcgccucauggacggcaccugggccgcgauccagacgagcgacgagaccaaguggugcccgcccgaccagcuggugaaccugcacgacuuccgguccgacgagaucgagcaccucguggucgaggagcuggugaagaagcgcgaggagugccuggacgcccucgagagcaucaugaccaccaaguccgugagcuuccggcgccugucccaccuccggaagcucguccccggguucggcaaggccuacacgaucuucaacaagacccugauggaggccgacgcccacuacaagagcgugcgcaccuggaacgagaucauccccuccaaggggugccugcgggugggcgggcgcugccacccgcacgucaacggcguguucuucaacggcaucauccucgggcccgacggccacguccugauccccgagaugcagagcucccugcuccagcagcacauggagcugcuggagagcuccgugaucccccucaugcacccgcuggcggaccccagcaccguguucaaggacgacgacgaggccgaggacuucgucgaggugcaccuccccgacgugcacaagcaggucuccgggguggaccugggccugcccagcugggggaaguacgugcugauguccgccggcguccucacggcccugaugcugaugaucuuccucacgaccugcugccggcgcgccaaccgggcggagagcgcccagcacucccugggcgagcgcgggcgcaaggugagcgugaccucccagagcggccgggucaucagcuccugggagagcuacaaguccgggggcgagaccaagcuguga

SEQ ID NO: 94826 - RNA, 1575 nt, Artificial Sequence; identical to SEQ ID NO: 94658
  derived and/or modified CDS sequence (opt1) from glycoprotein__RABV__AB838710.1

SEQ ID NO: 94827 - RNA, 1575 nt, Artificial Sequence
  derived and/or modified CDS sequence (opt1) from glycoprotein__RABV__AB905545.1
augaucccccaggcccuccuguucgugccgcugcugaucagcuccagcugccucggcaaguuccccaucuacaccauccccgacaagcuggggcccugguccccgaucgacauccaccaccugagcugccccaacaaccucgucguggaggacgagggcugcaccaaccuguccggguucagcuacauggagcugaaggugggcuacaucuccgccaucaaggucaacggguucacgugcaccggcguggugaccgaggcggagaccuacacgaacuucgucggcuacgugaccaccaccuucaagcgcaagcacuuccggcccauccccgacgccugccgcgccgccuacaacuggaagauggccggggacccgcgguacgaggagagccuccagaaccccuaccccgacuaccacuggcugcgcacggugaagaccaccaaggagucccugaucaucaucagccccuccgucgcggaccucgacccguacgacaagagccugcacucccggguguuccccggcgggaagugccugggcaucaccgugagcuccacguacugcagcaccaaccacgacuacaccaucuggaugcccgaggagccccgccucgggaccuccugcgacaucuucacgagcuccaagggcaagaaggccagcaagggcgggaagaccugcggcuucgucgacgagcgggggcuguacaagagccugaagggcgccugcaagcucaagcugugcggcgugcuggggcuccgccugauggacggcaccuggguguccauccagaccagcgacgacacgaaguggugcccgcccgaccagcuggucaaccuccacgacuuccacuccgacgagaucgagcaccuggugguggaggagcuggucaagaagcgggaggagugccucgacgcccuggagagcaucaugaccaccaaguccgugagcuuccgccggcuguccuaccuccgcaagcuggugcccggguucggcaaggcguacaccaucuucaacaagacgcugauggaggccgacgcccacuacaagagcguccggaccuggaacgagaucauccccuccaaggggugccucaaggugcgcgagcggugccacccgcccguggacggcgucuucuucaacggcaucauccuggggcccgacggcaacgugcugauccccgagaugcagagcucccuccugcagcagcacauggagcugcucgagagcuccgucaucccgcugaugcacccccuggccgaccccagcaccguguucaaggagggggacgaggccgaggacuucguggagguccaccuccccgacgugcacaagcagaucuccggcguggaccuggggcugccgagcuggggcaaguaccuccugaugaucgcgggcgggcuggccacccucguccugaucaucugcuccauggccugcugccgccggacgaagcgcaccgagagccggcgccggggcuccggggagagcggcaagaaggugaccgccacgccccagaccaagaagguggucagcuccugggagcuguacaagagcgagggggacgcccgccuguga

SEQ ID NO: 94828 - RNA, 1575 nt, Artificial Sequence
  derived and/or modified CDS sequence (opt1) from glycoprotein__RABV__AB981663.1
augaucccccaggcccugcuguucgugccgcugcuggucuucagccucugcuucggcaaguuccccaucuacaccauccccgacaagcuggggcccugguccccgaucgacauccaccaccugagcugccccaacaaccucgugguggaggacgagggcugcaccaaccuguccggguucagcuacauggagcugaaggucggcuacaucuccgccaucaaggugaacggguucacgugcaccggcguggucaccgaggcggagaccuacacgaacuucgugggcuacgugaccaccaccuucaagcgcaagcacuuccggcccacgcccgacgccugccgcgccgccuacaacuggaagauggccggggacccgcgguacgaggagagccuccacaaccccuaccccgacuaccacuggcugcgcaccgucaagaccaccaaggagucccuggugaucaucagccccuccgugagcgaccucgacccguacgacaagucccugcacagccgggucuuccccuccggcaagugcagcgggaucacgguguccagcaccuacugccccaccaaccacgacuacaccaucuggaugcccgagaacccgcgccugggcacguccugcgacaucuucaccaacagccgggggaagcgcgcguccaagggcagcaagaccugcggcuucguggacgagcgggggcucuacaagagccugaagggcgccugcaagcugaagcucugcgggguccugggccugcgccucauggacggcaccugggccgccauccagacguccgacgaggcgaaguggugcccgcccgaccagcuggugaacauccacgacuuccggagcgacgagaucgagcaccugguggucgaggagcucgugaagaagcgcgaggagugccuggacgcccuggaguccaucaugaccaccaagagcguguccuuccggcgccucagccaccuccggaagcugguccccggguucggcaaggccuacaccaucuucaacaagacgcucauggaggccgacgcccacuacaaguccgugcgcaccuggaacgagaucauccccagcaaggggugccugcgggugggcgggcgcugccacccccacgucaacggcguguucuucaacggcaucauccuggggcccgacggccacguccucauccccgagaugcaguccagccugcugcagcagcacauggagcuccuggaguccagcgugaucccgcugaugcacccccucgcggaccccuccaccguguucaaggacggggacgaggccgaggacuucgucgaggugcaccuccccgacgugcacaagcaggucagcggcguggaccuggggcugccguccuggggcaaguacgugcugaugagcgucggcgccaugaucgcccugaugcucaccaucuuccugacgaccugcugccggaagaccaacggggccggcuccauccagcaccgccccggggagaccggccggaaggugagcgugacgucccagagcgggcgcgucaucagcuccugggagagcuacaaguccggcggcgagaccaagcuguga

SEQ ID NO: 94829 - RNA, 1575 nt, Artificial Sequence
  derived and/or modified CDS sequence (opt1) from glycoprotein__RABV__AB981664.1
augaucccccaggcccugcuguucgugccgcugcuggucuucagccucugcuucggcaaguuccccaucuacaccauccccgacaagcuggggcccugguccccgaucgacauccaccaccugagcugccccaacaaccucgugguggaggacgagggcugcaccaaccuguccggguucagcuacauggagcugaaggucggcuacaucuccgccaucaaggugaacggguucacgugcaccggcguggucaccgaggcggagaccuacacgaacuucgugggcuacgugaccaccaccuucaagcgcaagcacuuccggcccacgcccgacgccugccgcgccgccuacaacuggaagauggccggggacccgcgguacgaggagagccuccacaaccccuaccccgacuaccacuggcugcgcaccgucaagaccaccaaggagucccuggugaucaucagccccuccgugagcgaccucgacccguacgacaagucccugcacagccgggucuuccccuccggcaagugcagcgggaucacgguguccagcaccuacugccccaccaaccacgacuacaccaucuggaugcccgagaacccgcgccugggcacguccugcgacaucuucaccaacagccgggggaagcgcgcguccaagggcagcaagaccugcggcuucguggacgagcgggggcucuacaagagccugaagggcgccugcaagcugaagcucugcgggguccugggccugcgccucauggacggcaccugggccgccauccagacguccgacgaggugaaguggugcccgcccgaccagcuggugaacauccacgacuuccggagcgacgagaucgagcaccuggucguggaggagcucgugaagaagcgcgaggagugccuggacgcgcuggaguccaucaugaccagcaaguccgucagcuuccggcgccucucccaccuccggaagcuggugcccggguucggcaaggccuacaccaucuucaacaagacccucauggaggccgacgcccacuacaagagcgugcgcacguggaacgagaucauccccuccaaggggugccugcgggucggcgggcgcugccacccccacgugaacggcgucuucuucaacggcaucauccuggggcccgacggccacgugcucauccccgagaugcagagcucccugcugcagcagcacauggagcuccuggagagcuccgugaucccgcugaugcacccccucgccgaccccagcaccgucuucaaggacggggacgaggcggaggacuucguggaggugcaccuccccgacguccacaagcaggucuccggcguggaccuggggcugccgagcuggggcaaguacgugcugauguccgugggcgccaugaucgcccugaugcucaugaucuuccugaugaccugcugccggaaggccaacggggccgagagcauccagcaccgccugggcgagaccgggcggaagguguccgucacgagccagagcggccgcgugaucuccagcugggaguccuacaagagcgggggcgagaccaagcucuga

SEQ ID NO: 94830 - RNA, 1575 nt, Artificial Sequence
  derived and/or modified CDS sequence (opt1) from glycoprotein__RABV__AF344305.1
auggugccccaggcccugcucgucgugccgcugcugggcuucagccucugcuucgggaaguuccccaucuacaccauccccgacaagcugggccccugguccccgaucgacauccaccaccugagcugccccaacaaccucguggucgaggacgaggggugcaccaaccuguccggcuucagcuacauggagcugaaggugggguacaucuccgccaucaaggugaacggcuucacgugcaccggcgucgugaccgaggcggagaccuacacgaacuucgugggguacgucaccaccaccuucaagcgcaagcacuuccggcccacgcccgacgagugccgcgccgcccacaacuggaagauggccggcgacccgcgguacgaggagagccuccacaaccccuaccccgacuaccacuggcugcgcaccgugaagaccaccaaggagucccuggugaucaucagccccuccgucgccgaccucgacccguacgacaagagccugcacucccggguguuccccagcgggaagugcuccggcaucacggugagcuccaccuacugcagcaccaaccacgacuacaccaucuggaugcccgagaacccccgccuggggacguccugcgacaucuucaccaacagccggggcaagcgcgcguccaagggcagcaagaccugcggguucgucgacgagcggggccucuacaagagccugaagggggccugcaagcugaagcucugcggcgugcugggccugaagcucauggacgggaccuggguggccaugcagacguccgacgagaccaaguggugcccgcccgaccagcuggucaaccugcacgaccuccgcagcgacgagaucgagcaccuggugguggaggagcuggucaagaagcgggaggagugccucgacgcccuggaguccaucaugaccaccaagagcguguccuuccgccggcugagccaccuccgcaagcuggugcccggcuucgggaaggcguacacgaucuucaacaagacccugauggaggccgacgcccacuacaaguccguccggaccuggaacgagaucauccccagcaagggcugccucaaggucgggggccgcugccacccgcacgugaacggcguguucuucaacggggugauccugggccccgacgggcacguccugauccccgagaugcaguccagccuccugcagcagcacauggagcugcucgaguccagcgugaucccccugaugcacccgcuggccgaccccuccaccguguucaaggacggcgacgaggccgaggacuucgucgaggugcaccuccccgacgugcacaagcaggucagcgggguggaccugggccugcccaacuggggcaaguacaucucccucagcgcgggggcccugaucgcccugaugcucaucauccugcugaugacgugcugccggaaggugaaccgcccggagcccacccagcggucccuggagggcaagaagcgcaaggucagcgugaccucccagagcgggaaggugaucagcuccugggagagcuacaaguccggcggggagacccggcucuga

SEQ ID NO: 94831 - RNA, 1575 nt, Artificial Sequence
  derived and/or modified CDS sequence (opt1) from glycoprotein__RABV__AF344307.1
auggugccccaggcccugcucgucgugccgcugcugggcuucagccucugcuucgggaaguuccccaucuacaccauccccgacaagcugggccccugguccccgaucgacauccaccaccugagcugccccaacaaccucguggucgaggacgaggggugcaccaaccuguccggcuucagcuacauggagcugaaggugggguacaucuccgccaucaaggugaacggcuucacgugcaccggcgucgugaccgaggcggagaccuacacgaacuucgugggguacgucaccaccaccuucaagcgcaagcacuuccggcccacgcccgacgagugccgcgccgccuacaacuggaagauggccggcgacccgcgguacgaggagagccuccacaaccccuaccccgacuaccacuggcugcgcaccgugaagaccaccaaggagucccuggugaucaucagccccuccgucgccgaccucgacccguacgacaagagccugcacucccggguguuccccagcgggaagugcuccggcaucacggugagcuccaccuacugcagcaccaaccacgacuacaccaucuggaugcccgagaacccccgccuggggacguccugcgacaucuucaccaacagccggggcaagcgcgcguccaagggcagcaagaccugcggguucgucgacgagcggggccucuacaagagccugaagggggccugcaagcugaagcucugcggcgugcugggccugaagcucauggacgggaccuggguggccaugcagacguccgacgagaccaaguggugcccgcccgaccagcuggucaaccugcacgaccuccgcagcgacgagaucgagcaccuggugguggaggagcuggucaagaagcgggaggagugccucgacgcccuggaguccaucaugaccaccaagagcguguccuuccgccggcugagccaccuccgcaagcuggugcccggcuucgggaaggcguacacgaucuucaacaagacccugauggaggccgacgcccacuacaaguccguccggaccuggaacgagaucauccccagcaagggcugccucaagguggaggggcgcugccacccgcacgucaacggcguguucuucaacggcgugauccuggggcccgacggccacguccugauccccgagaugcaguccagccuccugcagcagcacauggagcugcucgaguccagcgugaucccccugaugcacccgcuggccgaccccuccaccguguucaaggacggggacgaggccgaggacuucgucgaggugcaccuccccgacgugcacaagcaggucagcggcguggaccuggggcugcccaacuggggcaaguacaucucccucagcgcgggcgcccugaucgcccugaugcucaucauccugcugaugacgugcugccggaaggugaaccgcccggagcccacccagcggucccuggaggggaagaagcgcaaggucagcgugaccucccagagcggcaaggugaucagcuccugggagagcuacaaguccgggggcgagacccggcucuga

SEQ ID NO: 94832 - RNA, 1575 nt, Artificial Sequence
  derived and/or modified CDS sequence (opt1) from glycoprotein__RABV__AF499686.2
auggugccccaggcccugcuguucgucccccugcugguguucccccucugcuucggcaaguuccccaucuacaccauccccgacaagcuggggccguggagccccaucgacauccaccaccuguccugccccaacaaccucguggucgaggacgaggagugcaccaaccugagcggcuucuccuacauggagcugaaggugggguacauccucgccaucaaggugaacggcuucacgugcaccggggucgugaccgaggcggagaccuacacgaacuucgugggcuacgucaccaccaccuucaagcgcaagcacuuccggcccacgccggacgccugccgcgccgccuacaacuggaagauggccggcgacccccgguacgaggagagccugcacaaccccuaccccgacuaccgcuggcugcggaccgugaagaccaccaaggagucccucgugaucaucagcccguccgucgcggaccuggaccccuacgaccgcagccugcacucccggguguuccccagcgggaagugcuccggcguggccgucagcuccacguacugcagcaccaaccacgacuacaccaucuggaugcccgagaacccgcgccucgggauguccugcgacaucuucaccaacagccggggcaagcgcgccuccaaggggagcgagacgugcggcuucguggacgagcggggccuguacaagucccugaagggggccugcaagcucaagcugugcggcgugcuggggcuccgccugauggacggcaccugggucagcaugcagaccagcaacgagaccaaguggugcccgcccgacaagcuggugaaccuccacgacuuccgguccgacgagaucgagcaccugguggucgaggagcuggugcgcaagcgggaggagugccucgacgcgcuggagagcaucauggccacgaaguccgugagcuuccgccggcugucccaccuccgcaagcugguccccggcuucgggaaggccuacaccaucuucaacaagacccugauggaggccgacgcccacuacaagagcguguccaccuggaacgagguccuccccagcaagggcugccugcgggucgggggccgcugccacccccacgugaacgggguguucuucaacggcaucauccugggccccgacgggaacgugcucauccccgagaugcaguccagccugcugcagcagcacauggagcuccuggaguccagcgugaucccgcugguccacccccucgcggaccccuccacgguguucaaggacggcgacgaggccgaggacuucguggagguccaccuccccgacgugcacaaccaggugagcggggucgaccugggccucccgaacugggggaaguacgugcugcuguccgccggcgcccucaccgcccugaugcugaucaucuuccugaugaccugcugccggcgcgugaaccgcagcgagcccacccagcacaaccuccggggcacggggcgcgaggucuccgugaccccgcagagcggcaagaucaucuccagcugggagagccacaaguccgggggcgagacccggcuguga

SEQ ID NO: 94833 - RNA, 1575 nt, Artificial Sequence
  derived and/or modified CDS sequence (opt1) from glycoprotein__RABV__AJ871962.1
auggugccccaggcccugcuguucgucccgcugcugggcuucagccucugcuucgggaaguuccccaucuacaccauccccgacgagcugggccccugguccccgaucgacauccaccaccugagcugccccaacaaccucgugguggaggacgaggggugcaccaaccuguccgaguucagcuacauggagcugaaggucggcuacaucuccgccaucaaggugaacggguucacgugcaccggcguggucaccgaggcggagaccuacacgaacuucgugggcuacgugaccaccaccuucaagcgcaagcacuuccggcccacgcccgacgccugccgcgccgccuacaacuggaagauggccggggacccgcgguacgaggagagccuccacaaccccuaccccgacuaccacuggcugcgcaccguccggaccaccaaggagucccugaucaucaucagccccuccgugacggaccucgacccguacgacaagagccugcacucccgcguguuccccggcgggaagugcagcggcaucaccgucuccagcaccuacugcuccaccaaccacgacuacacgaucuggaugcccgagaacccccggccgcgcacccccugcgacaucuucaccaacagccgggggaagcgcgcguccaagggcaacaagaccugcggcuucguggacgagcgggggcuguacaagagccucaagggcgccugccgccugaagcugugcggggugcucggccugcggcugauggacggcacgugggucgccaugcagaccuccgacgagaccaaguggugcccgcccgaccagcucgugaaccugcacgacuuccgcagcgacgagaucgagcaccugguggucgaggagcucgugaagaagcgggaggagugccuggacgcccuggagagcaucaugaccacgaaguccgugagcuuccgccggcucucccaccuccgcaagcugguccccggguucggcaaggcguacaccaucuucaacaagacccucauggaggccgacgcccacuacaagagcgugcggaccuggaacgagaucauccccuccaaggggugccugaaggugggcgggcgcugccacccccacgucaacggcguguucuucaacggcaucauccuggggcccgacggccacguccucaucccggagaugcagagcucccugcugcagcagcacauggagcuccucaagagcuccgugaucccccugaugcacccccuggccgaccccagcacgguguucaaggagggggacgaggccgaggacuucgucgaggugcaccucccggacguguacaagcagaucuccggcgucgaccuggggcugcccaacuggggcaaguacgugcugaugaccgcgggcgccaugaucgggcuggugcucaucuucagccugaugaccuggugccggcgcgccaaccgccccgaguccaagcagcggagcuucggcgggaccggccgcaacgucuccgugacgagccaguccgggaaggugaucccgagcugggaguccuacaagagcggcggccagacccggcuguga

SEQ ID NO: 94834 - RNA, 1575 nt, Artificial Sequence
  derived and/or modified CDS sequence (opt1) from glycoprotein__RABV__AY683208.1
auggugccccaggcccugcuguucgucccguuccugggcuucagccugugcuucgggaaguuccccaucuacaccauccccgacaagcucggccccugguccccgaucgacauccaccaccugagcugccccaacaaccuggugguggaggacgaggggugcaccaaccucuccggcuucagcuaccuggagcugaaggucgggcacaucuccgccaucaaggugaacggcuucacgugcaccggcguggucaccgaggcggagaccuacacgaacuucgugggguacgugaccaccaccuucaagcgcaagcacuuccggcccacgcccgacgccugccgcgccgccuacaacuggaagaccgccggcgacccgcgguacgaggagagccuccagaaccccuaccccgacuaccaguggcugcgcaccguccggaccacgaaggagucccuggugaucaucagccccuccgcggccgaccucgacccguacgacaagagccugcacucccgcguguuccccagcgggaagugcuccggcaucaccgucagcuccguguacugcagcaccaaccacgacuacaccaucuggaugcccgagaacccccggcaggggauguccugcgacaucuucacgaacagccgcggcaagcgggccuccaaggagcgcaagaccugcggcuucguggacgagcgggggcuguacaagagccuccgcggcagcugcaagcugaagcugugcgggguccucggccugcggcugauggacggcaccuggguggccaugcagaccuccaacgagacgaaguggugcagcccggaccagcucgugaaccugcacgacuuccacuccgacgagaucgagcaccuggucguggaggagcucgugaagaagcgcgaggagugccuggacgcgcuggagagcaucaugaccaccaaguccgucagcuuccggcgccucucccaccuccggaagcuggugcccggguucggcaaggccuacaccaucaucaacaagacgcucauggaggccgaggcccacuacaagagcgugcgcaccuggaacgagaucguccccuccaaggggugccugcggguggagggccgcugccacccccacgucaacgggguguucuucaacggcaucauccugggcccggacgggcacgugcucauccccgagaugcagagcucccugcugcagcagcacauggagcuccuggagagcuccgucaucccccugaugcacccccucgccgacccgagcaccguguucaaggagggcgacgaggcggaggacuucguggagguccacuuccccgacgugcacaagaagguguccgaggucgaccuggggcugcccaacuggggcgaguacgugcuccugagcgccgggacccugaucgcccucaugcugaucaucuuccugaugaucugccggcgccgcgugaaccggcccgaguccacgcagcgcagccuccggggcaccgagaugaaggucuccgugaccccgcagagcggcaaguucaagagcuccugggagagcuacaaguccggggacgaggcccgccuguga

SEQ ID NO: 94835 - RNA, 1575 nt, Artificial Sequence
  derived and/or modified CDS sequence (opt1) from glycoprotein__RABV__AY705373.1
augaucccccaggcccuccuguucgugccgcugcugauccccagccucugccugggcaaguuccccaucuacaccauccccgacaagcuggggccguggucccccaucgacauccaccaccucagcugccccaacaaccuggucguggaggacgagggcugcaccucccugagcggguucuccuacauggagcucaaggugggcuacaucagcgccaugaaggucaacggguucacgugcaccggcguggugaccgaggcggagaccuacacgaacuucgucggcuacgugaccaccaccuucaagcgcaagcacuuccggcccaugccggacgccugccgcgccgcccacgacuggaagaucgccggggacccccgguacgaggacucccugcagaaccccuaccccgacuaccacuggcugcgcacggugaagaccaccaaggagagccucgucaucaucuccccgagcguggcggaccuggaccccuacgacaagucccugcacagccggguguuccccuccggcaagugccucgggaucaccgucagcuccacguacugccccaccaaccacgacuacaccaucuggaugccgguggaggcccgccugggcaccagcugcgacaucuucacgaacucccgggggaagaaggccagcaagggcggccggaccugcggguucguggacgagcgcggccuguacaagucccucaagggggccugcaagcugaagcugugcggcguccccggccuccgccugaugaacgggaccugggugagcauccagaccagcgacgacaucaaguggugcccgcccgaccagcuggugaaccuccacgacuuccacuccgacgagaucgagcaccuggucguggaggagcugaucaagaagcgggagggcugccucgacgcgcuggagagcaucaugacgaccaaguccgugagcuuccgccggcugucccaccuccgcaagcugguccccggguucggcaaggccuacaccaucuucaacaacacccugauggaggccgacgcccacuacaagagcgugcggacguggaacgaggugauccccuccaaggggugccucaaggucggcggccgcugccacccgcccgugaacggggucuucuucaacggcaucauccuggggcccgacggcaacgugcugauccccgagaugcagagcucccuccugcagcagcacauggagcugcucgagagcuccgugaucccccugaugcacccccuggccgacccgagcaccgucuucaaggacggggacgaggcggaggacuucguggaggugcaccuccccgacguccacaagcaggucuccgacguggaccugggccugcccagcuggggcaaguaccuccugauguccgccggggcccuggccacccucauccuggccaucuuccugaucacgugcugccggcgcgcgaaccggaccaagagcacccagcgcggccaccgggaguccgggggcaaggugagcguggccccgcagaacgggaagaucaucuccagcugggagcuguacaagagcgaguccgagaccggcauguga

SEQ ID NO: 94836 - RNA, 1575 nt, Artificial Sequence
  derived and/or modified CDS sequence (opt1) from glycoprotein__RABV__AY956319.1
auggugccgcaggcccugcuguucgucccgcugcugguggugagcaugugcuucggcaaguuccccaucuacaccguccccgacaagcucgggcccugguccccgaucgacauccaccaccugagcugccccaacaaccuggugguggaggacgagggcugcaccaaccucuccggguucagcuacauggagcugaaggucggcuacaucuccgccaucaaggugaacggguucacgugcaccggcguggucaccgaggcggagaccuacacgaacuucgugggcuacgugaccaccaccuucaagcgcaagcacuuccggcccacgcccgacgccugccgcgccgccuacaacuggaagauggccggggacccgcgguacgaggagagccugcacaaccccuaccccgacuaccacuggcuccgcaccgucaagaccaccaaggagucccuggugaucaucagccccuccguggcggaccuggacccguacgacaagagccuccacucccgggucuuccccagcggcaagugcuccgggaucacgaucagcuccaccuacugcagcaccaaccacgacuacaccaucuggaugcccgagaacccccgccugggcacguccugcgacaucuucaccaacagccgggggaagcgcgccuccaagggcggcaagaccugcggguucguggacgagcggggccuguacaagagccucaagggggccugcaagcugaagcugugcggcgugcucggccugcgccugauggacgggaccugggucgccaugcagacgagcgacgagaccaaguggugcccgcccgaccagcucgugaaccugcacgacuuccgguccgacgagaucgagcaccugguggucgaggagcucgugaagaagcgcgaggagugccuggacgcgcuggagagcaucaugaccaccaaguccgugagcuuccggcgccucucccaccuccggaagcugguccccggcuucgggaaggccuacacgaucuucaacaagacccucauggaggccgacgcccacuacaagagcgugcgcaccuggaacgagaucauccccuccaagggcugccugcgggucgggggccgcugccacccgcacgugaacggcguguucuucaacgggaucauccugggccccgacgggcacguccucauccccgagaugcagagcucccugcugcagcagcacauggagcuccuggagagcuccgugaucccccugaugcacccgcucgccgaccccagcaccguguucaaggacggcgacgaggcggaggacuucgucgaggugcaccuccccgacgugcacaagcaggucuccgggguggaccugggccugcccagcuggggcaaguacgugcuggucuccgccggggugcuggugguccucaugcugacgaucuucaucaugaccugcugccggcgcgugcaccggcccaagagcacccagcacggccucgggggcaccgggcgcaagguguccgucacgagccaguccggcaaggugaucagcagcugggaguccuacaagagcggcggggagacccgccuguga

SEQ ID NO: 94837 - RNA, 1575 nt, Artificial Sequence
  derived and/or modified CDS sequence (opt1) from glycoprotein__RABV__DQ074978.1
auggugccccaggcccugcuguucgucccccugcugguguucccccucugcuucggcaaguuccccaucuacaccauccccgacaagcuggggccguggagccccaucgacauccaccaccuguccugccccaacaaccucguggucgaggacgagggcugcaccaaccugagcggguucuccuacauggagcugaaggugggcuacaucagcgccaucaagaugaacggguucacgugcaccggcguggucaccgaggcggagaccuacacgaacuucgugggcuacgugaccaccaccuucaagcgcaagcacuuccggcccacgccggacgccugccgcgccgccuacaacuggaagauggccggggacccccgguacgaggagucccuccacaaccccuaccccgacuaccacuggcugcgcaccgucaagaccaccaaggagagccuggugaucaucuccccgagcguggcggaccucgaccccuacgacaucucccugcacagccgggucuuccccggcgggaacugcuccggcguggccgugagcuccacguacugcagcaccaaccacgacuacaccaucuggaugcccgagaacccgcgccuggggauguccugcgacaucuucaccaacagccggggcaagcgcgaguccaagggcagcgagacgugcggguucgucgacgagcggggccucuacaagucccugaagggggccugcaagcugaagcucugcggcgugcugggccugcgccucauggacgggaccuggguggccaugcagaccagcaacgagaccaaguggugcccgcccggccagcuggucaaccugcacgacuuccggagcgacgagaucgagcaccucgugguggaggagcugguccgcaagcgggaggagugccuggacgcgcucgaguccaucaugacgaccaagagcguguccuuccgccggcugagccaccuccgcaagcucgugcccggguucggcaaggccuacaccaucuucaacaagacccugauggaggccgacgcccacuacaaguccguccggacguggaacgagaucauccccagcaaggggugccugcgcgugggcggccggugccacccccacgucaacgggguguucuucaacggcaucauccucgggcccgacggcaacgugcugauccccgagaugcaguccagccugcuccagcagcacauggagcugcuggucuccagcgugaucccgcucaugcacccccuggccgaccccuccaccguguucaagaacggggacgaggcggaggacuucgucgaggugcaccuccccgacgugcacgagcgcaucagcggcgucgaccugggccugccgaacugggggaaguacgugcugcucuccgccggcgcccugaccgcccugaugcucaucaucuuccugaugaccugcuggcggcgcgugaaccgcagcgagcccacgcagcacaaccugcgggggaccggccgcgaggucuccgugaccccgcagagcgggaagaucaucuccagcugggagucccacaagagcggcggcgagacccggcuguga

SEQ ID NO: 94838 - RNA, 1575 nt, Artificial Sequence
  derived and/or modified CDS sequence (opt1) from glycoprotein__RABV__DQ076093.1
auggugccccaggcccugcuguucgucccccugcugguguucagcaugugcuucggcaaguuccccaucuacaccauccccgacaagcucgggcccugguccccgaucgacauccaccaccugagcugccccaacaaccugguggucgaggacgagggcugcaccaaccucuccggguucagcuacauggagcugaaggugggcuacaucuccgccaucaaggugaacggguucacgugcaccggcgucgugaccgaggcggagaccuacacgaacuucgugggcuacgucaccaccaccuucaagcgcaagcacuuccggcccacgcccgacgccugccgcgccgccuacaacuggaagauggccggggacccgcgguacgaggagagccugcacaaccccuaccccgacuaccacuggcuccgcaccgugaagaccaccaaggagucccuggugaucaucagccccuccgucgcggaccuggacccguacgacaagagccuccacucccggguguuccccaacggcaagugcagcgggaucacgaucuccagcaccuacugccccaccaaccacgacuacaccaucuggcugcccgagaacccgcgccugggcacguccugcgacaucuucaccaacagccgggggaagcgcgccuccaagggcagcaagaccugcggcuucguggacgagcgggggcucuacaagucccugaagggcgccugcaagcugaagcucugcgggguccugggccugcgccucauggacggcaccuggguggccaugcaggcgagcgacgagacgaaguggugcccgcccgaccagcuggugaaccugcacgacuuccggagcgacgagaucgagcaccucgucguggaggagcuggugaagaagcgcgaggagugccuggacgcccucgaguccaucaugaccaccaagagcgucuccuuccggcgccugagccaccuccggaagcucgugcccggguucggcaaggccuacaccaucuucaacaagacgcugauggaggccgacgcccacuacaaguccgugcgcaccuggaacgagaucauccccagcaaggggugccugcgggucggcgggcgcugccacccccacgugaacggcgucuucuucaacggcaucauccucgggcccgacggccacgugcugauccccgagaugcaguccagccugcuccagcagcacauggagcugcuggaguccagcgugaucccgcucaugcacccccuggcggaccccuccaccgucuucaaggacggggacgaggccgagaacuucguggaggugcaccuccccgacguccacaagcagaucagcggcguggaccuggggcugccgaacuggggcaaguacgugcuggucuccgccggcgugcucaucgcccugaugcugaucaucuuccucaugaccugcugcgggcgggugaaccgccccaagagcacgcagcacaaccugggcgggaccggccggaaggucuccgugaccccgcagagcgggaaggugaucuccagcugggaguccuacaagagcggcggcgggacccgccuguga

SEQ ID NO: 94839 - RNA, 1575 nt, Artificial Sequence
  derived and/or modified CDS sequence (opt1) from glycoprotein__RABV__DQ076096.1
auggugccccaggcccugcuguucgucccgcugcugguguucagcaugugcuucggcaaguuccccaucuacaccauccccgacaagcucgggcccugguccccgaucgacauccaccaccugagcugccccaacaaccugguggucgaggacgagggcugcaccaaccucuccggguucagcuacauggagcugaaggugggcuacaucuccgccaucaaggugaacggguucacgugcaccggcgucgugaccgaggcggagaccuacacgaacuucgugggcuacgucaccaccaccuucaagcgcaagcacuuccggcccacgcccgacgccugccgcgccgccuacaacuggaagauggccggggacccgcgguacgaggagagccugcacaaccccuaccccgacuaccacuggcuccgcaccgugaagaccaccaaggagucccuggugaucaucagccccuccgucgcggaccuggacccguacgacaagagccuccacucccggguguuccccaacggcaagugcagcgggaucacgaucuccagcaccuacugccccaccaaccacgacuacaccaucuggcugcccgagaacccgcgccugggcacguccugcgacaucuucaccaacagccgggggaagcgcgccuccaagggcagcaagaccugcggcuucguggacgagcgggggcucuacaagucccugaagggcgccugcaagcugaagcucugcgggguccugggccugcgccucauggacggcaccuggguggccaugcaggcgagcgacgagacgaaguggugcccgcccgaccagcuggugaaccugcacgacuuccggagcgacgagaucgagcaccucgucguggaggagcuggugaagaagcgcgaggagugccuggacgcccucgaguccaucaugaccaccaagagcgucuccuuccggcgccugagccaccuccggaagcucgugcccggguucggcaaggccuacaccaucuucaacaagacgcugauggaggccgacgcccacuacaaguccgugcgcaccuggaacgagaucauccccagcaaggggugccugcgggucggcgggcgcugccacccccacgugaacggcgucuucuucaacggcaucauccucgggcccgacggccacgugcugauccccgagaugcaguccagccugcuccagcagcacauggagcugcuggaguccagcgugaucccgcucaugcacccccuggcggaccccuccaccgucuucaaggacggggacgaggccgagaacuucguggaggugcaccuccccgacguccacaagcagaucagcggcguggaccuggggcugccgaacuggggcaaguacgugcuggucuccgccggcgugcucaucgcccugaugcugaccaucuuccucaugacgugcugcgggcgggugaaccgccccaagagcacccagcacaaccugggcgggaccggccggaaggucuccgugacgccccagagcgggaaggugaucuccagcugggaguccuacaagagcggcggcgggacccgccuguga

SEQ ID NO: 94840 - RNA, 1575 nt, Artificial Sequence
  derived and/or modified CDS sequence (opt1) from glycoprotein__RABV__DQ076097.1
auggugccccaggcccugcuguucgucccgcugcugguguucagcaugugcuucggcaaguuccccaucuacaccauccccgacaagcucgggcccugguccccgaucgacauccaccaccugagcugccccaacaaccugguggucgaggacgacggcugcaccaaccucuccggguucagcuacauggagcugaaggugggcuacaucuccgccaucaaggugaacggguucacgugcaccggcgucgugaccgaggcggagaccuacacgaacuucgugggcuacgucaccaccaccuucaagcgcaagcacuuccggcccacgcccgacgccugccgcgccgccuacaacuggaagauggccggggacccgcgguacgaggagagccugcacacccccuaccccgacuaccacuggcuccgcaccgugaagaccacgaaggagucccuggugaucaucagccccuccgucgcggaccuggacccguacgacaagagccuccacucccggguguuccccaacggcaagugcagcgggaucaccaucuccagcaccuacugccccaccaaccacgacuacacgaucuggcugcccgagaacccgcgccugggcaccuccugcgacaucuucaccaacagccgggggaagcgcgccuccaagggcagcaagaccugcggcuucguggacgagcgggggcucuacaagucccugaagggcgccugcaagcugaagcucugcgggguccugggccugcgccucauggacggcacguggguggccaugcaggcgagcgacgagaccaaguggugcccgcccgaccagcuggugaaccugcacgacuuccggagcgacgagaucgagcaccucgucguggaggagcuggugaagaagcgcgaggagugccuggacgcccucgaguccaucaugaccaccaagagcgucuccuuccggcgccugagccaccuccggaagcucgugcccggguucggcaaggccuacacgaucuucaacaagacccugauggaggccgacgcccacuacaaguccgugcgcaccuggaacgagaucauccccagcaaggggugccugcgggucggcgggcgcugccacccccacgugaacggcgucuucuucaacggcaucauccucgggcccgacggccacgugcugauccccgagaugcaguccagccugcuccagcagcacauggagcugcuggaguccagcgugaucccgcucaugcacccccuggcggaccccuccaccgucuucaaggacggggacgaggccgagaacuucguggaggugcaccuccccgacguccacaagcagaucagcggcguggaccuggggcugccgaacuggggcaaguacgugcuggucuccgccggcgugcucaucgcccugaugcugaucaucuuccucaugacgugcugcgggcgggugaaccgccccaagagcacccagcacaaccugggcgggaccggccggaaggucuccgugacgccccagagcgggaaggugaucuccagcugggaguccuacaagagcggcggcgggacccgccuguga

SEQ ID NO: 94841 - RNA, 1575 nt, Artificial Sequence; identical to SEQ ID NO: 94838
  derived and/or modified CDS sequence (opt1) from glycoprotein__RABV__DQ076098.1

SEQ ID NO: 94842 - RNA, 1575 nt, Artificial Sequence
  derived and/or modified CDS sequence (opt1) from glycoprotein__RABV__DQ076099.1
auggugccccaggcccugcuguucaucccgcugcuggucuuccccaugugcuucggcaaguuccccaucuacaccauccccgacaagcucgggccguggagccccaucgacauccaccaccuguccugccccaacaaccuggugguggaggacgaggagugcaccaaccucagcggcuucuccuacauggagcugaaggucggguacaucagcgccaucaaggugaacggcuucacgugcaccgggguggucaccgaggcggagaccuacacgaacuucgugggcuacgugaccaccaccuucaagcgcaagcacuuccggcccacgccggacgccugccgcgccgccuacaacuggaagauggccggcgacccccgguacgaggagucccugcacaaccccuaccccgacuaccacuggcuccgcaccgucaagaccaccaaggagagccuggugaucaucuccccgagcguggcggaccuggaccccuacgacaagucccuccacagccgggucuuccccaacgggaagugcuccggcaucacgaucagcuccaccuacugccccaccaaccacgacuacaccaucuggcugccggagaacccccgccuggggacgagcugcgacaucuucgccaacucccggggcaagcgcgccagcaagggguccaagaccugcggcuucguggacgagcggggccucuacaagagccugaagggggccugcaagcugaagcucugcggcgugcuggggcugcgccucauggacggcaccugggucgcgaugcagaccuccgacgagacgaaguggugcccgcccgaccagcuggugaaccugcacgacuuccggagcgacgagaucgagcaccucguggucgaggagcuggugaagaagcgcgaggagugccuggacgcccucgagagcaucaugaccaccaaguccgugagcuuccggcgccugucccaccuccggaagcucguccccggcuucgggaaggccuacaccaucuucaacaagacgcugauggaggccgacgcccacuacaagagcgugcgcaccuggaacgagaucauccccuccaagggcugccugcgggucgggggccgcugccacccccacgugaacgggguguucuucaacggcaucauccucggccacgacgggcacguccugauccccgagaugcagagcucccugcuccagcagcacauggagcugcuggagagcuccgugaucccgcucaugcacccccuggcggaccccagcaccguguucaaggacggcgacgaggccgaggacuucgucgaggugcaccuccccgacgugcacaagcagaucuccggggucgaccugggccugccgaacugggggaaguacgugcuggugagcgccggcguccucaucgcccugaugcugaucaucuuccucaugaccugcugcggccgggugaaccgccccaaguccacgcagcacaaccugggggagaccggccggaaggugagcgucaccucccagagcgggaaggugaucuccagcugggaguccuacaagagcggcgggggcacccgccuguga

SEQ ID NO: 94843 - RNA, 1575 nt, Artificial Sequence
  derived and/or modified CDS sequence (opt1) from glycoprotein__RABV__DQ076100.1
auggugccccaggcccugcuguucgucccgcugcugguguucagcaugugcuucggcaaguuccccaucuacaccauccccgacaagcucgggcccugguccccgaucgacauccaccaccugagcugccccaacaaccugguggucgaggacgagggcugcaccaaccucuccggguucagcuacauggagcugaaggugggcuacaucuccgccaucaaggugaacggguucacgugcaccggcgucgugaccgaggcggagaccuacacgaacuucgugggcuacgucaccaccaccuucaagcgcaagcacuuccggcccacgcccgacgccugccgcgccgccuacaacuggaagauggccggggacccgcgguacgaggagagccugcacaaccccuaccccgacuaccacuggcuccgcaccgugaagaccaccaaggagucccuggugaucaucagccccuccgucgcggaccuggacccguacgacaagagccuccacucccggguguuccccaacggcaagugcagcgggaucacgaucuccagcaccuacugccccaccaaccacgacuacaccaucuggcugcccgagaacccgcgccugggcacguccugcgacaucuucaccaacagccgggggaagcgcgccuccaagggcagcaagaccugcggcuucguggacgagcgggggcucuacaagucccugaagggcgccugcaagcugaagcucugcgggguccugggccugcgccucauggacggcaccuggguggccaugcagacgagcgacgagaccaaguggugcccgcccgaccagcuggugaaccugcacgacuuccggagcgacgagaucgagcaccucgucguggaggagcuggugaagaagcgcgaggagugccuggacgcgcucgaguccaucaugaccaccaagagcgucuccuuccggcgccugagccaccuccggaagcucgugcccggguucggcaaggccuacacgaucuucaacaagacccugauggaggccgacgcccacuacaaguccgugcgcaccuggaacgagaucauccccagcaaggggugccugcgggucggcgggcgcugccacccccacgugaacggcgucuucuucaacggcaucauccucgggcccgacggccacgugcugauccccgagaugcaguccagccugcuccagcagcacauggagcugcuggaguccagcgugaucccgcucaugcacccccuggccgaccccuccaccgucuucaaggacggggacgaggcggaggacuucguggaggugcaccuccccgacguccacaagcagaucagcggcguggaccuggggcugccgaacuggggcaaguacgugcuggucuccgccggcgugcucaucgcccugaugcugaucaucuuccucaugacgugcugcgggcgggugaaccgccccaagagcacccagcacaaccugggcgggaccggccggaaggucuccgugaccagccaguccgggaaggugaucagcuccugggagagcuacaagagcggcggcgagacgcgccuguga

SEQ ID NO: 94844 - RNA, 1575 nt, Artificial Sequence
  derived and/or modified CDS sequence (opt1) from glycoprotein__RABV__DQ076102.1
auggugccccaggcccugcuguucgucccgcugcugguguucagcaugugcuucggcaaguuccccaucuacaccauccccgacaagcuggggcccugguccccgaucggcauccaccaccugagcugcuccaacaaccugguggucgaggacgaggggugcaccaaccucagcggcuucuccuacauggagcugaaggugggguacaucagcgccaucaaggugaacggcuucacgugcaccggcgucgugaccgaggcggagaccuacacgaacuucgugggguacgucaccaccaccuucaagcgcaagcacuuccggcccacgcccgacgccugccgcgccgccuacaacuggaagauggccggcgacccccgguacgaggagucccugcacaacccguaccccgacuaccacuggcuccgcaccgugaagaccaccaaggagagccuggugaucaucucccccagcgucgcggaccuggaccccuacgacaagucccuccacagccggguguucccgaacgggaagugcuccggcaucacgaucagcuccaccuacugccccaccaaccacgacuacaccaucuggcugcccgagaacccccgccuggggacgagcugcgacaucuucaccaacucccggggcaagcgcgccagcaagggcuccaagaccugcggguucguggacgagcggggccucuacaagagccugaagggggccugcaagcugaagcucugcggcguccugggccugcgccucauggacgggaccuggguggccaugcagacgagcgacgagaccaaguggugcccgcccgaccagcuggugaaccugcacgacuuccgguccgacgagaucgagcaccucgucguggaggagcuggugaagaagcgcgaggagugccuggacgcgcucgagagcaucaugaccaccaaguccgucagcuuccggcgccugucccaccuccggaagcucgugcccggcuucgggaaggccuacacgaucuucaacaagacccugauggaggccgacgcccacuacaagagcgugcgcaccuggaacgagaucauccccuccaagggcugccugcgggucgggggccgcugccacccgcacgugaacggcgucuucuucaacgggaucauccucggccccgacgggcacgugcugauccccgagaugcagagcucccugcuccagcagcacauggagcugcuggagagcuccgugaucccccucaugcacccgcuggccgaccccagcaccgucuucaaggacggcgacgaggcggaggacuucguggaggugcaccuccccgacguccacaagcagaucuccgggguggaccugggccugcccaacuggggcaaguacgugcuggucagcgccggggugcucaucgcccugaugcugaucaucuuccucaugacgugcugcggccgggugaaccgcccgaaguccacccagcacaaccucgggggcaccgggcggaaggucagcgugaccucccagagcggcaaggugaucuccagcugggagagcuacaaguccggcggggagacgcgccuguga

SEQ ID NO: 94845 - RNA, 1575 nt, Artificial Sequence
  derived and/or modified CDS sequence (opt1) from glycoprotein__RABV__DQ076103.1
auggugccccaggcccugcuguucgucccgcugcugguguucagcaugugcuucggcaaguuccccaucuacaccauccccgacaagcucgggcccugguccccgaucgacauccaccaccugagcugccccaacaaccugguggucgaggacgagggcugcaccaaccucuccggguucagcuacauggagcugaaggugggcuacaucuccgccaucaaggugaacggguucacgugcaccggcgucgugaccgaggcggagaccuacacgaacagcgugggcuacgucaccaccaccuucaagcgcaagcacuuccggcccacgcccgacgccugccgcgccgccuacaacuggaagauggccggggacccgcgguacgaggagucccugcacaaccccuaccccgacuaccacuggcuccgcaccgugaagaccaccaaggagagccuggugaucaucucccccagcgucgcggaccuggacccguacgacaagucccuccacagccggguguuccccaacggcaagugcuccgggaucacgaucagcuccaccuacugccccaccaaccacgacuacaccaucuggcugcccgagaacccgcgccugggcacgagcugcgacaucuucaccaacucccgggggaagcgcgccagcaagggcuccaagaccugcggcuucguggacgagcgggggcucuacaagagccugaagggcgccugcaagcugaagcucugcgggguccugggccugcgccucauggacggcaccuggguggccaugcagacgagcgacgagaccaaguggugcccgcccgaccagcuggugaaccugcacgacuuccgguccgacgagaucgagcaccucgucguggaggagcuggugaagaagcgcgaggagugccuggacgcgcucgagagcaucaugaccaccaaguccgucagcuuccggcgccugucccaccuccggaagcucgugcccggguucggcaaggccuacacgaucuucaacaagacccugauggaggccgacgcccacuacaagagcgugcgcaccuggaacgagaucauccccuccaaggggugccugcgggucggcgggcgcugccacccccacgugaacggcgucuucuucaacggcaucauccucgggcccgacggccacgugcugauccccgagaugcagagcucccugcuccagcagcacauggagcugcuggagagcuccgugaucccgcucaugcacccccuggccgaccccagcaccgucuucaaggacggggacgaggcggaggacuucguggaggugcaccuccccgacguccacaagcagaucuccggcguggaccuggggcugccgaacuggggcaaguacgugcuggucagcgccggcgugcucaucgcccugaugcugaucaucuuccucaugacgugcugcgggcgggugaaccgccccaaguccacccagcacaaccugggcgggaccggccggaaggucagcgugaccucccagagcgggaaggugaucuccagcugggagagcuacaaguccggcggcgagacgcgccuguga

SEQ ID NO: 94846 - RNA, 1575 nt, Artificial Sequence
  derived and/or modified CDS sequence (opt1) from glycoprotein__RABV__DQ076104.1
auggugccccaggcccugcuguucgucccgcugcugguguucagcaugugcuucggcaaguuccccaucuacaccauccccgacaagcucgggcccugguccccgaucgacauccaccaccugagcugccccaacaaccugguggucgaggacgagggcugcaccaaccucuccggguucagcuacauggagcugaaggugggcuacaucuccgccaucaaggugaacggguucacgugcaccggcgucgugaccgaggcggagaccuacacgaacuucgugggcuacgucaccaccaccuucaagcgcaagcacuuccggcccacgcccgacgccugccgcaccgccuacaacuggaagauggccggggacccgcgguacgaggagagccugcacaaccccuaccccgacuaccacuggcuccgcaccgugaagaccacgaaggagucccuggugaucaucagccccuccgucgccgaccuggacccguacgacaagagccuccacucccggguguuccccaacggcaagugcagcgggaucaccaucuccagcaccuacugccccaccaaccacgacuacacgaucuggcugcccgagaacccgcgccugggcaccuccugcgacaucuucaccaacagccgggggaagcgcgcguccaagggcagcaagaccugcggcuucguggacgagcgggggcucuacaagucccugaagggcgccugcaagcugaagcucugcgggguccugggccugcgccucauggacggcacguggguggccaugcagaccagcgacgagaccaaguggugcccgcccgaccagcuggugaaccugcacgacuuccggagcgacgagaucgagcaccucgucguggaggagcuggugaagaagcgcgaggagugccuggacgcccucgaguccaucaugaccaccaagagcgucuccuuccggcgccugagccaccuccggaagcucgugcccggguucggcaaggcguacacgaucuucaacaagacccugauggaggccgacgcccacuacaaguccgugcgcaccuggaacgagaucauccccagcaaggggugccugcgggucggcgggcgcugccacccccacgugaacggcgucuucuucaacggcaucauccucgggcccgacggccacgugcugauccccgagaugcaguccagccugcuccagcagcacauggagcugcuggaguccagcgugaucccgcucaugcacccccuggccgaccccuccacggucuucaaggacggggacgaggccgaggacuucguggaggugcaccuccccgacguccacaagcagaucagcggcguggaccuggggcugccgaacuggggcaaguacgugcuggucuccgcgggcgugcucaucgcccugaugcugaucaucuuccucaugaccugcugcgggcgggugaaccgccccaagagcacccagcacaaccugggcgggaccggccggaaggucuccgugacgagccaguccgggaaggugaucagcuccugggagagcuacaagagcggcggcgagacccgccuguga

SEQ ID NO: 94847 - RNA, 1575 nt, Artificial Sequence
  derived and/or modified CDS sequence (opt1) from glycoprotein__RABV__DQ076105.1
auggugccccaggcccugcuguucgucccgcugcugguguucagcaugugcuucggccgcuuccccaucuacaccauccccgacaagcucgggcccugguccccgaucgacauccaccaccugagcugccccaacaaccugguggucgaggacgagggcugcaccaaccucuccggguucagcuacauggagcugaaggugggcuacaucuccgccaucaaggugaacggguucacgugcaccggcgucgugaccgaggcggagaccuacacgaacuucgugggcuacgucaccaccaccuucaagcggaagcacuuccgccccacgcccgacgccugccgggccgccuacaacuggaagauggccggggacccgcgcuacgaggagagccugcacaaccccuaccccgacuaccacuggcuccggaccgugaagaccaccaaggagucccuggugaucaucagccccuccgucgcggaccuggacccguacgacaagagccuccacucccgcguguuccccaacggcaagugcagcgggaucacgaucuccagcaccuacugccccaccaaccacgacuacaccaucuggcugcccgagaacccgcggcugggcacguccugcgacaucuucaccaacagccgcgggaagcgggccuccaagggcagcaagaccugcggcuucguggacgagcgcgggcucuacaagucccugaagggcgccugcaagcugaagcucugcgggguccugggccugcggcucauggacggcaccuggguggccaugcagacgagcgacgagaccaaguggugcccgcccgaccagcuggugaaccugcacgacuuccgcagcgacgagaucgagcaccucgucguggaggagcuggugaagaagcgggaggagugccuggacgcgcucgaguccaucaugaccaccaagagcgucuccuuccgccggcugagccaccuccgcaagcucgugcccggguucggcaaggccuacacgaucuucaacaagacccugauggaggccgacgcccacuacaaguccgugcggaccuggaacgagaucauccccagcaaggggugccugcgcgucggcgggcggugccacccccacgugaacggcgucuucuucaacggcaucauccucgggcccgacggccacgugcugauccccgagaugcaguccagccugcuccagcagcacauggagcugcuggaguccagcgugaucccgcucaugcacccccuggccgaccccuccaccgucuucaaggacggggacgaggcggaggacuucguggaggugcaccuccccgacguccacaagcagaucagcggcguggaccuggggcugccgaacuggggcaaguacgugcuggucuccgccggcgugcucaucgcccugaugcugaugaucuuccucaugacgugcugcgggcgcgugaaccggcccaagagcacccagcacaaccugggcgggaccggccgcaaggucuccgugaccagccaguccgggaaggugaucagcuccugggagagcuacaagagcggcggcgagacgcgccuguga

SEQ ID NO: 94848 - RNA, 1575 nt, Artificial Sequence
  derived and/or modified CDS sequence (opt1) from glycoprotein__RABV__DQ849044.1
augaucccccaggugcuccuguucgucccgcugcugguguucagcuccugcuucggcaaguuccccaucuacaccauccccgacaagcucgggcccuggagcccgaucgacauccaccaccuguccugccccaacaaccugguggucgaggacgagggcugcaccaaccucagcggguucuccuacauggagcugaaggugggcuacaucagcgccaucaaggugaacggguucacgugcaccggcgucgugaccgaggccgagaccuacacgaacuucgugggcuacgucaccaccaccuucaagcgcaagcacuuccggcccacgcccgacgcgugccgcgccgccuacaacuggaagauggccggggacccgcgguacgaggagucccugcacaaccccuaccccgacuaccacuggcuccgcaccgugaagaccagcaaggagucccuggugaucaucagccccuccgucgccgaccuggacccguacgacaagagccuccacucccggguguuccccggcgggaagugcagcggcaucaccguguccagcacgugcugcuccaccaaccacgacuacaccaucuggaugcccgagaacccccgccuggggaccagcugcgacaucuucacgaacucccggggcaagcgcgcgagcaagggcgggaagaccugcggcuucgucgacgagcgggggcuguacaagagcaucaagggcgccugcaagcucaagcugugcggcgugcuggggcuccgccugauggacggcaccuggguggccauccagaccuccgacgagaucaaguggugcagcccggaccagcuggucaaccuccacgacuuccacuccgacgagaucgagcaccuggugguggaggagcuggucaagaagcgggaggagugccucgacgcccuggagacgaucaugaccaccaagagcguguccuuccgccggcugagccaccuccgcaagcuggugcccggguucggcaaggcguacaccaucuucaacaagacgcugauggaggccgacgcccacuacaaguccauccggaccuggaacgagaucauccccagcaaggggugccuccgcgucggcggccggugccacccccacgugaacggggucuucuucaacggcaucauccuggggccggacggccacgugcugauccccgagaugcaguccagccuccugcaccagcacauggagcugcucgaguccagcgugaucccccugaugcacccccuggccgacccguccaccgucuucaaggacggggacgaggccgaggacuucguggaggugcaccuccccgacguccacaagcagaucagcggcguggaccugggccugcccaacugggggaaguacgugcucgucuccgcgggcgcccugaccgcccugaugcucaugaucuuccugaugacgugcugccgcaagaccaaccgggccgagagcauccagcacucccccggggagaccggccgcaaggugagcgugaccucccacaacgggcgggucaucagcagcugggaguccuacaagagcggcggcgagacgaagcuguga

SEQ ID NO: 94849 - RNA, 1575 nt, Artificial Sequence
  derived and/or modified CDS sequence (opt1) from glycoprotein__RABV__DQ849045.1
augaucccccaggugcugcuguucgucccgcugcugguguucagcuccugcuucggcaaguuccccaucuacaccauccccgacaagcucgggcccuggagcccgaucgacauccaccaccuguccugccccaacaaccugguggucgaggacgagggcugcaccaaccucagcggguucuccuacauggagcugaaggugggcuacaucagcgccaucaaggugaacggguucacgugcaccggcgucgugaccgaggccgagaccuacacgaacuucgugggcuacgucaccaccaccuucaagcgcaagcacuuccggcccacgcccgacgcgugccgcgccgccuacaacuggaagauggccggggacccgcgguacgaggagucccugcacaaccccuaccccgacuaccacuggcuccgcaccgugaagaccagcaaggagucccuggugaucaucagccccuccgucgccgaccuggacccguacgacaagagccuccacucccggguguuccccggcgggaagugcagcggcaucaccguguccagcacgugcugcuucaccaaccacgacuacaccaucuggaugcccgagaacccccgccuggggaccuccugcgacaucuucacgaacagccggggcaagcgcgcguccaagggcgggaagaccugcggcuucgucgacgagcgggggcuguacaagagccucaagggcgccugcaagcugaagcugugcggcgugcucgggcugcgccugauggacggcaccuggguggccauccagaccagcgacgagaucaaguggugcuccccggaccagcucgucaaccugcacgacuuccacagcgacgagaucgagcaccuggugguggaggagcucgucaagaagcgggaggagugccuggacgcccuggagacgaucaugaccaccaaguccgugagcuuccgccggcucucccaccuccgcaagcuggugcccggguucggcaaggcguacaccaucuucaacaagacgcucauggaggccgacgcccacuacaagagcauccggaccuggaacgagaucauccccuccaaggggugccugcgcgucggcggccggugccacccccacgugaacggggucuucuucaacggcaucauccuggggccggacggccacgugcucauccccgagaugcagagcucccugcugcaccagcacauggagcuccuggagagcuccgugaucccccugaugcacccccucgccgacccgagcaccgucuucaaggacggggacgaggccgaggacuucguggaggugcaccuccccgacguccacaagcagaucuccggcguggaccugggccugcccaacugggggaaguacgugcuggucagcgcgggcgcccugaccgcccucaugcugaugaucuuccugaugacgugcugccgcaagaccaaccgggccgaguccauccagcacagccccggggagaccggccgcaagguguccgugaccagccacaacgggcgggucaucuccagcugggagagcuacaaguccggcggcgagacgaagcucuga

SEQ ID NO: 94850 - RNA, 1575 nt, Artificial Sequence
  derived and/or modified CDS sequence (opt1) from glycoprotein__RABV__DQ849046.1
augaucccccaggugcugcuguucgucccgcugcugguguucagcuccugcuucggcaaguuccccaucuacaccauccccgacaagcucgggcccuggagcccgaucgacauccaccaccuguccugccccaacaaccugguggucgaggacgagggcugcaccaaccucagcggguucuccuacauggagcugaaggugggcuacaucagcgccaucaaggugaacggguucacgugcaccggcgucgugaccgaggccgagaccuacacgaacuucgugggcuacgucaccaccaccuucaagcgcaagcacuuccggcccacgcccgacgcgugccgcgccgccuacaacuggaagauggccggggacccgcgguacgaggagucccugcacaaccccuaccccgacuaccacuggcuccgcaccgugaagaccagcaaggagucccuggugaucaucagccccuccgucgccgaccuggacccguacgacaagagccuccacucccggguguuccccggcgggaagugcagcggcaucaccguguccagcacgugcugcuucaccaaccacgaguacaccaucuggaugcccgagaacccccgccuggggaccuccugcgacaucuucacgaacagccggggcaagcgcgcguccaagggcgggaagaccugcggcuucgucgacgagcgggggcuguacaagagccucaagggcgccugcaagcugaagcugugcggcgugcucgggcugcgccugauggacggcaccuggguggccauccagaccagcgacgagaucaaguggugcuccccggaccagcucgucaaccugcacgacuuccacagcgacgagaucgagcaccuggugguggaggagcucgucaagaagcgggaggagugccuggacgcccuggagacgaucaugaccaccaaguccgugagcuuccgccggcucucccaccuccgcaagcuggugcccggguucggcaaggcguacaccaucuucaacaagacgcucauggaggccgacgcccacuacaagagcauccggaccuggaacgagaucauccccuccaaggggugccugcgcgucggcggccggugccacccccacgugaacggggucuucuucaacggcaucauccuggggccggacggccacgugcucauccccgagaugcagagcucccugcugcaccagcacauggagcuccuggagagcuccgugaucccccugaugcacccccucgccgacccgagcaccgucuucaaggacggggacgaggccgaggacuucguggaggugcaccuccccgacguccacaagcagaucuccggcguggaccugggccugcccaacugggggaaguacgugcuggucagcgcgggcgcccugaccgcccucaugcugaugaucuuccugaugacgugcugccgcaagaccaaccgggccgaguccauccagcacagccccggggagaccggccgcaagguguccgugaccagccacaacgggcgggucaucuccagcugggagagcuacaaguccggcggcgagacgaagcucuga

SEQ ID NO: 94851 - RNA, 1575 nt, Artificial Sequence
  derived and/or modified CDS sequence (opt1) from glycoprotein__RABV__DQ849047.1
augaucccccaggugcugcuguucgucccgcugcugguguucagcuccugcuucggcaaguuccccaucuacaccauccccgacaagcucgggcccuggagcccgaucgacauccaccaccuguccugccccaacaaccugguggucgaggacgagggcugcaccaaccucagcggguucuccuacauggagcugaaggugggcuacaucagcgccaucaaggugaacggguucacgugcaccggcgucgugaccgaggccgagaccuacacgaacuucgugggcuacgucaccaccaccuucaagcgcaagcacuuccggcccacgcccgacgcgugccgcgccgccuacaacuggaagauggccggggacccgcgguacgaggagucccugcacaaccccuaccccgacuaccacuggcuccgcaccgugaagaccagcaaggagucccuggugaucaucagccccuccgucgccgaccuggacccguacgacaagagccuccacucccggguguuccccggcgggaagugcagcggcaucaccguguccagcacgugcugcuccaccaaccacgacuacaccaucuggaugcccgagaacccccgccuggggaccagcugcgacaucuucacgaacucccggggcaagcgcgcgagcaagggcgggaagaccugcggcuucgucgacgagcgggggcuguacaagagccucaagggcgccugcaagcugaagcugugcggcgugcucgggcugcgccugauggacggcaccuggguggccauccagaccuccgacgagaucaaguggugcagcccggaccagcucgucaaccugcacgacuuccacuccgacgagaucgagcaccuggugguggaggagcucgucaagaagcgggaggagugccuggacgcccuggagacgaucaugaccaccaagagcguguccuuccgccggcucagccaccuccgcaagcuggugcccggguucggcaaggcguacaccaucuucaacaagacgcucauggaggccgacgcccacuacaaguccauccggaccuggaacgagaucauccccagcaaggggugccugcgcgucggcggccggugccacccccacgugaacggggucuucuucaacggcaucauccuggggccggacggccacgugcucauccccgagaugcaguccagccugcugcaccagcacauggagcuccuggaguccagcgugaucccccugaugcacccccucgccgacccguccaccgucuucaaggacggggacgaggccgaggacuucguggaggugcaccuccccgacguccacaagcagaucagcggcguggaccugggccugcccaacugggggaaguacgugcuggucuccgcgggcgcccugaccgcccucaugcugaugaucuuccugaugacgugcugccgcaagaccaaccgggccgagagcauccagcacucccccggggagaccggccgcaaggugagcgugaccucccacaacgggcgggucaucagcagcugggaguccuacaagagcggcggcgagacgaagcucuga

SEQ ID NO: 94852 - RNA, 1575 nt, Artificial Sequence; identical to SEQ ID NO: 94851
  derived and/or modified CDS sequence (opt1) from glycoprotein__RABV__DQ849048.1

SEQ ID NO: 94853 - RNA, 1575 nt, Artificial Sequence
  derived and/or modified CDS sequence (opt1) from glycoprotein__RABV__DQ849049.1
augaucccccaggugcugcuguucgucccgcugcugguguuccucagcugcuucggcaaguuccccaucuacaccauccccgacaagcuggggcccugguccccgaucgacauccaccaccugagcugccccaacaaccucguggucgaggacgagggcugcaccaaccuguccggguucagcuacauggagcugaaggugggcuacaucuccgccaucaaggugaacggguucacgugcaccggcgucgugaccgaggccgagaccuacacgaacuucgugggcuacgucaccaccaccuucaagcgcaagcacuuccggcccacgcccgacgcgugccgcgccgccuacaacuggaagauggccggggacccgcgguacgaggagagccuccacaaccccuaccccgacuaccacuggcugcgcaccgugaagaccuccaaggagagccuggugaucaucucccccagcgucgccgaccucgacccguacgacaagucccugcacagccggguguuccccggcgggaagugcuccggcaucaccgugagcuccacgugcugcagcaccaaccacgacuacaccaucuggaugcccgagaacccccgccuggggaccuccugcgacaucuucacgaacagccggggcaagcgcgcguccaagggcgggaagaccugcggcuucgucgacgagcgggggcucuacaagagccugaagggcgccugcaagcugaagcucugcggcgugcuggggcugcgccucauggacggcaccuggguggccauccagaccagcgacgagaucaaguggugcuccccggaccagcuggucaaccugcacgacuuccacagcgacgagaucgagcaccucgugguggaggagcuggucaagaagcgggaggagugccuggacgcccucgagacgaucaugaccaccaaguccgugagcuuccgccggcugucccaccuccgcaagcucgugcccggguucggcaaggcguacaccaucuucaacaagacgcugauggaggccgacgcccacuacaagagcauccggaccuggaacgagaucauccccuccaaggggugccugcgcgucggcggccggugccacccccacgugaacggggucuucuucaacggcaucauccucgggccggacggccacgugcugauccccgagaugcagagcucccugcuccaccagcacauggagcugcuggagagcuccgugaucccccucaugcacccccuggccgacccgagcaccgucuucaaggacggggacgaggccgaggacuucguggaggugcaccuccccgacguccacaagcagaucuccggcguggaccugggccugcccaacugggggaaguacgugcuggucagcgcgggcgcccucaccgcccugaugcugaugaucuuccucaugacgugcugccgcaagaccaaccgggccgaguccauccagcacagccccggggagaucggccgcaagguguccgugaccagccacaacgggcgggucaucuccagcugggagagcuacaaguccggcggcgagaccaagcuguga

SEQ ID NO: 94854 - RNA, 1575 nt, Artificial Sequence; identical to SEQ ID NO: 94851
  derived and/or modified CDS sequence (opt1) from glycoprotein__RABV__DQ849050.1

SEQ ID NO: 94855 - RNA, 1575 nt, Artificial Sequence; identical to SEQ ID NO: 94851
  derived and/or modified CDS sequence (opt1) from glycoprotein__RABV__DQ849051.1

SEQ ID NO: 94856 - RNA, 1575 nt, Artificial Sequence
  derived and/or modified CDS sequence (opt1) from glycoprotein__RABV__DQ849052.1
augaucccccaggugcugcuguucgucccgcugcugguguucagcuccugcuucggcaaguuccccaucuacaccauccccgacaagcucgggcccuggagcccgaucgacauccaccaccuguccugccccaacaaccugguggucgaggacgagggcugcaccaaccucagcggguucuccuacauggagcugaaggugggcuacaucagcgccaucaaggugaacggguucacgugcaccggcgucgugaccgaggccgagaccuaccccaacuucgugggcuacgucacgaccaccuucaagcgcaagcacuuccggcccaccccggacgcgugccgcgccgccuacaacuggaagauggccggggacccccgguacgaggagucccugcacaaccccuaccccgacuaccacuggcuccgcacggugaagaccagcaaggagucccuggugaucaucagcccguccgucgccgaccuggaccccuacgacaagagccuccacucccggguguuccccggcgggaagugcagcggcaucaccguguccagcacgugcugcuucaccaaccacgacuacaccaucuggaugcccgagaacccgcgccuggggaccuccugcgacaucuucaccaacagccggggcaagcgcgcguccaagggcgggaagacgugcggcuucgucgacgagcgggggcuguacaagagccucaagggcgccugcaagcugaagcugugcggcgugcucgggcugcgccugauggacggcaccuggguggccauccagaccagcgacgagaucaaguggugcucccccgaccagcucgucaaccugcacgacuuccacagcgacgagaucgagcaccuggugguggaggagcucgucaagaagcgggaggagugccuggacgcccuggagaccaucaugacgaccaaguccgugagcuuccgccggcucucccaccuccgcaagcuggugcccggguucggcaaggcguacaccaucuucaacaagacccucauggaggccgacgcccacuacaagagcauccggacguggaacgagaucauccccuccaaggggugccugcgcgucggcggccggugccacccgcacgugaacggggucuucuucaacggcaucauccuggggcccgacggccacgugcucauccccgagaugcagagcucccugcugcaccagcacauggagcuccuggagagcuccgugaucccccugaugcacccgcucgccgaccccagcaccgucuucaaggacggggacgaggccgaggacuucguggaggugcaccuccccgacguccacaagcagaucuccggcguggaccugggccugcccaacugggggaaguacgugcuggucagcgcgggcgcccugaccgcccucaugcugaugaucuuccugaugaccugcugccgcaagacgaaccgggccgaguccauccagcacagcccgggggagaccggccgcaagguguccgugaccagccacaacgggcgggucaucuccagcugggagagcuacaaguccggcggcgagaccaagcucuga

SEQ ID NO: 94857 - RNA, 1575 nt, Artificial Sequence
  derived and/or modified CDS sequence (opt1) from glycoprotein__RABV__DQ849053.1
augaucccccaggugcugcuguucgucccgcugcugguguucagcuccugcuucggcaaguuccccaucuacaccauccccgacaagcucgggcccuggagcccgaucgacauccaccaccuguccugccccaacaaccugguggucgaggacgagggcugcaccaaccucagcggguucuccuacauggagcugaaggugggcuacaucagcgccaucaaggugaacggguucacgugcaccggcgucgugaccgaggccgagaccuacacgaacuucgugggcuacgucaccaccaccuucaagcgcaagcacuuccggcccacgcccgacgcgugccgcgccgccuacaacuggaagauggccggggacccgcgguacgaggagucccugcacaaccccuaccccgacuaccacuggcuccgcaccgugaagaccagcaaggagucccuggugaucaucagccccuccgucgccgaccuggacccguacgacaagagccuccacucccggguguuccccggcgggaagugcagcggcaucaccguguccagcacgugcugcuccaccaaccacgacuacaccaucuggaugcccgagaacccccgccuggggaccagcugcgacaucuucacgaacucccggggcaagcgcgcgagcaagggcgggaagaccugcggcuucgucgacgagcgggggcuguacaagagccucaagggcgccugcaagcugaagcugugcggcgugcucgggcugcgccugauggacggcaccuggguggccauccagaccuccgacgagauccgguggugcagcccggaccagcucgucaaccugcacgacuuccacuccgacgagaucgagcaccuggugguggaggagcucgucaagaagcgcgaggagugccuggacgcccuggagacgaucaugaccaccaagagcguguccuuccggcgccucagccaccuccggaagcuggugcccggguucggcaaggcguacaccaucuucaacaagacgcucauggaggccgacgcccacuacaaguccauccgcaccuggaacgagaucauccccagcaaggggugccugcgggucggcggccgcugccacccccacgugaacggggucuucuucaacggcaucauccuggggccggacggccacgugcucauccccgagaugcaguccagccugcugcaccagcacauggagcuccuggaguccagcgugaucccccugaugcacccccucgccgacccguccaccgucuucaaggacggggacgaggccgaggacuucguggaggugcaccuccccgacguccacaagcagaucagcggcguggaccugggccugcccaacugggggaaguacgugcuggucuccgcgggcgcccugaccgcccucaugcugaugaucuuccugaugacgugcugccggaagaccaaccgcgccgagagcauccagcacucccccggggagaccggccggaaggugagcgugaccucccacaacgggcgcgucaucagcagcugggaguccuacaagagcggcggcgagacgaagcucuga

SEQ ID NO: 94858 - RNA, 1575 nt, Artificial Sequence
  derived and/or modified CDS sequence (opt1) from glycoprotein__RABV__DQ849054.1
augaucccccaggugcugcuguucgucccgcugcugguguucagcuccugcuucggcaaguuccccaucuaccccauccccgacaagcucgggccguggagccccaucgacauccaccaccuguccugccccaacaaccugguggucgaggacgagggcugcaccaaccucagcggguucuccuacauggagcugaaggugggcuacaucagcgccaucaaggugaacggguucacgugcaccggcgucgugaccgaggccgagaccuaccccaacuucgugggcuacgucaccacgaccuucaagcgcaagcacuuccggccgacccccgacgcgugccgcgccgccuacaacuggaagauggccggggacccccgguacgaggagucccugcacaaccccuacccggacuaccacuggcuccgcaccgugaagacgagcaaggagucccuggugaucaucagccccuccgucgccgaccuggaccccuacgacaagagccuccacucccggguguuccccggcgggaagugcagcggcaucaccguguccagcacgugcugcuucaccaaccacgacuacaccaucuggaugccggagaacccccgccuggggaccuccugcgacaucuucaccaacagccggggcaagcgcgcguccaagggcgggaagaccugcggcuucgucgacgagcgggggcuguacaagagccucaagggcgccugcaagcugaagcugugcggcgugcucgggcugcgccugauggacggcacguggguggccauccagaccagcgacgagaucaaguggugcucccccgaccagcucgucaaccugcacgacuuccacagcgacgagaucgagcaccuggugguggaggagcucgucaagaagcgggaggagugccuggacgcccuggagaccaucaugaccacgaaguccgugagcuuccgccggcucucccaccuccgcaagcuggugcccggguucggcaaggcguacaccaucuucaacaagacccucauggaggccgacgcccacuacaagagcauccggaccuggaacgagaucaucccguccaaggggugccugcgcgucggcggccggugccacccccacgugaacggggucuucuucaacggcaucauccuggggcccgacggccacgugcucauccccgagaugcagagcucccugcugcaccagcacauggagcuccuggagagcuccgugaucccgcugaugcacccccucgccgaccccagcacggucuucaaggacggggacgaggccgaggacuucguggaggugcaccuccccgacguccacaagcagaucuccggcguggaccugggccugccgaacugggggaaguacgugcuggucagcgcgggcgcccugaccgcccucaugcugaugaucuuccugaugaccugcugccgcaagaccaaccgggccgaguccauccagcacagccccggggagacgggccgcaagguguccgugaccagccacaacgggcgggucaucuccagcugggagagcuacaaguccggcggcgagaccaagcucuga

SEQ ID NO: 94859 - RNA, 1575 nt, Artificial Sequence
  derived and/or modified CDS sequence (opt1) from glycoprotein__RABV__DQ849055.1
augaucccccaggugcugcuguucgucccgcugcugguguucagcuccugcuucggcaaguuccccaucuacaccauccccgacaagcucgggcccuggagcccgaucgacauccaccaccuguccugccccaacaaccugguggucgaggacgagggcugcaccaaccucagcggguucuccuacauggagcugaaggugggcuacaucagcgccaucaaggugaacggguucacgugcaccggcgucgugaccgaggccgagaccuacacgaacuucgugggcuacgucaccaccaccuucaagcgcaagcacuuccggcccacgcccgacgcgugccgcgccgccuacaacuggaagauggccggggacccgcgguacgaggagucccugcacaaccccuaccccgacuaccacuggcuccgcaccgugaagaccagcaaggagucccuggugaucaucagccccuccgucgccgaccuggacccguacgacaagagccuccacucccggguguuccccggcgggaagugcagcggcaucaccguguccagcacgugcugcuucaccaaccacgacuacaccaucuggaugcccgagaacccccgccuggggaccuccugcgacaucuucacgaacagccggggcaagcgcgcguccaagggcgggaagaccugcggcuucgucgacgagcgggggcuguacaagagccucaagggcgccugcaagcugaagcugugcggcgugcucgggcugcgccugauggacggcaccuggguggccauccagaccagcgacgagaucaaguggugcuccccggaccagcucgucaaccugcacgacuuccacagcgacgagaucgagcaccuggugguggaggagcucgucaagaagcgggaggagugccuggacgcccuggagacgaucaugaccaccaaguccgugagcuuccgccggcucucccaccuccgcaagcuggugcccggguucggcaaggcguacaccaucuucaacaagacgcucauggaggccgacgcccacuacaagagcauccggaccuggaacgagaucauccccuccaaggggugccugcgcgucggcggccggugccacccccacgugaacggggucuucuucaacggcaucauccuggggccggacggccacgugcucauccccgagaugcagagcucccugcugcaccagcacauggagcuccuggagagcgccgugaucccccugaugcacccccucgccgacccguccaccgucuucaaggacggggacgaggcggaggacuucguggaggugcaccuccccgacguccacaagcagaucagcggcguggaccugggccugcccaacugggggaaguacgugcuggucuccgccggcgcccugaccgcccucaugcugaugaucuuccugaugacgugcugccgcaagaccaaccgggccgagagcauccagcacucccccggggagaccggccgcaaggugagcgugaccucccacaacgggcgggucaucagcuccugggagagcuacaagagcggcggcgagacgaagcucuga

SEQ ID NO: 94860 - RNA, 1575 nt, Artificial Sequence
  derived and/or modified CDS sequence (opt1) from glycoprotein__RABV__DQ849056.1
augaucccccaggugcugcuguucgucccgcugcugguguucagcuccugcuucggcaaguuccccaucuacaccauccccgacaagcucgggcccuggagcccgaucgacauccaccaccuguccugccccaacaaccugguggucgaggacgagggcugcaccaaccucagcggguucuccuacauggagcugaaggugggcuacaucagcgccaucaaggugaacggguucacgugcaccggcgucgugaccgaggccgagaccuacacgaacuucgugggcuacgucaccaccaccuucaagcgcaagcacuuccggcccacgcccgacgcgugccgcgccgccuacaacuggaagauggccggggacccgcgguacgaggagucccugcacaaccccuaccccgacuaccacuggcuccgcaccgugaagaccagcaaggagucccuggugaucaucagccccuccgucgccgaccuggacccguacgacaagagccuccacucccggguguuccccggcgggaagugcagcggcaucaccguguccagcacguggugcuccaccaaccacgacuacaccaucuggaugcccgagaacccccgccuggggaccagcugcgacaucuucacgaacucccggggcaagcgcgcgagcaagggcgggaagaccugcggcuucgucgacgagcgggggcuguacaagagccucaagggcgccugcaagcugaagcugugcggcgugcucgggcugcgccugauggacggcaccuggguggccauccagaccuccgacgagaucaaguggugcagcccggaccagcucgucaaccugcacgacuuccacuccgacgagaucgagcaccuggugguggaggagcucgucaagaagcgggaggagugccuggacgcccuggagacgaucaugaccaccaagagcguguccuuccgccggcucagccaccuccgcaagcuggugcccggguucggcaaggcguacaccaucuucaacaagacgcucauggaggccgacgcccacuacaaguccauccggaccuggaacgagaucauccccagcaaggggugccugcgcgucggcggccggugccacccccacgugaacggggucuucuucaacggcaucauccuggggccggacggccacgugcucauccccgagaugcaguccagccugcugcaccagcacauggagcuccuggaguccagcgugaucccccugaugcacccccucgccgacccguccaccgucuucaaggacggggacgaggccgaggacuucguggaggugcaccuccccgacguccacaagcagaucagcggcguggaccugggccugcccaacugggggaaguacgugcuggucuccgcgggcgcccugaccgcccucaugcugaugaucuuccugaugacgugcugccgcaagaccaaccgggccgagagcauccagcacucccccggggagaccggccgcaaggugagcgugaccucccacaacgggcgggucaucagcagcugggaguccuacaagagcggcggcgagacgaagcucuga

SEQ ID NO: 94861 - RNA, 1575 nt, Artificial Sequence
  derived and/or modified CDS sequence (opt1) from glycoprotein__RABV__DQ849057.1
augaucccccaggugcugcuguucgucccgcugcugguguucagcuccugcuucggcaaguuccccaucuacaccauccccgacaagcucgggcccuggagcccgaucgacauccaccaccuguccugccccaacaaccugguggucgaggacgagggcugcaccaaccucagcggguucuccuacauggagcugaaggugggcuacaucagcgccaucaaggugaacggguucacgugcaccggcgucgugaccgaggccgagaccuacacgaacuucgugggcuacgucaccaccaccuucaagcgcaagcacuuccggcccacgcccgacgcgugccgcgccgccuacaacuggaagauggccggggacccgcgguacgaggagucccugcacaaccccuaccccgacuaccacuggcuccgcaccgugaagaccagcaaggagucccuggugaucaucagccccuccgucgccgaccuggacccguacgacaagagccuccacucccggguguuccccggcgggaagugcagcggcaucaccguguccagcacgugcugcuccaccaaccacgacuacaccaucuggaugcccgagaacccccgccuggggaccagcugcgacaucuucacgaacucccggggcaagcgcgcgagcaagggcgggaagaccugcggcuucgucgacgagcgggggcuguacaagagccucaagggcgccugcaagcugaagcugugcggcgugcucgggcugcgccugauggacggcaccuggguggccauccagaccuccgacgagaucaaguggugcagcccggaccagcucgucaaccugcacgacuuccacuccgacgagaucgagcaccuggugguggaggagcucgucaagaagcgggaggagugccuggacgcccuggagacgaucaugaccaccaagagcguguccuuccgccggcucagccaccuccgcaagcuggugcccggguucggcaaggcguacaccaucuucaacaagacgcucauggaggccgacgcccacuacaaguccauccggaccuggaacgagaucauccccagcaaggggugccugcgcgucggcggccggugccacccccacgugaacggggucuucuucaacggcaucauccuggggccggacggccacgugcucauccccgagaugcaguccagccugcugcaccagcacauggagcuccuggaguccagcgugaucccccugaugcacccccucgccgacccguccaccaucuucaaggacggggacgaggccgaggacuucgucgaggugcaccuccccgacgugcacaagcagaucagcggcgucgaccugggccugcccaacugggggaaguacgugcugguguccgcgggcgcccugaccgcccucaugcugaugaucuuccugaugacgugcugccgcaagaccaaccgggccgagagcauccagcacucccccggggagaccggccgcaaggucagcgugaccucccacaacgggcgggugaucagcagcugggaguccuacaagagcggcggcgagacgaagcucuga

SEQ ID NO: 94862 - RNA, 1575 nt, Artificial Sequence
  derived and/or modified CDS sequence (opt1) from glycoprotein__RABV__DQ849058.1
augaucccccaggugcuccuguucgucccgcugcugguguucagcuccugcuucggcaaguuccccaucuacaccauccccgacaagcucgggcccuggagcccgaucgacauccaccaccuguccugccccaacaaccugguggucgaggacgagggcugcaccaaccucagcggguucuccuacauggagcugaaggugggcuacaucagcgccaucaaggugaacggguucacgugcaccggcgucgugaccgaggccgagaccuacacgaacuucgugggcuacgucaccaccaccuucaagcgcaagcacuuccggcccacgcccgacgcgugccgcgccgccuacaacuggaagauggccggggacccgcgguacgaggagucccugcacaaccccuaccccgacuaccacugggugcgcaccgugaagaccagcaaggagucccucgucaucaucagccccuccguggccgaccuggacccguacgacaagagccugcacucccggguguuccccggcgggaagugcagcggcaucaccgucuccagcacgugcugcuccaccaaccacgacuacaccaucuggaugcccgagaacccccgccucgggaccagcugcgacaucuucacgaacucccggggcaagcgcgcgagcaagggcgggaagaccugcggcuucguggacgagcgggggcuguacaagagccugaagggcgccugcaagcucaagcugugcggcgugcuggggcuccgccugauggacggcaccugggucgccauccagaccuccgacgagaucaaguggugcagcccggaccagcuggugaaccuccacgacuuccacuccgacgagaucgagcaccugguggucgaggagcuggugaagaagcgggaggagugccucgacgcccuggagacgaucaugaccaccaagagcguguccuuccgccggcugagccaccuccgcaagcugguccccggguucggcaaggcguacaccaucuucaacaagacgcugauggaggccgacgcccacuacaaguccauccggaccuggaacgagaucauccccagcaaggggugccuccgcgugggcggccggugccacccccacgucaacgggguguucuucaacggcaucauccuggggccggacggccacgugcugauccccgagaugcaguccagccuccugcaccagcacauggagcugcucgaguccagcgucaucccccugaugcacccccuggccgacccguccaccguguucaaggacggggacgaggccgaggacuucguggagguccaccuccccgacgugcacaagcagaucagcggcguggaccugggccugcccaacugggggaaguacguccucguguccgcgggcgcccugaccgcccugaugcucaugaucuuccugaugacgugcugccgcaagaccaaccgggccgagagcauccagcacucccccggggagaccggccgcaaggugagcgucaccucccacaacgggcgggugaucagcagcugggaguccuacaagagcggcggcgagacgaagcuguga

SEQ ID NO: 94863 - RNA, 1575 nt, Artificial Sequence
  derived and/or modified CDS sequence (opt1) from glycoprotein__RABV__DQ849059.1
augaucccccaggugcugcuguucgucccgcugcugguguucagcuccugcuucggcaaguuccccaucuacaccauccccgacaagcucgggcccuggagcccgaucgacauccaccaccuguccugccccaacaaccugguggucgaggacgagggcugcaccaaccucagcggguucuccuacauggagcugaaggugggcuacaucagcgccaucaaggugaacggguucacgugcaccggcgucgugaccgaggccgagaccuacacgaacuucgugggcuacgucaccaccaccuucaagcgcaagcacuuccggcccaugcccgacgcgugccgcgccgccuacaacuggaagauggccggggacccgcgguacgaggagucccugcacaaccccuaccccgacuaccacuggcuccgcacggugaagaccaccaaggagagccuggugaucaucucccccagcgucgccgaccuggacccguacgacaagucccuccacagccggguguuccccggcgggaagugcuccggcaucaccgugagcuccacgugcugcagcaccaaccacgacuacaccaucuggaugcccgagaacccccgccuggggaccuccugcgacaucuucacgaacagccggggcaagcgcgcguccaagggcgggaagaccugcggcuucgucgacgagcgggggcuguacaagagccucaagggcgccugcaagcugaagcugugcggcgugcucgggcugcgccugauggacggcaccuggguggccauccagaccagcgacgagaucaaguggugcuccccggaccagcucgucaaccugcacgacuuccacagcgacgagaucgagcaccuggugguggaggagcucgucaagaagcgggaggagugccuggacgcccuggagacgaucaugaccaccaaguccgugagcuuccgccggcucucccaccuccgcaagcuggugcccggguucggcaaggcguacaccaucuucaacaagacgcucauggaggccgacgcccacuacaagagcauccggaccuggaacgagaucauccccuccaaggggugccugcgcgucggcggccggugccacccccacgugaacggggucuucuucaacggcaucauccuggggccggacggccacgugcucauccccgagaugcagagcucccugcugcaccagcacauggagcuccuggagagcuccgugaucccccugaugcacccccucgccgacccgagcaccgucuucaaggacggggacgaggccgaggacuucguggaggugcaccuccccgacguccacaagcagaucuccggcguggaccugggccugcccaacugggggaaguacgugcugaucagcgcgggcgcccugaccgcccucauguccaugaucuuccugaugacgugcugccgcaagaccaaccgggccgagagcauccagcacucccccggggagaccggccgcaaggucagcgugaccucccacaacgggcgggugaucagcagcugggaguccuacaagagcggcggcgagacgaagcuguga

SEQ ID NO: 94864 - RNA, 1575 nt, Artificial Sequence; identical to SEQ ID NO: 94863
  derived and/or modified CDS sequence (opt1) from glycoprotein__RABV__DQ849060.1

SEQ ID NO: 94865 - RNA, 1575 nt, Artificial Sequence
  derived and/or modified CDS sequence (opt1) from glycoprotein__RABV__DQ849061.1
augaucccccaggugcugcuguucgucccgcugcugguguucagcuccugcuucggcaaguuccccaucuacaccauccccgacaagcucgggcccuggagcccgaucgacauccaccaccuguccugccccaacaaccugguggucgaggacgagggcugcaccaaccucagcggguucuccuacauggagcugaaggugggcuacaucagcgccaucaaggugaacggguucacgugcaccggcgucgugaccgaggccgagaccuacacgaacuucgugggcuacgucaccaccaccuucaagcgcaagcacuuccggcccaugcccgacgcgugccgcgccgccuacaacuggaagauggccggggacccgcgguacgaggagucccugcacaaccccuaccccgacuaccacuggcuccgcacggugaagaccaccaaggagagccuggugaucaucucccccagcgucgccgaccuggacccguacgacaagucccuccacagccggguguuccccggcgggaagugcuccggcaucaccgugagcuccacgugcugcagcaccaaccacgacuacaccaucuggaugcccgagaacccccgccuggggaccuccugcgacaucuucacgaacagccggggcaagcgcgcguccaagggcgggaagaccugcggcuucgucgacgagcgggggcuguacaagagccucaagggcgccugcaagcugaagcugugcggcgugcucgggcugcgccugauggacggcaccuggguggccauccagaccagcgacgagaucaaguggugcuccccggaccagcucgucaaccugcacgacuuccacagcgacgagaucgagcaccuggugguggaggagcucgucaagaagcgggaggagugccuggacgcccuggagacgaucaugaccaccaaguccgugagcuuccgccggcucucccaccuccgcaagcuggugcccggguucggcaaggcguacaccaucuucaacaagacgcucauggaggccgacgcccacuacaagagcauccggaccuggaacgagaucauccccuccaaggggugccugcgcgucggcggccggugccacccccacgugaacggggucuucuucaacggcaucauccuggggccggacggccacgugcucauccccgagaugcagagcucccugcugcaccagcacauggagcuccuggagagcuccgugaucccccugaugcacccccucgccgacccgagcaccgucuucaaggacggggacgaggccgaggacuucguggaggugcaccuccccgacguccacaagcagaucuccggcguggaccugggccugcccaacugggggaaguacgugcugaucagcgucggcgcgcugaccgcccucaugcugaugaucuuccugaugacgugcugccgcaagaccaaccgggccgaguccacccagcacagccccggggagaccggccgcaagguguccgugacgagccacaacgggcgggucaucuccagcugggagagcuacaaguccggcggcgagaccaagcucuga

SEQ ID NO: 94866 - RNA, 1575 nt, Artificial Sequence
  derived and/or modified CDS sequence (opt1) from glycoprotein__RABV__DQ849062.1
augaucccccaggugcugcuguucgucccgcugcugguguucagcuccugcuucggcaaguuccccaucuacaccauccccgacaagcucgggcccuggagcccgaucgacauccaccaccuguccugccccaacaaccugguggucgaggacgagggcugcaccaaccucagcggguucuccuacauggagcugaaggugggcuacaucagcgccaucaaggugaacggguucacgugcaccggcgucgugaccgaggccgagaccuacacgaacuucgugggcuacgucaccaccaccuucaagcgcaagcacuuccggcccaugcccgacgcgugccgcgccgccuacaacuggaagauggccggggacccgcgguacgaggagucccugcacaaccccuaccccggcuaccacuggcuccgcacggugaagaccaccaaggagagccuggugaucaucucccccagcgucgccgaccuggacccguacgacaagucccuccacagccggguguuccccgggggcaagugcuccgggaucaccgugagcuccacgugcugcagcaccaaccacgacuacaccaucuggaugcccgagaacccccgccugggcaccuccugcgacaucuucacgaacagccggggcaagcgcgcguccaagggcgggaagaccugcggguucgucgacgagcggggccuguacaagagccucaagggcgccugcaagcugaagcugugcggggugcucggccugcgccugauggacgggaccuggguggccauccagaccagcgacgagaucaaguggugcuccccggaccagcucgucaaccugcacgacuuccacagcgacgagaucgagcaccuggugguggaggagcucgucaagaagcgggaggagugccuggacgcccuggagacgaucaugaccaccaaguccgugagcuuccgccggcucucccaccuccgcaagcuggugcccggcuucgggaaggcguacaccaucuucaacaagacgcucauggaggccgacgcccacuacaagagcauccggaccuggaacgagaucauccccuccaagggcugccugcgcgucggcgggcggugccacccccacgugaacggcgucuucuucaacgggaucauccugggcccggacgggcacgugcucauccccgagaugcagagcucccugcugcaccagcacauggagcuccuggagagcuccgugaucccccugaugcacccccucgccgacccgagcaccgucuucaaggacggcgacgaggccgaggacuucguggaggugcaccuccccgacguccacaagcagaucuccggcguggaccuggggcugcccaacuggggcaaguacgugcugaucagcgcgggggcccugaccgcccucaugcugaugaucuuccugaugacgugcugccgcaagaccaaccgggccgaguccauccagcacagccccggcgagaccgggcgcaaggucuccgugaccagccacaacggccgggugaucuccagcugggagagcuacaaguccggcggggagacgaagcucuga

SEQ ID NO: 94867 - RNA, 1575 nt, Artificial Sequence
  derived and/or modified CDS sequence (opt1) from glycoprotein__RABV__DQ849063.1
augaucccccaggugcugcuguucgucccgcugcugguguucagcuccugcuucggcaaguuccccaucuacaccauccccgacaagcucgggcccuggagcccgaucgacauccaccaccuguccugccccaacaaccugguggucgaggacgagggcugcaccaaccucagcggguucuccuacauggagcugaaggugggcuacaucagcgccaucaaggugaacggguucacgugcaccggcgucgugaccgaggccgagaccuacacgaacuucgugggcuacgucaccaccaccuucaagcgcaagcacuuccggcccaugcccgacgcgugccgcgccgccuacaacuggaagauggccggggacccgcgguacgaggagucccugcacaaccccuaccccgacuaccacuggcuccgcacggugaagaccaccaaggagagccuggugaucaucucccccagcgucgccgaccuggacccguacgacaagucccuccacagccggguguuccccggcgggaagugcuccggcaucaccgugagcuccacgugcugcagcaccaaccacgacuacaccaucuggaugcccgagaacccccgccuggggaccuccugcgacaucuucacgaacagccggggcaagcgcgcguccaagggcgggaagaccugcggcuucgucgacgagcgggggcuguacaagagccucaagggcgccugcaagcugaagcugugcggcgugcucgggcugcgccugauggacggcaccuggguggccauccagaccagcgacgagaucaaguggugcuccccggaccagcucgucaaccugcacgacuuccacagcgacgagaucgagcaccuggugguggaggagcucgucaagaagcgggaggagugccuggacgcccuggagacgaucaugaccaccaaguccgugagcuuccgccggcucucccaccuccgcaagcuggugcccggguucggcaaggcguacaccaucuucaacaagacgcucauggaggccgacgcccacuacaagagcauccggaccuggaacgagaucauccccuccaaggggugccugcgcgucggcggccggugccacccccacgugaacggggucuucuucaacggcaucauccuggggccggacggccacgugcucauccccgagaugcagagcucccugcugcaccagcacauggagcuccuggagagcuccgugaucccccugaugcacccccucgccgacccgagcaccgucuucaaggacggggacgaggccgaggacuucguggaggugcaccuccccgacguccacaagcagaucuccggcguggaccugggccugcccaacugggggaaguacgugcugaucagcgcgggcgcccugaccgcccucaugcugaugaucuuccugaugacgugcugccgcaagaccaaccgggccgaguccauccagcacagccccggggagaccggccgcaaggucuccgugaccagccacaacgggcgggugaucuccagcugggagagcuacaaguccggcggcgagacgaagcucuga

SEQ ID NO: 94868 - RNA, 1575 nt, Artificial Sequence
  derived and/or modified CDS sequence (opt1) from glycoprotein__RABV__DQ849064.1
augauccuccaggugcugcuguucgcgccccugcucgucuucagcuccugcuucggcaaguucccgaucuacaccauccccgacaagcuggggcccuggagccccaucgacauccaccaccuguccugcccgaacaaccucgugguggaggacgagggcugcaccaaccugagcggguucuccuacauggagcugaaggucggcuacaucagcgccaucaaggugaacggguucacgugcaccggcguggucaccgaggccgagaccuacacgaacuucgugggcuacgugaccaccaccuucaagcgcaagcacuuccggcccaugcccgacgccugccgcgccgccuacaacuggaagauggccggggacccccgguacgaggagucccuccacaacccguaccccgacuaccacuggcugcgcacggucaagaccaccaaggagagccuggugaucaucucccccagcguggcggaccucgaccccuacgacaagucccugcacagccgggucuucccgggcgggaagugcuccggcaucaccgugagcuccacgugcugcagcaccaaccacgacuacaccaucuggaugcccgagaacccccgccuggggaccuccugcgacaucuucacgaacagccggggcaagcgcgccuccaagggcgggaagaccugcggcuucguggacgagcgggggcucuacaagagccugaagggcgccugcaagcugaagcucugcggcguccuggggcugcgccucauggacggcaccuggguggccauccagaccagcgacgagaucaaguggugcccgcccgaccagcuggugaaccugcacgacuuccacuccgacgagaucgagcaccucgucguggaggagcuggugaagaagcgggaggagugccuggacgcgcucgagacgaucaugaccaccaagagcgucuccuuccgccggcugagccaccuccgcaagcuggugcccggguucggcaaggccuacaccaucuucaacaagacgcugauggaggccgacgcccacuacaaguccauccggaccuggaacgagaucauccccagcaaggggugccugcgcgugggcggccggugccacccccacgucaacgggguguucuucaacggcaucauccucgggccggacggccacguccugauccccgagaugcaguccagccugcuccaccagcacauggagcugcuggaguccagcgugaucccccucaugcacccccuggccgacccguccaccguguucaaggacggggacgaggcggaggacuucgucgaggugcaccuccccgacgugcacaagcagaucagcggcgucgaccugggccugcccaacugggggaaguacgugcugaucuccgccggcgcccucaccgcccugaugcugaugaucuuccucaugacgugcugccgcaagaacaaccgggccgagagcauccagcacucccccggggagaccggccgcaaggugagcgucaccucccacaacgggcgggugaucagcuccugggagagcuacaagagcggcggcgagaccaagcuguga

SEQ ID NO: 94869 - RNA, 1575 nt, Artificial Sequence
  derived and/or modified CDS sequence (opt1) from glycoprotein__RABV__DQ849065.1
augaucccccaggugcugcuguucgucccgcugcugguguucagcuccugcuucggcaaguuccccaucuacaccauccccgacaagcucgggcccuggagcccgaucgacauccaccaccuguccugccccaacaaccugguggucgaggacgagggcugcaccaaccucagcggguucuccuacauggagcugaaggugggcuacaucagcgccaucaaggugaacggguucacgugcaccggcgucgugaccgaggccgagaccuacacgaacuucgugggcuacgucaccaccaccuucaagcgcaagcacuuccggcccaugcccgacgcgugccgcgccgccuacaacuggaagauggccggggacccgcgguacgaggagucccugcacaaccccuaccccgacuaccacuggcuccgcacggugaagaccaccaaggagagccuggugaucaucucccccagcgucgccgaccuggacccguacgacaagucccuccacagccggguguuccccggcgggaagugcuccggcaucaccgugagcuccacgugcugcagcaccaaccacgacuacaccaucuggaugcccgagaacccccgccuggggaccuccugcgacaucuucacgaacagccggggcaagcgcgcguccaagggcgggaagaccugcggcuucgucgacgagcgggggcuguacaagagccucaagggcgccugcaagcugaagcugugcggcgugcucgggcugcgccugauggacggcaccuggguggccauccagaccagcgacgagaucaaguggugcuccccggaccagcucgucaaccugcacgacuuccacagcgacgagaucgagcaccuggugguggaggagcucgucaagaagcgggaggagugccuggacgcccuggagacgaucaugaccaccaaguccgugagcuuccgccggcucucccaccuccgcaagcuggugcccggguucggcaaggcguacaccaucuucaacaagacgcucauggaggccgacgcccacuacaagagcauccggaccuggaacgagaucauccccuccaaggggugccugcgcgucggcggccggugccacccccacgugaacggggucuucuucaacggcaucauccuggggccggacggccacgugcucauccccgagaugcagagcucccugcugcaccagcacauggagcuccuggagagcuccgugaucccccugaugcacccccucgccgacccgagcaccgucuucaaggacggggacgaggccgaggacuucguggaggugcaccuccccgacguccacaagcagaucuccggcguggaccugggccugcccaacugggggaaguacgugcugaucagcgcgggcgcccugaccgcccucaugcugacgaucuuccugaugaccugcugccgcaagaccaaccgggccgaguccauccagcacagccccggggagaccggccgcaaggucuccgugacgagccacaacgggcgggugaucuccagcugggagagcuacaaguccggcagcgagaccaagcucuga

SEQ ID NO: 94870 - RNA, 1575 nt, Artificial Sequence
  derived and/or modified CDS sequence (opt1) from glycoprotein__RABV__DQ849066.1
augaucccccaggugcugcuguucgucccgcugcugguguucagcuccugcuucggcaaguuccccaucuacaccauccccgacaagcucgggcccuggagcccgaucgacauccaccaccuguccugccccaacaaccugguggucgaggacgagggcugcaccaaccucagcggguucuccuacauggagcugaaggugggcuacaucagcgccaucaaggugaacggguucacgugcaccggcgucgugaccgaggccgagaccuacacgaacuucgugggcuacgucaccaccaccuucaagcgcaagcacuuccggcccaugcccgacgcgugccgcgccgccuacaacuggaagauggccggggacccgcgguacgaggagucccugcacaaccccuaccccgacuaccacuggcuccgcacggugaagaccaccaaggagagccuggugaucaucucccccagcgucgccgaccuggacccguacgacaagucccuccacagccggguguuccccggcgggaagugcuccggcaucaccgugagcuccacgugcugcagcaccaaccacgacuacaccaucuggaugcccgagaacccccgccuggggaccuccugcgacaucuucacgaacagccggggcaagcgcgcguccaagggcgggaagaccugcggcuucgucgacgagcgggggcuguacaagagccucaagggcgccugcaagcugaagcugugcggcgugcucgggcugcgccugauggacggcaccuggguggccauccagaccagcgacgagaucaaguggugcuccccggaccagcucgucaaccugcacgacuuccacagcgacgagaucgagcaccuggugguggaggagcucgucaagaagcgggaggagugccuggacgcccuggagacgaucaugaccaccaaguccgugagcuuccgccggcucucccaccuccgcaagcuggugcccggguucggcaaggcguacaccaucuucaacaagacgcucauggaggccgacgcccacuacaagagcauccggaccuggaacgagaucauccccuccaaggggugccugcgcgucggcggccggugccacccccacgugaacggggucuucuucaacggcaucauccuggggccggacggccacgugcucauccccgagaugcagagcucccugcugcaccagcacauggagcuccuggagagcuccgugaucccccugaugcacccccucgccgacccgagcaccgucuucaaggacggggacgaggccgaggacuucguggaggugcaccuccccgacguccacaagcagaucuccggcguggaccugggccugcccaacugggggaaguacgugcugaucagcgcgggcgcccugaccgcccucaugcugacgaucuuccugaugaccugcugccgcaagaccaaccgggccggguccauccagcacagccccggcgagaccgggcgcaaggucuccgugacgagccacaacggccgggugaucuccagcugggagagcuacaaguccggcagcgagaccaagcucuga

SEQ ID NO: 94871 - RNA, 1575 nt, Artificial Sequence; identical to SEQ ID NO: 94870
  derived and/or modified CDS sequence (opt1) from glycoprotein__RABV__DQ849067.1

SEQ ID NO: 94872 - RNA, 1575 nt, Artificial Sequence; identical to SEQ ID NO: 94869
  derived and/or modified CDS sequence (opt1) from glycoprotein__RABV__DQ849068.1

SEQ ID NO: 94873 - RNA, 1575 nt, Artificial Sequence
  derived and/or modified CDS sequence (opt1) from glycoprotein__RABV__DQ849069.2
augaucccccaggcccuccuguucgugccgcugcuggucuucagcuucugcuucggcaaguuccccaucuacaccauccccgacaagcucgggcccugguccccgaucgacauccaccaccugagcugccccaacaaccuggugguggaggacgagggcugcaccaaccucuccggguucagcuacauggagcugaaggucggcuacaucuccgccaucaaggugaacggguucacgugcaccggcguggucaccgaggcggagaccuacacgaacuucgugggcuacgugaccaccaccuucaagcgcaagcacuuccggcccacgcccgacgccugccgcgccgccuacaacuggaagauggccggggacccgcgguacgaggagagccugcacaaccccuaccccgacuaccacuggcuccgcaccgucaagaccaccaaggagucccuggugaucaucagccccuccgugagcgaccuggacccguacgacaagucccuccacagccgggucuuccccuccggcaagugcagccgcaucacgguguccagcaccuacugccccaccaaccacgacuacaccaucuggaugcccgagaacccgcggcuggggacguccugcgacaucuucaccaacagccgcggcaagcgggcguccaaggggagcaagaccugcggcuucguggacgagcgcggccuguacaagagccucaagggggccugcaagcugaagcugugcggcguccucgggcugacccugauggacggcacguggguggccauccagaccuccgacgaggccaaguggugcccgcccgaccagcucgugaacauccacgacuuccggagcgacgagaucgagcaccuggucguggaggagcuggugaagaagcgcgaggagugccucgacgcgcuggaguccaucaugaccaccaagagcgucuccuuccggcgccugagccaccuccggaagcuggugcccggcuucgggaaggccuacacgaucuucaacaagacccugauggaggccgacgcccacuacaaguccgugcgcaccuggaacgagaucauccccagcaagggcugccuccgggucgggggccgcugccacccccacgugaacggggucuucuucaacggcaucauccugggccccgacgggcacgugcugauccccgagaugcaguccagccuccugcagcagcacauggagcugcucgaguccagcgugaucccgcugaugcacccccuggccgaccccuccaccgucuucaaggaggacgacgaggcggaggacuucguggaggugcaccuccccgacguccacaagcaggucagcggcguggaccuggggcugccguccuggggcaaguacgugcucaugagcgugggggccaugaucgcccugaugcugaugaucuuccucaugacgugcugccggcgcgccaacggcgccgaguccauccagcacagccugggcgagaccgggcggaagguguccgucaccagccagagcggccgcgugaucuccagcugggaguccuacaagagcgggggcgagaccaagcuguga

SEQ ID NO: 94874 - RNA, 1575 nt, Artificial Sequence
  derived and/or modified CDS sequence (opt1) from glycoprotein__RABV__DQ849070.1
augaucccccaggugcugcuguucgucccgcugcugguguucagcuccugcuucggcaaguuccccaucuacaccauccccgacaagcucgggcccuggagcccgaucgacauccaccaccuguccugccccaacaaccugguggucgaggacgagggcugcaccaaccucagcggguucuccuacauggagcugaaggugggcuacaucagcgccaucaaggugaacggguucacgugcaccggcgucgugaccgaggccgagaccuacacgaacuucgugggcuacgucaccaccaccuucaagcgcaagcacuuccggcccaugcccgacgcgugccgcgccgccuacaacuggaagauggccggggacccgcgguacgaggagucccugcacaaccccuaccccgacuaccacuggcuccgcacggugaagaccaccaaggagagccuggugaucaucucccccagcgucgccgaccuggacccguacgacaagucccuccacagccggguguuccccggcgggaagugcuccggcaucaccgugagcuccacgugcugcagcaccaaccacgacuacaccaucuggaugcccgagaacccccgccuggggaccuccugcgacaucuucacgaacagccggggcaagcgcgcguccaagggcgggaagaccugcggcuucgucgacgagcgggggcuguacaagagccucaagggcgccugcaagcugaagcugugcggcgugcucgggcugcgccugauggacggcaccuggguggccauccagaccagcgacgagaucaaguggugcuccccggaccagcucgucaaccugcacgacuuccacagcgacgagaucgagcaccuggugguggaggagcucgucaagaagcgggaggagugccuggacgcccuggagacgaucaugaccaccaaguccgugagcuuccgccggcucucccaccuccgcaagcuggugcccggguucggcaaggcguacaccaucuucaacaagacgcucauggaggccgacgcccacuacaagagcauccggaccuggaacgagaucauccccuccaaggggugccugcgcgucggcggccggugccacccccacgugaacggggucuucuucaacggcaucauccuggggccggacggccacgugcucauccccgagaugcagagcucccugcugcaccagcacauggagcuccuggagagcuccgugaucccccugaugcacccccucgccgacccgagcaccgucuucaaggacggggacgaggccgaggacuucguggacgugcaccuccccgacguccacaagcagaucuccggcguggaccugggccugcccaacugggggaaguacgugcugaucagcgcgggcgcccugaccgcccucaugcugaugaucuuccugaugacgugcugccgcaaggccaaccgggccgaguccauccagcacaaccccggggagaccggccgcaaggucagcgugaccucccacaacgggcgggugaucagcuccugggagagcuacaagagcggcggcgagaccaagcucuga

SEQ ID NO: 94875 - RNA, 1575 nt, Artificial Sequence; identical to SEQ ID NO: 94551
  derived and/or modified CDS sequence (opt1) from glycoprotein__RABV__DQ849071.1

SEQ ID NO: 94876 - RNA, 1575 nt, Artificial Sequence
  derived and/or modified CDS sequence (opt1) from glycoprotein__RABV__DQ849072.1
augaucccccaggcccugcuguucgugccgcugcuggucuucagccucugcuucggcaaguuccccaucuacaccauccccgacaagcuggggcccugguccccgaucgacauccaccaccugagcugccccaacaaccucgugguggaggacgagggcugcaccaaccuguccggguucagcuacauggagcugaaggucggcuacaucuccgccaucaaggugaacggguucacgugcaccggcguggucaccgaggcggagaccuacacgaacuucgugggcuacgugaccaccaccuucaagcgcaagcacuuccggcccacgcccgacgccugccgcgccgccuacaacuggaagauggccggggacccgcgguacgaggagagccuccacaaccccuaccccgacuaccacuggcugcgcaccgucaagaccaccaaggagucccuggugaucaucagccccuccguggcggaccucgacccguacgacaagagccugcacucccgggucuuccccagcggcaagugcuccgggaucacggugagcuccaccuacugcagcaccaaccacgacuacaccaucuggaugcccgagaacccccgccugggcacguccugcgacaucuucgugaacagccgggggaagcgcgccuccaagggcagcaagaccugcggcuucgucgacgagcgggggcucuacaagagccugaagggcgccugcaagcugaagcucugcggggugcugggccugcgccucauggacggcaccuggguggccauccagaccuccgacgagacgaaguggugcccgcccgaccagcuggucaaccugcacgacuuccggagcgacgagaucgagcaccucgugguggaggagcuggucaagaagcgcgaggagugccuggacgcgcucgaguccaucaugaccaccaagagcguguccuuccggcgccugagccaccuccggaagcucgugcccggguucggcaaggccuacaccaucuucaacaagacgcugauggaggccgacgcccacuacaaguccguccgcaccuggaacgagaucauccccagcaaggggugccugcgggugggcgggcgcugccacccgcacgucaacggcguguucuucaacggcaucauccucgggcccgacggccacgugcugauccccgagaugcaguccagccugcuccagcagcacauggagcugcuggaguccagcgucaucccccucaugcacccgcuggccgaccccuccaccaucuucaaggacggggacgaggcggaggacuucguggaggugcaccuccccgacguccacaagcaggucagcggcguggaccuggggcugcccaacuggggcaaguacgugcugauguccgccggcgcccucaccgcccugaugcugaugaucuuccucaugacgugcugccggaagaccgaccgcaccgggagcacccaccacuccccgggcgagacggggcggaaggugagcgugaccucccagaacggccgcgucaucgccagcugggagagcuacaaguccgggggcgagaccaagcuguga

SEQ ID NO: 94877 - RNA, 1575 nt, Artificial Sequence
  derived and/or modified CDS sequence (opt1) from glycoprotein__RABV__DQ849073.1
augaucccccaggugcugcuguucgucccgcugcugguguucagcuccugccucggcaaguuccccaucuacaccauccccgacaagcuggggcccuggagcccgaucgacauccaccaccuguccugccccaacaaccucguggucgaggacgagggcugcaccaaccugagcggguucuccuacauggagcugaaggugggcuacaucagcgccaucaaggugaacggguucacgugcaccggcgucgugaccgaggccgagaccuacacgaacuucgugggcuacgucaccaccaccuucaagcgcaagcacuuccggcccaugcccgacgcgugccgcgccgccuacaacuggaagauggccggggacccgcgguacgaggagucccuccacaaccccuaccccgacuaccacuggcugcgcacggugaagaccagcaaggagucccuggugaucaucagccccuccgucgccgaccucgacccguacgacaagagccugcacucccggguguuccccggcgggaagugcagcggcaucaccguguccagcacgugcugcuccaccaaccacgacuacaccaucuggaugcccgagaacccccgccuggggaccagcugcgacaucuucaccaacucccggggcaagcgcgcgagcaagggcgggaagacgugcggcuucgucgacgagcgggggcucuacaagagccugaagggcgccugcaagcugaagcucugcggcgugcuggggcugcgccucauggacggcaccuggguggccauccagaccuccgacgagaucaaguggugcagcccggaccagcuggucaaccugcacgacuuccacuccgacgagaucgagcaccucgugguggaggagcuggucaagaagcgggaggagugccuggacgcccucgagaccaucaugacgaccaagagcguguccuuccgccggcugagccaccuccgcaagcucgugcccggguucggcaaggcguacaccaucuucaacaagacccugauggaggccgacgcccacuacaaguccauccggacguggaacgagaucauccccagcaaggggugccugcgcgucggcggccggugccacccccacgugaacggggucuucuucaacggcaucauccucgggccggacggccacgugcugauccccgagaugcaguccagccugcuccaccagcacauggagcugcuggaguccagcgugaucccccucaugcacccccuggccgacccguccaccgucuucaaggacggggacgaggccgaggacuucguggaggugcaccuccccgacguccacaagcagaucagcggcguggaccugggccugcccaacugggggaaguacgugcugaucuccgcgggcgcccucaccgccagcaugcugaugaucuuccugaugaccugcugccgcaagacgaaccgggccgaguccauccagcacagccccggggagaccggccgcaaggucuccgugaccagccacaacgggcgggugaucagcuccugggagagcuacaaguccggcggcgagaccaagcucuga

SEQ ID NO: 94878 - RNA, 1575 nt, Artificial Sequence
  derived and/or modified CDS sequence (opt1) from glycoprotein__RABV__DQ875050.1
auggugccccagguccugcuguucgugcugcugcucggcuucagccugugcuucgggaaguucccgaucuacaccauccccgacgagcugggccccuggucccccaucgacauccaccaccucagcugcccgaacaaccugguggucgaggacgaggggugcaccaaccuguccgaguucagcuacauggagcucaaggugggcuacaucuccgccaucaaggugaacggguucacgugcaccggcgucgugaccgaggccgagaccuacacgaacuucgugggcuacgucaccaccaccuucaagcgcaagcacuuccggcccacgcccgacgcgugccgcgccgccuacaacuggaagauggccggggacccccgguacgaggagagccugcacaacccguaccccgacuaccacuggcugcgcaccgugcggaccaccaaggagucccucaucaucaucagccccuccgugacggaccuggaccccuacgacaagagccugcacucccgcgucuucccgggccggaagugcagcgggaucaccguguccagcaccuacugcuccaccaaccacgacuacacgaucuggaugcccgagaacccccgcccccggaccccgugcgacaucuucaccaacagccgcggcaagcgggccuccaacgggaacaagaccugcggcuucguggacgagcgcggccucuacaagagccugaagggggcgugccggcugaagcucugcggcguccuggggcugcgccucauggacggcacguggguggccaugcagaccuccggcgagaccaaguggugcccgcccgaccagcuggugaaccugcacgacuuccggagcgacgagaucgagcaccucgucguggaggagcuggugaagaagcgcgaggagugccuggacgcccucgagagcaucaugaccacgaaguccgucagcuuccggcgccugucccaccuccggaagcucgugcccggguucggcaaggccuacaccaucuucaacaagacccugauggaggcggacgcccacuacaagagcgugcgcaccuggaacgagaucauccccuccaaggggugccugaaggucggcgggcggugccacccccacgugaacggcgucuucuucaacggccucauccuggggcccgacgaccacgugcugauccccgagaugcagagcucccuccugcagcagcacauggagcugcucgagagcuccgugaucccgcugaugcacccccuggccgaccccagcacggucuucaaggagggcgacgaggccgaggacuucguggaggugcaccuccccgacgucuacaagcagaucuccgggguggaccugggccugccgaacugggggaaguacgugcucaugaccgccggcgcgaugaucggccugguccugaucuucagccucaugaccuggugccgccgcgccaaccggcccgaguccaagcagcgcagcuucgggggcaccgggggcaacguguccgugacgagccaguccgggaaggucauccccagcugggaguccuacaagagcggcggcgagauccggcuguga

SEQ ID NO: 94879 - RNA, 1575 nt, Artificial Sequence
  derived and/or modified CDS sequence (opt1) from glycoprotein__RABV__DQ875051.1
auggugccccaggcccugcuccuggucccgcugcucggcuucagccugugcuucgggaaguuccccaucuacaccauccccaccaagcugggccccugguccccgaucgacauccaccaccucagcugccccaacaaccuggugguggaggacgaggggugcacgaaccuguccggcuucagcuacauggagcucaaggucgggcgcaucuccgccaucaaggugaacggcuucacgugcaccggcguggucaccgaggcggagaccuacaccaacuucgugggguacgugaccaccacguucaagcggaagcacuuccgccccaugcccggcugcauguacagccggguccagcuggaggacgggcgcuccccgcagaucgaggagagccugcacaaccccuaccccgacuaccacuggcuccggaccgugcgcaccaccaaggagucccugaucaucaucagccccuccgugacggaccuggacccguacgacaagagccuccacucccgggucuuccccggccgcaagugcagcgggaucaccguguccagcaccuacugcuccaccaaccacgacuacacgguguggaugcccgagauccugcggcugggcaccagcugcgacaucuucaccaacucccgcggcaagcgggccagcaaggggagcaagaccugcggcuucgucgacgagcgcgggcucuacaagucccugaagggcgccugcaagcugaagcucugcggcgugcccgggcugcggcugauggacggcacguggguggccaugcagaccagcaacgagaccaaguggugcccgcccgggcagcucgucaaccugcacgaccugcacuccgacgagaucgagcaccucgugguggaggagcuggucaagaagcgcgaggagugccuggacgcccucgagagcaucaccacgaccaaguccgugagcuuccggcgccugucccaccuccggaagcuggugcccggcuucgggaaggcguacaccaucuucaacaagacccugauggaggccgaggcccacuacaagagcguccgcacguggaacgagaucauccccuccaagggcugccugcgggugggcgggggcugccacccgcacgucaacgggguguucuucaacggcaucauccucgggcccgacggccacgugcugauccccgagaugcagagcucccugcuccagcagcacaucgagcugcuggagagcuccgucaucccccucaugcacccgcuggccgaccccuucaccguguucaaggacggcgacgagaucgaggacuucguggagguccaccuccccgacgugcacgagcaggucagcgggguggaccugggccugcccaacuggggcgaguacgugcugcucuccgcggggacccugaucgcccugaugcugaucaucuuccucaucacgugcugcaagcgcguggaccggccggagagcacccagcgcucccugcgcgggaccggccggaacgucagcgugaccucccagagcggcaaguucauccccagccgcgaguccuacaagagcgggggcgagaccgggcuguga

SEQ ID NO: 94880 - RNA, 1575 nt, Artificial Sequence
  derived and/or modified CDS sequence (opt1) from glycoprotein__RABV__E02022.1
auggugccccaggcccugcuccuggucccgauccugggcuucagcuccugcuucgggaaguuccccaucuacaccauccccgacacccucggccccuggagcccgaucgacauccaccaccuguccugccccaacaaccuggugguggaggacgaggggugcacgaaccucagcggcuucuccuacauggagcugaaggucgggcacaucagcgccaucaaggugaacggcuucacgugcaccggcguggucaccgaggcggagaccuacaccaacuucgugggguacgugaccaccacguucaagcgcaagcacuuccggcccacccccgacgccugccgcgccgccuacaacuggaagauggccggcgacccgcgguacgaggagucccugcacagccccuaccccgacuaccacuggcuccgcaccgucaagaccacgaaggagucccuggugaucaucagccccuccguggucgaccuggacccguacgacaacagccuccacucccggguguuccccagcgggaagugcuccggcaucaccgugagcuccgucuacugcagcaccaaccacgacuacaccguguggaugcccgagucccugcgccuggggacgagcugcgacaucuucaccaacagccggggcaagcgcguguccaagggcagcaagaccugcggguucgucgacgagcggggccucuacaagucccugaagggggcgugcaagcugaagcucugcggcgugcgcggccugcggcugauggacgggaccuggguggccaugcagacgagcaacgagaccaaguggugcccgcccgaccagcucgucaaccugcacgaccugcgcuccgacgagaucgagcaccucgugaucgaggagcuggugaagaagcgggaggagugccuggacgcccucgagagcaucaucaccaccaaguccgucagcuuccgccggcuguccuaccugcgcaagcucgugcccggcuucgggaaggccuacacgaucuucaacaagacccugauggaggcggaggcccacuacaagagcguccggaccuggaacgagaucauccccuccaagggcugccugcgcgucgggggccggugccacccccacgugaacggcguguucuucaacgggaucauccucggcccggacgggcacgugcugauccccgagaugcagagcucccugcuccagcagcacaucgagcugcuggagagcuccgugaucccccucaugcacccccuggccgacccguucaccgucuucaaggacggcgacgagacggaggacuucaucgaggugcaccuccccgacgugcacgagcaggucagcgggguggaccugggccugcccaacuggggcgaguacgugcugcucuccgccgggacccugaucgcccugaugcucaucaucuuccugaugaccugcugccgcaaggucgaccggcccgagagcacccagcgcucccugcgcggcacggggcggaacgugagcgugaccagccaguccggcaaguucaucccgagcugggaguccuacaagagcgggggcgagaccggccuguga

SEQ ID NO: 94881 - RNA, 1575 nt, Artificial Sequence
  derived and/or modified CDS sequence (opt1) from glycoprotein__RABV__EF206707.1
auggugccccaggcccugcuguucgucccccugcugguguucccccucugcuucggcaaguuccccaucuacaccauccccgacaagcuggggccguggagccccaucgacauccaccaccuguccugccccaacaaccucguggucgaggacgagggcugcaccaaccugagcggguucuccuacauggagcugaaggugggcuacauccucgccaucaagaugaacggguucacgugcaccggcguggucaccgaggcggagaccuacacgaacuucgugggcuacgugaccaccaccuucaagcgcaagcacuuccggcccacgccggacgccugccgcgccgccuacaacuggaagauggccggggacccccgguacgaggagagccugcacaaccccuaccccgacuaccgcuggcugcggaccgucaagaccaccaaggagucccucgugaucaucagcccguccguggcggaccuggaccccuacgaccgcagccugcacucccgggucuuccccagcggcaagugcuccgggguggccgugagcuccacguacugcagcaccaaccacgacuacaccaucuggaugcccgagaacccgcgccucggcauguccugcgacaucuucaccaacagccgggggaagcgcgccuccaagggcagcgagacgugcggcuucgucgacgagcgggggcuguacaagucccugaagggcgccugcaagcucaagcugugcggggugcugggccuccgccugauggacggcaccuggguggcgaugcagaccagcaacgagaccaaguggugcccgcccgaccagcuggucaaccuccacgacuuccggagcgacgagaucgagcaccuggugguggaggagcugguccgcaagcgggaggagugccucgacgcccuggaguccaucaugacgaccaagagcguguccuuccgccggcugagccaccuccgcaagcuggugcccggguucggcaaggccuacaccaucuucaacaagacccugauggaggccgacgcccacuacaaguccguccggacguggaacgagauccuccccagcaaggggugccugcgcgugggcgggcggugccacccccacgucaacggcguguucuucaacggcaucauccuggggcccgacggcaacgugcucauccccgagaugcaguccagccugcugcagcagcacauggagcuccuggaguccagcgucaucccgcuggugcacccccucgcggaccccuccaccguguucaaggacggggacgaggccgaggacuucgucgaggugcaccuccccgacgugcacaaccaggucagcggcguggaccuggggcucccgaacuggggcaaguacgugcugcuguccgccggcgcccucaccgcccugaugcugaucaucuuccugaugaccugcugccgccgcgucaaccggagcgagcccacgcagcacaaccuccgcgggaccggccgggagguguccgugaccccgcagagcgggaagaucaucuccagcugggagucccacaagagcggcggggagacccgccuguga

SEQ ID NO: 94882 - RNA, 1575 nt, Artificial Sequence
  derived and/or modified CDS sequence (opt1) from glycoprotein__RABV__EF206709.1
auggugccccaggcccugcuguucgucccccugcugguguucccccucugcuucggcaaguuccccaucuacaccauccccgacaagcuggggccguggagccccaucgacauccaccaccuguccugccccaacaaccucguggucgaggacgagggcugcaccaaccugagcggguucuccuacauggagcugaaggugggcuacauccucgccaucaaggugaacggguucacgugcaccggcgucgugaccgaggcggagaccuacacgaacuucgugggcuacgucaccaccaccuucaagcgcaagcacuuccggcccacgccggacgccugccgcgccgccuacaacuggaagauggccggggacccccgguacgaggagagccugcacaaccccuaccccgacuaccgcuggcugcggaccgugaagaccaccaaggagucccucgugaucaucagcccguccgucgcggaccuggaccccuacgaccgcagccugcacucccggguguuccccagcggcaagugcuccgggguggccgucagcuccacguacugcagcaccaaccacgacuacaccaucuggaugcccgagaacccgcgccucggcauguccugcgacaucuucaccaacagccgggggaagcgcgccuccaagggcagcgagacgugcggcuucguggacgagcgggggcuguacaagucccugaagggcgccugcaagcucaagcugugcggggugcugggccuccgccugauggacggcaccugggucagcaugcagaccagcaacgagaccaaguggugcccgcccgacaagcuggugaaccuccacgacuuccgguccgacgagaucgagcaccugguggucgaggagcuggugcgcaagcgggaggagugccucgacgcgcuggagagcaucaugacgaccaaguccgugagcuuccgccggcugucccaccuccgcaagcugguccccggguucggcaaggccuacaccaucuucaacaagacccugauggaggccgacgcccacuacaagagcgugcggacguggaacgagauccuccccuccaaggggugccugcgcgucggcgggcggugccacccccacgugaacggcguguucuucaacggcaucauccuggggcccgacggcaacguccucauccccgagaugcagagcucccugcugcagcagcacauggagcuccuggagagcuccgugaucccgcuggugcacccccucgccgaccccagcaccgucuucaaggacggggacgaggcggaggacuucguggaggugcaccuccccgacguccacaaccagguguccggcguggaccuggggcucccgaacuggggcaaguacguccugcugagcgccggcgcccucaccgcccugaugcugaucaucuuccugaugaccugcugccgccgcgugaaccgguccgagcccacgcagcacaaccuccgcgggaccggccgggaggugagcgucaccccgcaguccgggaagaucaucagcuccugggagagccacaagagcggcggggagacccgccuguga

SEQ ID NO: 94883 - RNA, 1575 nt, Artificial Sequence
  derived and/or modified CDS sequence (opt1) from glycoprotein__RABV__EF206715.1
auggugccccaggcccugcuguucgucccgcugcugguguucccccucugcuucggcaaguuccccaucuacaccauccccgacaagcuggggccguggagccccaucgacauccaccaccuguccugccccaacaaccucguggucgaggacgagggcugcaccaaccugagcggguucuccuacauggagcugaaggugggcuacauccucgccaucaaggugaacggguucacgugcaccggcgucgugaccgaggcggagaccuacacgaacuucgugggcuacgucaccaccaccuucaagcgcaagcacuuccggcccacgccggacgccugccgcgccgccuacaacuggaagauggccggggacccccgguacgaggagagccugcacaaccccuaccccgacuaccgcuggcugcggaccgugaagaccaccaaggagucccucgugaucaucagcccguccgucgcggaccuggaccccuacgaccgcagccugcacucccggguguuccccagcggcaagugcuccgggguggccgucagcuccacguacugcagcaccaaccacgacuacaccaucuggaugcccgagaacccgcgccucggcauguccugcgacaucuucaccaacagccgggggaagcgcgccuccaagggcagcgagacgugcggcuucguggacgagcgggggcuguacaagucccugaagggcgccugcaagcucaagcugugcggggugcugggccuccgccugauggacggcaccugggucagcaugcagcccagcaacgagaccaaguggugcccgcccgacaagcuggugaaccuccacgacuuccgguccgacgagaucgagcaccugguggucgaggagcuggugcgcaagcgggaggagugccucgacgcgcuggagagcaucaugaccacgaaguccgugagcuuccgccggcugucccaccuccgcaagcugguccccggguucggcaaggccuacaccaucuucaacaagacccugauggaggccgacgcccacuacaagagcgugcggaccuggaacgagauccuccccuccaaggggugccugcgcgucggcgggcggugccacccccacgugaacggcguguucuucaacggcaucauccuggggcccgacggcaacguccucaucccggagaugcagagcucccugcugcagcagcacauggagcuccuggagagcuccgugaucccccuggugcacccccucgccgaccccagcacggucuucaaggacggggacgaggcggaggacuucguggaggugcaccucccggacguccacaaccagguguccggcguggaccuggggcuccccaacuggggcaaguacguccugcugagcgccggcgcccucaccgcccugaugcugaucaucuuccugaugaccugcugccgccgcgugaaccgguccgagcccacccagcacaaccuccgcgggacgggccgggaggugagcgucaccccgcaguccgggaagaucaucagcuccugggagagccacaagagcggcggggagacccgccuguga

SEQ ID NO: 94884 - RNA, 1575 nt, Artificial Sequence
  derived and/or modified CDS sequence (opt1) from glycoprotein__RABV__EF206716.1
auggugccccaggcccugcuguucgucccccugcugguguucccccucugcuucggcaaguuccccaucuacaccauccccgacaagcuggggccguggagccccaucgacauccaccaccuguccugccccaacaaccucguggucgaggacgagggcugcaccaaccugagcggguucuccuacauggagcugaaggugggcuacauccucgccaucaaggugaacggguucacgugcaccggcgucgugaccgaggcggagaccuacacgaacuucgugggcuacgucaccaccaccuucaagcgcaagcacuuccggcccacgccggacgccugccgcgccgccuacaacuggaagauggccggggacccccgguacgaggagagccugcacaaccccuaccccgacuaccgcuggcugcggaccgugaagaccaccaaggagucccucgugaucaucagcccguccgucgcggaccuggaccccuacgaccgcagccugcacucccggguguuccccagcggcaagugcuccgggguggccgucagcuccacguacugcagcaccaaccacgacuacaccaucuggaugcccgagaacccgcgccucggcauguccugcgacaucuucaccaacagccgggggaagcgcgccuccaagggcagcgagacgugcggcuucguggacgagcgggggcuguacaagucccugaagggcgccugcaagcucaagcugugcggggugcugggccuccgccugauggacggcaccugggucagcaugcagaccagcaacgagaccaaguggugcccgcccgacaagcuggugaaccuccacgacuuccgguccgacgagaucgagcaccugguggucgaggagcuggugcgcaagcgggaggagugccucgacgcgcuggagagcaucaugacgaccaaguccgugagcuuccgccggcugucccaccuccgcaagcugguccccggguucggcaaggccuacaccaucuucaacaagacccugauggaggccgacgcccacuacaagagcguggggacguggaacgagauccuccccuccaagggcugccugcgggucgggggccgcugccacccccacgugaacggcguguucuucaacgggaucauccugggccccgacgggaacguccucauccccgagaugcagagcucccugcugcagcagcacauggagcuccuggagagcuccgugaucccgcuggugcacccccucgccgaccccagcaccgucuucaaggacggcgacgaggcggaggacuucguggaggugcaccuccccgacguccacaaccagguguccgggguggaccugggccucccgaacuggggcaaguacguccugcugagcgccggggcccucaccgcccugaugcugaucaucuuccugaugaccugcugccggcgcgugaaccgcuccgagcccacgcagcacaaccuccggggcaccgggcgcgaggugagcgucaccccgcaguccggcaagaucaucagcuccugggagagccacaagagcgggggcgagacccggcuguga

SEQ ID NO: 94885 - RNA, 1575 nt, Artificial Sequence
  derived and/or modified CDS sequence (opt1) from glycoprotein__RABV__EF206717.1
auggugccccaggcccugcuguucgucccccugcugguguucccccucugcuucggcaaguuccccaucuacaccauccccgacaagcuggggccguggagccccaucgacauccaccaccuguccugccccaacaaccucguggucgaggacgagggcugcaccaaccugagcggguucuccuacauggagcugaaggugggcuacaucagcgccaucaagaugaacggguucacgugcaccggcguggucaccgaggcggagaccuacacgaacuucgugggcuacgugaccaccaccuucaagcgcaagcacuuccggcccacgccggacgccugccgcgccgccuacaacuggaagauggccggggacccccgguacgaggagucccuccacaaccccuaccccgacuaccgcuggcugcggaccgucaagaccaccaaggagagccuggugaucaucuccccgagcguggcggaccucgaccccuacgaccgcucccugcacagccgggucuuccccuccggcaagugcagcgggguggccguguccagcacguacugcuccaccaaccacgacuacaccaucuggaugcccgagaacccgcgccugggcaugagcugcgacaucuucaccaacucccgggggaagcgcgccagcaagggcuccgagacgugcggcuucgucgacgagcgggggcucuacaagagccugaagggcgccugcaagcugaagcucugcggggugcugggccugcgccucauggacggcaccuggguggcgaugcagaccagcaacgagaccaaguggugcccgcccgaccagcuggucaaccugcacgacuuccgguccgacgagaucgagcaccucgugguggaggagcugguccgcaagcgggaggagugccuggacgcccucgagagcaucaugacgaccaaguccgugagcuuccgccggcugucccaccuccgcaagcucgugcccggguucggcaaggccuacaccaucuucaacaagacccugauggaggccgacgcccacuacaagagcguccggacguggaacgagauccugcccuccaaggggugccuccgcgugggcgggcggugccacccccacgucaacggcguguucuucaacggcaucauccuggggcccgacggcaacgugcugauccccgagaugcagagcucccuccugcagcagcacauggagcugcucgagagcuccgucaucccgcugaugcacccccuggcggaccccagcaccguguucaaggacggggacgaggccgaggacuucguggagguccaccuccccgacgugcacaagcaggucuccggcguggaccuggggcugccgaacuggggcaaguacgugcuccugagcgccggcgcccugaccgcccucaugcugaucaucuuccugaugaccugcugccgccgcgugaaccgguccgagcccacgcagcacaaccugcgcgggaccggccgggaggucagcgugaccccgcaguccgggaagaucaucagcuccugggagagcuacaagagcggcggggagacccgccucuga

SEQ ID NO: 94886 - RNA, 1575 nt, Artificial Sequence
  derived and/or modified CDS sequence (opt1) from glycoprotein__RABV__EF206719.1
auggugccccaggcccugcuguucgucccccugcugguguucccccucugcuucggcaaguuccccaucuacaccauccccgacaagcuggggccguggagccccaucgacauccaccaccuguccugccccaacaaccucguggucgaggacgagggcugcaccaaccugagcggguucuccuacauggagcugaaggugggcuacauccucgccaucaaggugaacggguucacgugcaccggcgucgugaccgaggcggagaccuacacgaacuucgugggcuacgucaccaccaccuucaagcgcaagcacuuccggcccacgccggacgccugccgcgccgccuacaacuggaagauggccggggacccccgguacgaggagagccugcacaaccccuaccccgacuaccgcuggcugcggaccgugaagaccaccaaggagucccucgugaucaucagcccguccgucgcggaccuggaccccuacgaccgcagccugcacucccggguguuccccagcggcaagugcuccgggguggccgucagcuccacguacugcagcaccaaccacgacuacaccaucuggaugcccgagaacccgcgccucggcauguccugcgacaucuucaccaacagccgggggaagcgcgccuccaagggcagcgagacgugcggcuucguggacgagcgggggcuguacaagucccugaagggcgccugcaagcucaagcugugcggggugcugggccuccgccugauggacggcaccugggucagcaugcagaccagcaacgagaccaaguggugcccgcccgacaagcuggugaaccuccacgacuuccgguccgacgagaucgagcaccugguggucgaggagcuggugcgcaagcgggaggagugccucgacgcgcuggagagcaucaugacgaccaaguccgugagcuuccgccggcugucccaccuccgcaagcugguccccggguucggcaaggccuacaccaucuucaacaagacccugauggaggccgacgcccacuacaagagcguggagacguggaacgagauccuccccuccaaggggugccugcgggucggcgggcgcugccacccccacgugaacggcguguucuucaacggcaucauccuggggcccgacggcaacguccucauccccgagaugcagagcucccugcugcagcagcacauggagcuccuggagagcuccgugaucccgcuggugcacccccucgccgaccccagcaccgucuucaaggacggggacgaggcggaggacuucguggaggugcaccuccccgacguccacaaccagguguccggcguggaccuggggcucccgaacuggggcaaguacguccugcugagcgccggcgcccucaccgcccugaugcugaucaucuuccugaugaccugcugccggcgcgugaaccgcuccgagcccacgcagcacaaccuccgggggaccggccgcgaggugagcgucaccccgcaguccgggaagaucaucagcuccugggagagccacaagagcggcggggagaccauccuguga

SEQ ID NO: 94887 - RNA, 1575 nt, Artificial Sequence; identical to SEQ ID NO: 94882
  derived and/or modified CDS sequence (opt1) from glycoprotein__RABV__EF206720.1

SEQ ID NO: 94888 - RNA, 1575 nt, Artificial Sequence
  derived and/or modified CDS sequence (opt1) from glycoprotein__RABV__EF437215.1
auggugccgcagguccugcuguucgugccgcugcugguguucagcaugugcuucggcaaguuccccaucuacaccauccccgacaagcucgggcccugguccccgaucgacauccaccaccugagcugccccaacaaccuggucguggaggacgagggcugcaccaaccucuccggguucagcuacauggagcugaaggugggcuacaucuccgccaucaaggucaacggguucacgugcaccggcguggugaccgaggccgagaccuacacgaacuucgucggcuacgugaccaccaccuucaagcgcaagcacuuccggcccacgcccgacgcgugccgcgccgccuacaacuggaagauggccggggacccgcgguacgaggagagccugcacaaccccuaccccgacuaccacuggcuccgcaccgugaagaccaccaaggagucccuggucaucaucagccccuccguggccgaccuggacccguacgacaagagccuccacucccggguguuccccagcggcaagugcuccgggaucacgaucagcuccaccuacugcagcaccaaccacgacuacaccaucuggaugcccgagaacccccgccugggcacguccugcgacaucuucaccaacagccgggggaagcgcgcguccaagggcggcaagaccugcggguucgucgacgagcggggccuguacaagagccucaagggggccugcaagcugaagcugugcggcgugcucggccugcgccugauggacgggaccuggguggccaugcagacgagcgacgagaccaaguggugcccgcccgaccagcucgucaaccugcacgacuuccgguccgacgagaucgagcaccuggugguggaggagcucgucaagaagcgcgaggagugccuggacgcccuggagagcaucauggcgaccaaguccgugagcuuccggcgccucucccaccuccggaagcuggugcccggcuucgggaaggccuacaccaucuucaacaagacgcucauggaggccgacgcccacuacaagagcguccgcaccuggaacgagaucauccccuccaagggcugccugcgggucgggggccgcugccacccgcacgugaacggcguguucuucaacgggaucauccugggccccgacgggcacgugcucauccccgagaugcagagcucccugcugcagcagcacauggagcuccuggagagcuccgucaucccccugaugcacccgcucgccgaccccagcaccguguucaaggacggcgacgaggcggaggacuucguggagguccaccuccccgacgugcacaagcagaucuccgggguggaccugggccugcccagcuggggcaaguacguccugguguccgccggggugcuggucgugcucaugcugaccaucuucaucaugacgugcugcggccgggugcaccgccccaagagcacccagcacgggcugggcgggaccggccggaaggucuccgugaccagccaguccggcaaggugaucagcagcugggaguccuacaagagcgggggcgagacgcgccucuga

SEQ ID NO: 94889 - RNA, 1575 nt, Artificial Sequence
  derived and/or modified CDS sequence (opt1) from glycoprotein__RABV__EF556198.1
augacgccccaggugcugcuguucgucccgcugcugguguucagcuccugcuucggcaaguuccccaucuacaccauccccgacaagcucgggcccuggagcccgaucgacauccaccaccuguccugccccaacaaccugguggucgaggacgagggcugcaccaaccucagcggguucuccuacauggagcugaaggugggcuacaucagcgccaucaaggugaacggguucacgugcaccggcgucgugaccgaggccgagaccuacaccaacuucgugggcuacgucaccaccacguucaagcgcaagcacuuccggcccaugcccgacgcgugccgcgccgccuacaacuggaagauggccggggacccgcgguacgaggagucccugcacaaccccuaccccgacuaccacuggcuccgcaccgugaagaccaccaaggagagccuggugaucaucucccccagcgucgccgaccuggacccguacgacaagucccuccacagccggguguuccccggcgggaagugcuccggcaucacggugagcuccgcgugcugcagcaccaaccacgacuacaccaucuggaugcccgagaacccccgccuggggaccuccugcgacaucuucacgaacagccggggcaagcgcgccuccaagggcgggaagaccugcggcuucgucgacgagcgggggcuguacaagagccucaagggcgccugcaagcugaagcugugcggcgugcucgggcugcgccugauggacggcaccuggguggccauccagaccagcgacgagaucaaguggugcuccccggaccagcucgucaaccugcacgacuuccacagcgacgagaucgagcaccuggugguggaggagcucgucaagaagcgggaggagugccuggacgcgcuggagacgaucaugaccaccaaguccgugagcuuccgccggcucucccaccuccgcaagcuggugcccgggagcggcaaggccuacaccaucuucaacaagacgcucauggaggccgacgcccacuacaaguccauccggaccuggaacgagaucauccccagcaaggggugccugcgcgucggcggccggugccacccccacgugaacggggucuucuucaacggcaucauccuggggccggacggccacgugcucauccccgagaugcaguccagccugcugcaccagcacauggagcuccuggaguccagcgugaucccccugaugcacccccucgccgacccguccaccgucuucaaggacggggacgaggcggaggacuucguggaggugcaccuccccgacguccacaagcagaucagcggcguggaccugggccugcccaacugggggaaguacgugcugaucuccgccggcgcccugaccgcccucaugcugacgaucuuccugaugaccugcugccgcaagaccaaccgggccgagagcauccagcacucccccggggagaccggccgcaaggucagcgugacgucccacaacgggcgggugaucagcagcugggaguccuacaagagcggcuccgagaccaagcucuga

SEQ ID NO: 94890 - RNA, 1575 nt, Artificial Sequence
  derived and/or modified CDS sequence (opt1) from glycoprotein__RABV__EF564174.1
augaucccccaggcccugcuguucgugccgcugcuggucuucccccucugcuucggcaaguuccccaucuacaccauccccgacaagcuggggccguggagccccaucgacauccacaaccuguccugccccaacaaccucgugguggaggacgagggcugcaccaaccugagcggguucuccuacauggagcugaaggucggcuacaucagcgccaucaaggugaacggguucacgugcaccggcguggucaccgaggcggagaccuacacgaacuucgugggcuacgugaccaccaccuucaagcgcaagcacuuccggcccacgccggacgccugccgcuccgccuacaacuggaagauggccggggacccccgguacgaggagagccuccacaaccccuaccccgacuaccacuggcugcgcaccgucaagaccaccaaggaguccguggugaucaucagcccguccgucgccgaccuggaccccuacgacaagagccuccacucccggguguucccccgcggcaagugcagcgggaucacgguguccagcgcguacugcuccaccaaccacgacuacaccaucuggaugcccgagaacccgcggcugggcaccagcugcgacaucuucacgaacucccgcgggaagcgggccagcaagggcuccaagaccugcggcuucgucgacgagcgcgggcuguacaagagccucaagggcgccugcaagcugaagcugugcggggugcucggccugcggcugauggacggcaccuggguggccauccagaccagcaacgagacgaaguggugcccgcccgaccagcucgucaaccugcacgacuuccacuccgacgagaucgagcaccuggugguggaggagcucgucgagaagcgcgaggagugccuggacgcgcuggagagcaucaugaccaccaaccccguguccuuccggcgccucagcccccugcggaagcuggugcccggguucggcaaggccuacaccaucuucaacaagacgcucauggaggccgacgcccacuacaaguccguccagaccugggacgagaucauccccagcaaggggugccugcgcgugggcgcccggugccacccccacgucaacgggguguucuucaacggcaucauccugggcccggacgggcacgugcucauccccgagaugcaguccagccugcugcagcagcacauggagcuccuggaguccagcgucaucccccugaugcacccccucgcggacccguccaccguguucaaggacggcgacgagguggaggacuucgucgaggugcaccuccccgacgugcacaagcaggucagcgggguggaccugggccuccccaacugggggaaggacgugcugaugggcgccggcguccugaccgcccucaugcugaugaucuuccugaugacgugcugccgccggaccaaccgcgccgaguccauccagcacagccucggggagaccggccggaagguguccgugaccagccaguccgggcgcgucaucagcuccugggagagcuacaagagcggcggggagacgaagcuguga

SEQ ID NO: 94891 - RNA, 1581 nt, Artificial Sequence
  derived and/or modified CDS sequence (opt1) from glycoprotein__RABV__EF614261.1
augcccagccaggccguguuccugguccucaccaccguguucucccagugcgugggcaaguucccgaucuacacgauccccgacaagcuggggcccuggagccccaucgacauccaccaccuguccugcccgaacaaccucgucguggaggacgacggcugcaccacccugagcggguucaccuacauggagcugaaggugggcuacaucacgaccaucaaggucgacggguucacgugcaccggcaucgugaccgaggccgagaccuacaccaacuucgugggcuacgucaccacgaccuucaagcgcaagcacuuccggcccgggcccuccgcgugccgcgacgccuacaacuggaaggccgccggcgacccccgguacgaggagagccuccacaacccguaccccgacucccacuggcugcgcaccgugaccacgaccaaggagagccugcucaucaucucccccagcguggucgacauggacgccuacgacaagucccugcugagcaagaucuuccccaacgggaagugcccgggcguguccaucgcgagccccuucugcuccaccaaccacgacuacaccaucuggaugcccgagaacacgaagaccgggaugagcugcgacaucuucaccaccuccaagggcaagcgggccacgaaggacggcaagcucugcggguucguggacgagcgcggccuguacaagagccugaagggguccugcaagcucaagcugugcggcgucagcggccugcggcucauggacgggagcuggguguccauccagaaccacgaggaggccaaguggugcccgcccgaccagcuggugaacguccacgacuuccacagcgacgagaucgagcaccugaucguggaggagcucgugaagaagcgcgaggagugccuggacgcccuggaguccaucaugaccaccaagagcaucuccuuccggcgccucagccaccuccggaagcugguccccggcuucgggaaggcguacaccaucaucaacaagacgcugauggaggccgacgcccacuacaaguccauccgcgaguggagcgagaucauccccuccaagggcugccugguggccgggggccggugcuaccaccaccacaacggcguguucuucaacgggaucauccugagccccgacggccacguccucaucccggagaugcaguccgcccugcugcagcagcacaucgagcuccuggagagcuccgugaucccccugaugcacccccucgcggaccccagcaccgucuucaagggggacgacggcgccgaggacuucguggaggugcaccucccggacguccagaagcagaucuccgggaucgaccugggccugcccgaguggaagcgcuacuuccugaucggcguggccgcccugacccucuucgcccugaccaucuucguggucgugugcugccggcgcgugcggcgccgggagcgcgcgaagcccaaccccgucgagcugauccggaaggugagcgugacgucccagagcgggaaggucaucccguccugggagagcuacaagguggaggccgagggccagagccaggccuga

SEQ ID NO: 94892 - RNA, 1575 nt, Artificial Sequence; identical to SEQ ID NO: 94867
  derived and/or modified CDS sequence (opt1) from glycoprotein__RABV__EF643518.1

SEQ ID NO: 94893 - RNA, 1575 nt, Artificial Sequence
  derived and/or modified CDS sequence (opt1) from glycoprotein__RABV__EU008924.1
augaucccccaggcccugcuguucgugccgcugcuggucuucagcuccugcuucggcaaguuccccaucuacaccauccccgacaagcucgggcccuggagcccgaucgacauccaccaccuguccugccccaacaaccuggugguggaggacgagggcugcaccaaccucagcggguucuccuacauggagcugaaggucggcuacaucagcgccaucaaggugaacggguucacgugcaccggcguggucaccgaggcggagaccuacacgaacuucgugggcuacgugaccaccaccuucaagcgcaagcacuuccggcccaugcccggggccugccgcgccgccuacaacuggaagauggccggcgacccgcgguacgaggagucccugcacaaccccuaccccgacuaccacuggcuccgcacggucaagaccaccaaggagagccuggugaucaucucccccagcguggcggaccuggacccguacgacaagucccuccacagccgggucuuccccuccgggaagugcagcggcaucaccguguccagcacgugcugcuccaccaaccacgacuacaccaucuggaugcccgagaacccccgccuggggaccagcugcgacaucuucacgaacucccggggcaagcgcgccagcaagggcgggaagaccugcggcuucguggacgagcgggggcuguacaagagccucaagggcgccugcaagcugaagcugugcggcguccucgggcugcgccugauggacggcaccuggguggccauccagaccuccgacgagaucaaguggugcagcccggaccagcucgugaaccugcacgacuuccacuccgacgagaucgagcaccuggucguggaggagcucgugaagaagcgggaggagugccuggacgcgcuggagacgaucaugaccaccaagagcgucuccuuccgccggcucagccaccuccgcaagcuggugcccggguucggcaaggccuacaccaucuucaacaagacgcucauggaggccgacgcccacuacaaguccauccggaccuggaacgagaucauccccagcaaggggugccugcgcgugggcggccggugccacccccacgucaacgggguguucuucaacggcaucauccuggggccggacggccacguccucauccccgagaugcaguccagccugcugcaccagcacauggagcuccuggaguccagcgugaucccccugaugcacccccucgccgacccguccaccguguucaaggacggggacgaggcggaggacuucgucgaggugcaccuccccgacgugcacaagcagaucagcggcgucgaccugggccugcccaacugggggaaguacgugcugaucuccgugggcgcccugaccgcccucaugagcaugaucuuccugaugacgugcugccgcaagaccaaccgggccgaguccauccagcacagccccggggagaccggccgcaaggucuccgugaccagccacaacgggcgggugaucagcuccugggagagcuacaaguccggcggcgagacgaagcuguga

SEQ ID NO: 94894 - RNA, 1575 nt, Artificial Sequence
  derived and/or modified CDS sequence (opt1) from glycoprotein__RABV__EU008925.1
augaucccccaggcccugcuguucgugccgcugcuggucuucagccucugcuucggcaaguuccccaucuacaccauccccgacaagcuggggcccugguccccgaucgacauccaccaccugagcugccccaacaaccucgugguggaggacgagggcugcaccaaccuguccggguucagcuacauggagcugaaggucggcuacaucuccgccaucaaggugaacggguucacgugcaccggcguggucaccgaggcggagaccuacacgaacuucgugggcuacgugaccaccaccuucaagcgcaagcacuuccggcccaugcccggggccugccgcgccgccuacaacuggaagauggccggcgacccgcgguacgaggagagccuccacaaccccuaccccgacuaccacuggcugcgcacggucaagaccaccaaggagucccuggugaucaucagccccuccguggcggaccucgacccguacgacaagagccugcacucccgggucuuccccgggggcaagugcagcgggaucaccguguccagcacgugcugcuccaccaaccacgacuacaccaucuggaugcccgagaacccccgccugggcaccagcugcgacaucuucacgaacucccggggcaagcgcgccagcaagggcgggaagaccugcggguucguggacgagcggggccucuacaagucccugaagggcgccugcaagcugaagcucugcgggguccugggccugcgccucauggacgggaccuggguggccauccagaccagcgacgagaucaaguggugcagcccggaccagcuggugaaccugcacgacuuccacuccgacgagaucgagcaccucgucguggaggagcuggugaagaagcgggaggagugccuggacgcgcucgagacgaucaugaccaccaagagcgucuccuuccgccggcugagccaccuccgcaagcucgugcccggcuucgggaaggccuacaccaucuucaacaagacgcugauggaggccgacgcccacuacaaguccauccggaccuggaacgagaucauccccagcaagggcugccugcgcgugggcgggcggugccacccccacgucaacggcguguucuucaacgggaucauccucggcccggacgggcacguccugauccccgagaugcaguccagccugcuccaccagcacauggagcugcuggaguccagcgugaucccccucaugcacccccuggccgacccguccaccguguucaaggacggcgacgaggcggaggacuucgucgaggugcaccuccccgacgugcacaagcagaucagcggcgucgaccuggggcugcccaacuggggcaaguacgugcugaucuccgccggggcccucaccgcccugaugagcaugaucuuccugaugacgugcugccgcaagaccaaccgggccggcuccauccagcacagccccggggagaccggccgcaagguguccgucaccagccacaacggccgggugaucuccagcugggagagcuacaaguccgggggcgagacgaagcucuga

SEQ ID NO: 94895 - RNA, 1575 nt, Artificial Sequence
  derived and/or modified CDS sequence (opt1) from glycoprotein__RABV__EU008926.1
augaucccccaggcccugcuguucgugccgcugcuggucuucagcuccugcuucggcaaguuccccaucuacaccauccccgacaagcucgggcccuggagcccgaucgacauccaccaccuguccugccccaacaaccuggugguggaggacgagggcugcaccaaccucagcggguucuccuacauggagcugaaggucggcuacaucagcgccaucaaggugaacggguucacgugcaccggcguggucaccgaggcggagaccuacacgaacuucgugggcuacgugaccaccaccuucaagcgcaagcacuuccggcccaugcccggggccugccgcgccgccuacaacuggaagauggccggcgacccgcgguacgaggagucccugcacaaccccuaccccgacuaccacuggcuccgcacggucaagaccaccaaggagagccuggugaucaucucccccagcguggcggaccuggacccguacgacaagucccuccacagccgggucuuccccgggggcaagugcuccgggaucaccgugagcuccacgugcugcagcaccaaccacgacuacaccaucuggaugcccgagaacccccgccugggcaccuccugcgacaucuucacgaacagccggggcaagcgcgccuccaagggcgggaagaccugcggguucguggacgagcggggccuguacaagagccucaagggcgccugcaagcugaagcugugcgggguccucggccugcgccugauggacgggaccuggguggccauccagaccagcgacgagaucaaguggugcuccccggaccagcucgugaaccugcacgacuuccacagcgacgagaucgagcaccuggucguggaggagcucgugaagaagcgggaggagugccuggacgcgcuggagacgaucaugaccaccaaguccgucagcuuccgccggcucucccaccuccgcaagcuggugcccggcuucgggaaggccuacaccaucuucaacaagacgcucauggaggccgacgcccacuacaagagcauccggaccuggaacgagaucauccccuccaagggcugccugcgcgugggcgggcggugccacccccacgucaacggcguguucuucaacgggaucauccugggcccggacgggcacguccucauccccgagaugcagagcucccugcugcagcagcacauggagcuccuggagagcuccgugaucccccugaugcacccccucgccgacccgagcaccguguucaaggacggcgacgaggcggaggacuucgucgaggugcaccuccccgacgugcacaagcagaucuccggcgucgaccuggggcugcccaacuggggcaaguacgugcugaugagcgccggggcccugaccgcccucauguccaugaucuuccugaugacgugcugccgcaagaccaaccgggccgagagcauccagcacucccccggcgagaccgggcgcaaggugagcgucaccucccacaacggccgggugaucagcagcugggaguccuacaagagcggcggggagacgaagcuguga

SEQ ID NO: 94896 - RNA, 1575 nt, Artificial Sequence
  derived and/or modified CDS sequence (opt1) from glycoprotein__RABV__EU008927.1
augaucccccaggcccugcuguucgugccgcugcuggucuuccucagcugcuucggcaaguuccccaucuacaccauccccgacaagcuggggcccugguccccgaucgacauccaccaccugagcugccccaacaaccucgugguggaggacgagggcugcaccaaccuguccggguucagcuacauggagcugaaggucggcuacaucuccgccaucaaggugaacggguucacgugcaccggcguggucaccgaggcggagaccuacacgaacuucgugggcuacgugaccaccaccuucaagcgcaagcacuuccggcccaugcccgacgccugccgcgccgccuacaacuggaagauggccggggacccgcgguacgaggagagccuccacaaccccuaccccgacuaccacuggcugcgcacggucaagaccaccaaggagucccuggugaucaucagccccuccguggcggaccucgacccguacgacaagagccugcacucccgggucuuccccggcgggaagugcagcggcaucaccguguccagcacgugcugcuccaccaaccacgacuacaccaucuggaugcccgagaacccccgccuggggaccagcugcgacaucuucacgaacucccggggcaagcgcgccagcaagggcuccaagaccugcggguucguggacgagcggggccucuacaagagccugaagggggccugcaagcugaagcucugcggcguccugggccugcgccucauggacgggaccuggguggccauccagaccagcgacgagaucaaguggugcuccccggaccagcuggugaaccugcacgacuuccacagcgacgagaucgagcaccucgucguggaggagcuggugaagaagcgggaggagugccuggacgcgcucgagacgaucaugaccaccaaguccgucagcuuccgccggcugucccaccuccgcaagcucgugcccggcuucgggaaggccuacaccaucuucaacaagacgcugauggaggccgacgcccacuacaagagcauccggaccuggaacgagaucauccccuccaagggcugccugcgcgucgggggccggugccacccccacgugaacggcguguucuucaacgggaucauccucggcccggacgggcacguccugauccccgagaugcagagcucccugcuccaccagcacauggagcugcuggagagcuccgugaucccccucaugcacccccuggccgacccgagcaccguguucaaggacggcgacgaggcggaggacuucgucgaggugcaccuccccgacgugcacaagcagaucuccggggucgaccugggccugcccaacuggggcaaguacgugcugaucagcgccggggcccucaccgcccugauguccaugaucuuccugaugacgugcugccgcaagaccaaccgggccgagagcauccagcacucccccggcgagaccgggcgcaaggugagcgucaccucccacaacggccgggugaucagcagcugggaguccuacaagagcgggggcgagacgaagcucuga

SEQ ID NO: 94897 - RNA, 1575 nt, Artificial Sequence
  derived and/or modified CDS sequence (opt1) from glycoprotein__RABV__EU008928.1
augaucccccaggugcugcuguucgucccgcugcugguguucagcuccugcuucggcaaguuccccaucuacaccauccccgacaagcucgggcccuggagcccgaucgacauccaccaccuguccugccccaacaaccugguggucgaggacgagggcugcaccaaccucagcggguucuccuacauggagcugaaggugggcuacaucagcgccaucaaggugaacggguucacgugcaccggcgucgugaccgaggccgagaccuacacgaacuucgugggcuacgucaccaccaccuucaagcgcaagcacuuccggcccaugcccgacgcgugccgcgccgccuacaacuggaagauggccggggacccgcgguacgaggagucccugcacaaccccuaccccgacuaccacuggcuccgcacggugaagaccaccaaggagagccuggugaucaucucccccagcgucgccgaccuggacccguacgacaagucccuccacagccggguguuccccuccggcaagugcagcgggaucaccguguccagcacgugcugcuccaccaaccacgacuacaccaucuggaugcccgagaacccccgccugggcaccagcugcgacaucuucacgaacucccgggggaagcgcgcgagcaagggcggcaagaccugcggguucgucgacgagcggggccuguacaagagccucaagggggccugcaagcugaagcugugcggcgugcucggccugcgccugauggacgggaccuggguggccauccagaccuccgacgagaucaaguggugcccgcccgaccagcucgucaaccugcacgacuuccacagcgacgagaucgagcaccuggugguggaggagcucgucaagaagcgggaggagugccuggacgcccuggaguccaucaugacgaccaagagcguguccuuccgccggcucagccaccuccgcaagcuggugcccggcuucgggaaggcguacaccaucuucaacaagacccucauggaggccgacgcccacuacaaguccauccggacguggaacgagaucauccccagcaagggcugccugcgcgucgggggccggugccacccgcacgugaacggcgucuucuucaacgggaucauccugggccccgacgggcacgugcucauccccgagaugcaguccagccugcugcaccagcacauggagcuccuggaguccagcgugaucccccugaugcacccgcucgccgaccccuccaccgucuucaaggacggcgacgaggccgaggacuucguggaggugcaccuccccgacguccacaagcagaucagcgggguggaccugggccugcccaacuggggcaaguacgugcugaucuccgcgggggcccugaccgcccucaugagcaugaucuuccugaugaccugcugccgcaagacgucccgggccgagagcacccagcacuccccgggcgagaccgggcgcaaggucagcgugaccagccacaacggccgggugaucuccagcugggaguccuacaagagcgggggcgagacgaagcuguga

SEQ ID NO: 94898 - RNA, 1575 nt, Artificial Sequence
  derived and/or modified CDS sequence (opt1) from glycoprotein__RABV__EU086128.1
auggugccgcagguccugcuguucgugccgcugcugguguucagcaugugcuucggcaaguuccccaucuacaccauccccgacaagcucgggcccugguccccgaucgacauccaccaccugagcugccccaacaaccuggucguggaggacgagggcugcaccaaccucuccggguucagcuacauggagcugaaggugggcuacaucuccgccaucaaggucaacggguucacgugcaccggcguggugaccgaggccgagaccuacacgaacuucgucggcuacgugaccaccaccuucaagcgcaagcacuuccggcccacgcccgacgcgugccgcgccgccuacaacuggaagauggccggggacccgcgguacgaggagagccugcacaaccccuaccccgacuaccacuggcuccgcaccgugaagaccaccaaggagucccuggucaucaucagccccuccguggccgaccuggacccguacgacaagagccuccacucccggguguuccccagcggcaagugccuggggaucacgaucuccagcaccuacugcuccaccaaccacgacuacaccaucuggaugcccgagaacccccgccugggcacgagcugcgacaucuucaccaacucccgggggaagcgcgcgagcaagggcuccaagaccugcggcuucgucgacgagcgggggcucuacaagagccugaagggcgccugcaagcugaagcucugcggggugcugggccugcgccucauggacggcaccuggguggccaugcagacgagcgacgagaccaaguggugcccgcccgaccagcuggucaaccugcacgacuuccgguccaacgagaucgagcaccucgugguggaggagcuggucaagaagcgcgaggagugccuggacgcccucgagagcaucaugaccaccaaguccgugagcuuccggcgccugucccaccuccggaagcucgugcccggguucggcaaggcguacacgaucuucaacaagacccugauggaggccgacgcccacuacaagagcguccgcaccuggaacgagaucauccccuccaaggggugccugcgggugggcgggcgcugccacccgcacgucaacggcguguucuucaacggcaucauccucgggcccgacggccacgugcugauccccgagaugcagagcucccugcuccagcagcacauggaccugcuggagagcuccgucaucccccucaugcacccgcuggccgaccccagcaccguguucaaggacggggacgaggccgaggacuucguggagguccaccuccccgacgugcacaagcagaucuccggcguggaccuggggcugcccagcuggggcaaguacguccugguguccgcgggcgugcucgucgugcugaugcugacgaucuucaucaugaccugcugcgggcgggugcaccgccccaagagcacccagcacucccucggcgggaccggccggaaggucagcgugacgucccagagcgggaaggugaucagcuccugggagagcuacaagcgcggcggcgagacccgccuguga

SEQ ID NO: 94899 - RNA, 1575 nt, Artificial Sequence
  derived and/or modified CDS sequence (opt1) from glycoprotein__RABV__EU086129.1
augaucccccaggcccuccuguucgugccguuccuggccuucagccugugcuucggcaaguuccccaucuacaccauccccgacaagcucgggcccugguccccgaucgacauccaccaccugagcugccccaacaaccuggucguggaggacgagggcugcaccaaccucuccggguucagcuacauggagcugaaggugggcuacaucuccgcgaucaaggucaacggguucacgugcaccggcguggugaccgaggccgagaccuacacgaacuucaucggcuacgucaccaccaccuuccgccggaagcacuuccgccccacgcccgacgccugccgggccgccuacaacuggaagauggcgggggacccgcgcuacgaggagagccugcacaaccccuaccccgacuaccacuggcuccggaccgugaagaccaccaaggagucccuggugaucaucagccccuccgucagcgaccuggacccguacgacaagucccuccacagccgcguguuccccuccggcaagugcagcgggaucacgguguccagcaccuacugccccaccaaccacgacuacaccaucuggaugcccgagaacccgcggcugggcacguccugcgacaucuucaccaacagccgcgggaagcgggccuccaagggcagcaagaccugcggcuucgucgacgagcgcgggcuguacaagagccucaagggcgccugcaagcugaagcugugcggggugcucggccugcggcugauggacggcaccugggccgcgauccagacguccgacgaggccaaguggugcccgcccgaccagcucgugaacauccacgacuuccgcagcgacgagaucgagcaccuggucguggaggagcuggugaagaagcgggaggagugccucgacgcccuggaguccaucaugaccaccaagagcgucuccuuccgccggcugagccaccuccgcaagcuggugcccggguucggcaaggccuacaccaucuucaacaagacgcugauggaggccgacgcgcacuacaaguccgugcggaccuggaacgagaucauccccagcaaggggugccuccgcgucggcgggcggugccacccccacgugaacggcguguucuucaacggcaucauccuggggcccgacggccacguccugauccccgagaugcaguccagccuccugcagcagcacauggagcugcucgaguccagcgugaucccgcugaugcacccccuggccgaccccuccaccgucuucaaggacggggacgaggccgaggacuucguggaggugcaccuccccgacguccacaagcaggucagcggcguggaccuggggcugccguccuggggcaaguacgugcucaugagcgugggcgcccugaucgugcugaugcucaugaucuuccugaccacgugcugccgcaaggccaacggggcggaguccauccggcaccgccugggcgagaccgggcgcaaggucagcgugaccucccagaacggccgggugaucagcagcugggaguccuacaagagcgggggcgagaccaagcucuga

SEQ ID NO: 94900 - RNA, 1575 nt, Artificial Sequence
  derived and/or modified CDS sequence (opt1) from glycoprotein__RABV__EU086130.1
augaucccccaggcccugcuguucgugccgcugcuggucuucagccucugcuacggcaaguuccccaucuacaccauccccgacaagcuggggcccugguccccgaucgacauccaccaccugagcugccccaacaaccucgugguggaggacgagggcugcaccaaccuguccggguucagcuacauggagcugaaggucggcuacaucuccgccaucaaggugaacggguucacgugcaccggcguggucaccgaggcggagaccuacacgaacuucgugggcuacgugaccaccaccuucaagcgcaagcacuuccggcccacgcccgacgccugccgcgccgccuacaacuggaagauggccggggacccgcgguacgaggagagccuccacaaccccuaccccgacuaccacuggcugcgcaccgucaagaccaccaaggagucccuggugaucaucagccccuccgugagcgaccucgacccguacgacaagucccugcacagccgggucuuccccuccggcaagugcagcgggaucacgguguccagcaccuacugccccaccaaccacgacuacaccaucuggaugcccgagaacccgcgccugggcacguccugcgacaucuucaccaacagccgggggaagcgcgcguccaagggcagcaagaccugcggcuucguggacgagcgggggcucuacaagagccugaagggcgccugcaagcugaagcucugcgggguccugggccugcgccucauggacggcaccugggccgccauccagacguccgacgaggcgaaguggugcccgcccgaccagcuggugaacauccacgacuuccggagcgacgagaucgagcaccugguggucgaggagcucgugaagaagcgcgaggagugccuggacgcccuggaguccaucaugaccaccaagagcguguccuuccggcgccucagccaccuccggaagcugguccccggguucggcaaggccuacaccaucuucaacaagacgcucauggaggccgacgcccacuacaaguccgugcgcaccuggaacgagaucauccccagcaaggggugccugcgggugggcgggcgcugccacccccacgucaacggcguguucuucaacggcaucauccuggggcccgacggccacguccucauccccgagaugcaguccagccugcugcagcagcacauggagcuccuggaguccagcgugaucccgcugaugcacccccucgcggaccccuccaccguguucaaggacggggacgaggccgaggacuucgucgaggugcaccuccccgacgugcacaagcaggucagcggcguggaccuggggcugccguccuggggcaaguacgugcugaugagcgucggcgccaugaucgcccugaugcucgugaucuuccugaccacgugcugccggaaggugaacggggccgagaccauccagcaccgccugggcgagaccgggcggaaggucuccgugaccagccaguccggccgcgugaucagcagcugggaguccuacaagagcgggggcgagacgaagcucuga

SEQ ID NO: 94901 - RNA, 1575 nt, Artificial Sequence
  derived and/or modified CDS sequence (opt1) from glycoprotein__RABV__EU086131.1
augaucccccaggcccugcuguucgugccgcugcuggucuucagccucugccugggcaaguuccccaucuacaccauccccgacaagcuggggcccugguccccgaucgacauccaccaccucagcugccccaacaaccuggugguggaggacgagggcugcaccaaccuguccggguucagcuacauggagcucaaggucggcuacaucuccgccaucaaggugaacggguucacgugcaccggcguggucaccgaggcggagaccuacacgaacuucgugggcuacgugaccaccaccuucaagcgcaagcacuuccggcccacgcccgacgccugccgcgccgccuacaacuggaagauggccggggacccgcgguacgaggagagccugcacaaccccuaccccgacuaccacuggcugcgcaccgucaagaccaccaaggagucccucgugaucaucagccccuccgugagcgaccuggacccguacgacaagucccugcacagccgggucuuccccggcgggaagugcuccggcaucacggugagcuccaccuacugccccaccaaccacgacuacaccaucuggaugcccgagaacccgcgccucgggacgagcugcgacaucuucaccaacucccggggcaagcgcgcgagcaagggcuccaagaccugcggguucguggacgagcggggccuguacaagagccugaagggggccugcaagcucaagcugugcggcguccugggccuccgccugauggacgggaccugggccgccauccagacgagcgacgaggcgaaguggugcccgcccgaccagcuggugaacauccacgacuuccgguccgacgagaucgagcaccucguggucgaggagcuggugaagaagcgcgaggagugccuggacgcccucgagagcaucaugaccaccaaguccgugagcuuccggcgccugucccaccuccggaagcucguccccggcuucgggaaggccuacaccaucuucaacaagacgcugauggaggccgacgcccacuacaagagcgugcgcaccuggaacgagaucauccccuccaagggcugccugcgggucgggggccgcugccacccccacgugaacggcguguucuucaacgggaucauccucggccccgacgggcacguccugauccccgagaugcagagcucccugcuccagcagcacauggagcugcuggagagcuccgugaucccgcucaugcacccccuggcggaccccagcaccguguucaaggacggcgacgaggccgaggacuucgucgaggugcaccuccccgacgugcacaagcaggucuccgggguggaccugggccugccgagcuggggcaaguacgugcugauguccgucggggccaugaucgcccucaugcugaugaucuuccugaccacgugcugccggaaggccaacggcgcggagaccauccagcaccgccucggggagaccggccggaaggugagcgugaccucccagagcgggcgcgucaucuccagcugggagagcuacaaguccggcggcgagacgaagcuguga

SEQ ID NO: 94902 - RNA, 1575 nt, Artificial Sequence
  derived and/or modified CDS sequence (opt1) from glycoprotein__RABV__EU086132.1
augaucccccaggcccugcuguucgugccgcugcuggucuucagccucugcuucggcaaguuccccaucuacaccauccccgacaagcuggggcccugguccccgaucgacauccaccaccugagcugccccaacaaccucgugguggaggacgagggcugcaccaaccuguccggguucagcuacauggagcugaaggucggcuacaucuccgccaucaaggugaacggguucacgugcaccggcguggucaccgaggcggagaccuacacgaacuucgugggcuacgugaccaccaccuucaagcgcaagcacuuccggcccacgcccgacgccugccgcgccgccuacaacuggaagauggccggggacccgcgguacgaggagagccuccacaaccccuaccccgacuaccacuggcugcgcaccgucaagaccaccaaggagucccuggugaucaucagccccuccgugagcgaccucgacccguacgacaagucccugcacagccgggucuuccccuccggcaagugcagcgggaucacgguguccagcaccuacugccccaccaaccacgacuacaccaucuggaugcccgagaacccgcgccugggcacguccugcgacaucuucaccaacagccgggggaagcgcgcguccaagggcagcaagaccugcggcuucguggacgagcgggggcucuacaagagccugaagggcgccugcaagcugaagcucugcgggguccugggccugcgccucauggacggcaccugggccgccauccagacguccgacgaggcgaaguggugcccgcccgaccagcuggugaacauccacgacuuccggagcgacgagaucgagcaccugguggucgaggagcucgugaagaagcgcgaggagugccuggacgcccuggaguccaucaugaccaccaagagcguguccuuccggcgccucagccaccuccggaagcugguccccggguucggcaaggccuacaccaucuucaacaagacgcucauggaggccgacgcccacuacaaguccgugcgcaccuggaacgagaucauccccagcaaggggugccugcgggugggcgggcgcugccacccccacgucaacggcguguucuucaacggcaucauccuggggcccgacggccacguccucauccccgagaugcaguccagccugcugcagcagcacauggagcuccuggaguccagcgugaucccgcugaugcacccccucgcggaccccuccaccguguucaaggacggggacgaggccgaggacuucgucgaggugcaccuccccgacgugcacaagcaggucagcggcguggaccuggggcugccguccuggggcaaguacgugcugaugagcgucggcgccaugaucgcccugaugcucaugauccugcugaccacgugcugccggaaggugaacggggccgagaccauccagcaccgccucggcgagaccgggcggaagguguccgucaccagccaguccggccgcgugaucagcagcugggaguccuacaagagcgggggcgagacgaagcuguga

SEQ ID NO: 94903 - RNA, 1575 nt, Artificial Sequence
  derived and/or modified CDS sequence (opt1) from glycoprotein__RABV__EU086133.1
augaucccccaggcccugcuguucgugccgcugcuggucuucagccucugcuucggcaaguuccccaucuacaccauccccgacaagcuggggcccugguccccgaucgacauccaccaccugagcugccccaacaaccucgugguggaggacgagggcugcaccaaccuguccggguucagcuacauggagcugaaggucggcuacaucuccgccaucaaggugaacggguucacgugcaccggcguggucaccgaggcggagaccuacacgaacuucgugggcuacgugaccaccaccuucaagcgcaagcacuuccggcccacgcccgacgccugccgcgccgccuacaacuggaagauggccggggacccgcgguacgaggagagccuccacaaccccuaccccgacuaccacuggcugcgcaccgucaagaccaccaaggagucccuggugaucaucagccccuccgugagcgaccucgacccguacgacaagucccugcacagccgggucuuccccuccggcaagugcagcgggaucacgguguccagcaccuacugccccaccaaccacgacuacaccaucuggaugcccgagaacccgcgccugggcacguccugcgacaucuucaccaacagccgggggaagcgcgcguccaagggcagcaagaccugcggcuucguggacgagcgggggcucuacaagagccugaagggcgccugcaagcugaagcucugcgggguccugggccugcgccucauggacggcaccugggccgccauccagacguccgacgaggcgaaguggugcccgcccgaccagcuggugaacauccacgacuuccggagcgacgagaucgagcaccugguggucgaggagcucgugaagaagcgcgaggagugccuggacgcccuggaguccaucaugaccaccaagagcguguccuuccggcgccucagccaccuccggaagcugguccccggguucggcaaggccuacaccaucuucaacaagacgcucauggaggccgacgcccacuacaaguccgugcgcaccuggaacgagaucauccccagcaaggggugccugcgggugggcgggcgcugccacccccacgucaacggcguguucuucaacggcaucauccuggggcccgacggccacguccucauccccgagaugcaguccagccugcugcagcagcacauggagcuccuggaguccagcgugaucccgcugaugcacccccucgcggaccccuccaccguguucaaggacggggacgaggccgaggacuucgucgaggugcaccuccccgacgugcacaagcaggucagcggcguggaccuggggcugccguccuggggcaaguacgugcugaugagcgucggcgccaugaucgcccugaugcucaugaucuuccugaccacgugcugccggaaggugaacggggccgagaccauccagcgccggcugggcgagaccgggcgcaagguguccgucaccagccaguccggccgcgugaucagcagcugggaguccuacaagagcgggggcgagacgaagcucuga

SEQ ID NO: 94904 - RNA, 1575 nt, Artificial Sequence
  derived and/or modified CDS sequence (opt1) from glycoprotein__RABV__EU086134.1
augaucccccaggcccugcuguucgugccgcugcuggucuucagccucugcuucggcaaguuccccaucuacaccauccccgacaagcuggggcccugguccccgaucgacauccaccaccugagcugccccaacaaccucgugguggaggacgagggcugcaccaaccuguccggguucagcuacauggagcugaaggucggcuacaucuccgccaucaaggugaacggguucacgugcaccggcguggucaccgaggcggagaccuacacgaacuucgugggcuacgugaccaccaccuucaagcgcaagcacuuccggcccacgcccgacgccugccgcgccgccuacaacuggaagauggccggggacccgcgguacgaggagagccuccacaaccccuaccccgacuaccacuggcugcgcaccgucaagaccaccaaggagucccuggugaucaucagccccuccgugagcgaccucgacccguacgacaagucccugcacagccgggucuuccccuccggcaagugcagcgggaucacgguguccagcaccuacugccccaccaaccacgacuacaccaucuggaugcccgagaacccgcgccugggcacguccugcgacaucuucaccaacagccgggggaagcgcgcguccaagggcagcaagaccugcggcuucguggacgagcgggggcucuacaagagccugaagggcgccugcaagcugaagcucugcgggguccugggccugcgccucauggacggcaccugggccgccauccagacguccgacgaggcgaaguggugcccgcccgaccagcuggugaacauccacgacuuccggagcgacgagaucgagcaccugguggucgaggagcucgugaagaagcgcgaggagugccuggacgcccuggaguccaucaugaccaccaagagcguguccuuccggcgccucagccaccuccggaagcugguccccggguucggcaaggccuacaccaucuucaacaagacgcucauggaggccgacgcccacuacaaguccgugcgcaccuggaacgagaucauccccagcaaggggugccugcgggugggcgggcgcugccacccccacgucaacggcguguucuucaacggcaucauccuggggcccgacggccacguccucauccccgagaugcaguccagccugcugcagcagcacauggagcuccuggaguccagcgugaucccgcugaugcacccccucgcggaccccuccaccguguucaaggacggggacgaggccgaggacuucgucgaggugcaccuccccgacgugcacaagcaggucagcggcguggaccuggggcugccguccuggggcaaguacgugcugaugagcgucggcgccaugaucgcccugaugcucaugaucuuccugaccacgugcugccggaaggugaaccgcgccgagaccauccagcggcgccugggggagaccggccgcaagguguccgucaccagccagacggggcgggugaucuccagcugggagagcuacaaguccggcggggagaccaagcucuga

SEQ ID NO: 94905 - RNA, 1575 nt, Artificial Sequence
  derived and/or modified CDS sequence (opt1) from glycoprotein__RABV__EU086135.1
augaucccccaggugcugcuguucgucccgcugcugguguucagcuccugcuucggcaaguuccccaucuacaccauccccgacaagcucgggcccuggagcccgaucgacauccaccaccuguccugccccaacaaccugguggucgaggacgagggcagcaccaaccucuccggguuccccuacauggagcugaaggugggcuacaucagcgccaucaaggugaacggguucacgugcaccggcgucgugaccgaggccgagcccuacaccaacuucgugggcuacgucacgaccaccuucaagcgcaagcacuuccggccgaugcccgacgcgugccgcgccgccuacaacuggaagauggccggggacccccgguacgaggagucccugcacaaccccuacccggacuaccacuggcuccgcaccgugaagacgaccaaggagagccuggugaucaucucccccagcgucgccgaccuggaccccuacgacaagucccuccacagccggguguuccccggcgggaagugcuccggcaucaccgugagcuccacgugcugcagcaccaaccacgacuacaccaucuggaugccggagaacccccgccuggggaccuccugcgacaucuucaccaacagccggggcaagcgcgcguccaagggcgggaagacgugcggcugcgucgacgagcgggggcuguacaagagccucaagcgcgccugcaagcugaagcugugcggcgugcucggccugcggcugauggacgggaccuggguggccauccagaccagcgacgagaucaaguggugcucccccgaccagcucgucaaccugcacgacuuccacagcgacgagaucgagcaccuggugguggaggagcucgucaagaagcgcgaggagugccuggacgcccuggagaccaucaugacgaccaaguccgugagcuuccggcgccucucccaccuccggaagcuggugcccggcuucgggaaggcguacaccaucuucaacaagacccucauggaggccgacgcccacuacaagagcauccgcacguggaacgagaucaucccguccaagggcugccugcgggucgggggccgcugccacccccacgugaacggcgucuucuucaacgggaucauccugggccccgacgggcacgugcucauccccgagaugcagagcucccugcugcaccagcacauggagcuccuggagagcuccgugaucccgcugaugcacccccucgccgaccccagcaccgucuucaaggacggcgacgaggccgaggacuucguggaggugcaccuccccgacguccacaagcagaucuccgggguggaccugggccugccgaacuggggcaaguacgugcugaucagcgcgggggcccugaccgcccucaugcugaccaucuuccugaugacgugcugccggaagaccaaccgcgccgaguccauccagcacagccccggcgagaccgggcggaaggucuccgugaccagccacaacggccgcgugaucuccagcugggagagcuacaaguccgggagcgagacgaagcucuga

SEQ ID NO: 94906 - RNA, 1575 nt, Artificial Sequence
  derived and/or modified CDS sequence (opt1) from glycoprotein__RABV__EU086136.1
augaucccccaggugcuccuguucgucccgcugcugguguucagcuccugcuucggcaaguuccccaucuacaccauccccgacaagcucgggcccuggagcccgaucgacauccaccaccuguccugccccaacaaccugguggucgaggacgagggcugcaccaaccucagcggguucuccuacauggagcugaaggugggcuacaucagcgccaucaaggugaacggguucacgugcaccggcgucgugaccgaggccgagaccuacacgaacuucgugggcuacgucaccaccaccuucaagcgcaagcacuuccggcccaugcccgacgcgugccgcgccgccuacaacuggaagauggccggggacccgcgguacgaggagucccugcacaaccccuaccccgacuaccacuggcuccgcacggugaagaccaccaaggagagccuggugaucaucucccccagcgucgccgaccuggacccguacgacaagucccuccacagccggguguuccccggcgggaagugcuccggcaucaccgugagcuccacgugcugcagcaccaaccacgacuacaccaucuggaugcccgagaacccccgccuggggaccuccugcgacaucuucacgaacagccggggcaagcgcgcguccaagggcgggaagaccugcggcuucgucgacgagcggggguucgucaagagccugaagggcgccugcaagcucaagcugugcggcgugcuggggcuccgccugauggacggcaccuggguggccauccagaccagcgacgagaucaaguggugcuccccggaccagcuggugaaccuccacgacuuccacagcgacgagaucgagcaccugguggucgaggagcuggugaagaagcgggaggagugccucgacgcccuggagacguucaugaccaccaaguccgugagcuuccgccggcugucccuccugcgcaagcugguccccggguucggcaaggcguucaccaucuucaacaagacgcucauggaggccgacgcccacuucaagagcauccugaccuggaacgagaucuuccccuacaaguggugcuuccggcugggggagauccuccacccccacgugaaccgcgucuucuucaacggcaucauccugggcccggacgggcacgugcugauccccgagaugcaguccagccuccugcaccagcacauggagcugcucgaguccagcgugaucccccugaugcacccccuggccgacccguccaccgucuucaaggacggcgacgaggccgaggacuucguggacgugcaccuccccgacguccacaagcagaucagcgggguggaccugggccugcccaacugggggaaguacgugcucaucuccgcgggcgcccugaccgcccugaugcucaugaucuuccugaugacgugcugccggaaggccaaccgcgccgagagcauccagcacaaccccggcgagaccgggcggaaggucuccgugaccagccacaacggccgcgugaucuccagcugggaguccuacaagagcgggggcgagaccaagcuguga

SEQ ID NO: 94907 - RNA, 1575 nt, Artificial Sequence
  derived and/or modified CDS sequence (opt1) from glycoprotein__RABV__EU086137.1
augaucccccaggugcugcuguucgucccgcugcugguguucagcuccugcuucggcaaguuccccaucuacaccauccccgacaagcucgggcccuggagcccgaucgacauccaccaccuguccugccccaacaaccugguggucgaggacgagggcugcaccaaccucagcggguucuccuacauggagcugaaggugggcuacaucagcgccaucaaggugaacggguucacgugcaccggcgucgugaccgaggccgagaccuacacgaacuucgugggcuacgucaccaccaccuucaagcgcaagcacuuccggcccaugcccgacgcgugccgcgccgccuacaacuggaagauggccggggacccgcgguacgaggagucccugcacaaccccuaccccgacuaccacuggcuccgcacggugaagaccaccaaggagagccuggugaucaucucccccagcgucgccgaccuggacccguacgacaagucccuccacagccggguguuccccggcgggaagugcuccggcaucaccgugagcuccacgugcugcagcaccaaccacgacuacaccaucuggaugcccgagaacccccgccuggggaccuccugcgacaucuucacgaacagccggggcaagcgcgcguccaagggcgggaagaccugcggcuucgucgacgagcgggggcuguacaagagccucaagggcgccugcaagcugaagcugugcggcgugcucgggcugcgccugauggacggcaccuggguggccauccagaccagcgacgagaucaaguggugcuccccggaccagcucgucaaccugcacgacuuccacagcgacgagaucgagcaccuguucguggaggagcucgugaagaagcgggaggagugccuggacgcccuggagacgaucaugaccaccaaguccgucagcuucaagcgccucucccaccugaccaaccuggugcccggguucggcaaggcguacacgaucuucaacaagacccucauggaggccgacgcccacuacaagagcauccccaccuggaacgagaucauccccuccaaggggugccugaaguucggcggccggugccacccgcccgugaacggggucuucuucaacggcaucauccuggggcccgacggccacgugcucauccccgagaugcagagcucccugcugcaccagcacauggagcuccuggagagcuccgucaucccgcugaugcacccccucgccgaccccagcaccguguucaaggacggggacgaggccgaggacuucguggacguccaccuccccgacgugcacaagcagaucuccggcguggaccugggccucccgaacugggggaaguacguccugaucagcgcgggcgcccugacggcccucaugcugaugaucuuccugaugaccugcugccgcaaggccaaccgggccgaguccauccagcacaaccccggggagaccggccgcaaggugagcgugaccucccacaacgggcgggucaucagcuccugggagagcuacaagagcggcggcgagacgaagcucuga

SEQ ID NO: 94908 - RNA, 1575 nt, Artificial Sequence
  derived and/or modified CDS sequence (opt1) from glycoprotein__RABV__EU086138.1
augaucccccaggugcugcuguucgucccgcugcugguguucagcuccugcuucggcaaguuccccaucuacaccauccccgacaagcucgggcccuggagcccgaucgacauccaccaccuguccugccccaacaaccugguggucgaggacgagggcugcaccaaccucagcggguucuccuacauggagcugaaggugggcuacaucagcgccaucaaggugaacggguucacgugcaccggcgucgugaccgaggccgagaccuacacgaacuucgugggcuacgucaccaccaccuucaagcgcaagcacuuccggcccaugcccgacgcgugccgcgccgccuacaacuggaagauggccggggacccgcgguacgaggagucccugcacaaccccuaccccgacuaccacuggcuccgcacggugaagaccaccaaggagagccuggugaucaucucccccagcgucgccgaccuggacccguacgacaagucccuccacagccggguguuccccggcgggaagugcuccggcaucaccgugagcuccacguggugcagcaccaaccacgacuacaccaucuggaugcccgagaacccccgccuggggaccuccugcgacaucuucacgaacagccggggcaagcgcgcguccaagggcgggaagaccugcggcuucgucgacgagcgggggcuguacaagagccucaagggcgccugcaagcugaagcugugcggcgugcucgggcugcgccugauggacggcaccuggguggccauccagaccagcgacgagaucaaguggugcuccccggaccagcucgucaaccugcacgacuuccacagcgacgagaucgagcaccuggugguggaggagcucgucaagaagcgggaggagugccuggacgcccuggagacgaucaugaccaccaaguccgugagcuuccgccggcucucccaccuccgcaagcuggugcccggguucggcaaggcguacaccaucuucaacaagacgcucauggaggccgacgcccacuacaagagcauccggaccuggaacgagaucauccccuccaaggggugccugcgcgucggcggccggugccacccccuggugaacggggucagcuucaacggcaucauccucgggccggacggccacgugcugauccccgagaugcaguccagccugcuccaccagcacauggagcugcuggaguccagcgugaucccccucaugcacccccuggccgacccguccaccgucuucaaggacggggacgaggccgaggacuucguggaggugcaccuccccgacguccacaagcagaucagcggcguggaccugggccugcccaacugggggaaguacgugcugaucuccgcgggcgcccucaccgcccugaugcugacgaucuuccucaugaugugcugccgcaagaccaaccgggccgagagcauccagcacucccccggggagaucggccgcaaggucagcgugaccucccacaacgggcgggugaucagcagcugggaguccuacaagagcggcuccgagaccaagcuguga

SEQ ID NO: 94909 - RNA, 1575 nt, Artificial Sequence
  derived and/or modified CDS sequence (opt1) from glycoprotein__RABV__EU086139.1
augaucccccaggugcugcuguucgucccgcugcugguguucagcuccugcuucggcaaguuccccaucuacaccauccccgacaagcucgggcccuggagcccgaucgacauccaccaccuguccugccccaacaaccugguggucgaggacgagggcugcaccaaccucagcggguucuccuacauggagcugaaggugggcuacaucagcgccaucaaggugaacggguucacgugcaccggcgucgugaccgaggccgagaccuacacgaacuucgugggcuacgucaccaccaccuucaagcgcaagcacuuccggcccaugcccgacgcgugccgcgccgccuacaacuggaagauggccggggacccgcgguacgaggagucccugcacaaccccuaccccgacuaccacuggcuccgcacggugaagaccaccaaggagagccuggugaucaucucccccagcgucgccgaccuggacccguacgacaacucccuccacagccggguguuccccggcgggaagugcuccggcaucaccgugagcuccacgugcugcagcaccaaccacgacuacaccaucuggaugcccgagaacccccgccuggggaccuccugcgacaucuucacgaacagccggggcaagcgcgcguccaagggcgggaagaccugcggcuucgucgacgagcgggggcuguacaagagccucaagggcgccugcaagcugaagcugugcggcgugcucgggcugcgccugauggacggcaccuggguggccauccagaccagcgacgagaucaaguggugcuccccggaccagcucgucaaccugcacgacuuccacagcgacgagaucgagcaccuggugguggaggagcucgucaagaagcgggaggagugccuggacgcccuggagacgaucaugaccaccaaguccgugagcuuccgccggcucucccaccuccgcaagcuggugcccggguucggcaaggcguacaccaucuucaacaagacgcucauggaggccgacgcccacuacaagagcauccggaccuggaacgagaucauccccuccaaggggugccugcgcgucggcggccggugccacccccacgugaacggggucuucuucaacggcaucauccuggggccggacggccacgugcucauccccgagaugcagagcucccugcugcaccagcacauggagcuccuggagagcuccgugaucccccugaugcacccccucgccgacccgagcaccgucuucaaggacggggacgaggccgaggacuucguggaggugcaccuccccgacguccacaagcagaucuccggcguggaccugggccugcccaacugggggaaguacgugcugaucagcgcgggcgcccugaccgcccucaugcugacgaucuuccugaugaccugcugccgcaagaccaaccgggccgaguccauccagcacagccccggggagaucggccgcaaggucuccgugaccagccacaacgggcgggugaucuccagcugggagagcuacaaguccggcagcgagacgaagcucuga

SEQ ID NO: 94910 - RNA, 1575 nt, Artificial Sequence
  derived and/or modified CDS sequence (opt1) from glycoprotein__RABV__EU086140.1
augaucccccaggugcugcuguucgucccgcugcugguguucagcuccugcuucggcaaguuccccaucuacaccauccccgacaagcucgggcccuggagcccgaucgacauccaccaccuguccugccccaacaaccugguggucgaggacgagggcugcaccaaccucagcggguucuccuacauggagcugaaggugggcuacaucagcgccaucaaggugaacggguucacgugcaccggcgucgugaccgaggccgagaccuacacgaacuucgugggcuacgucaccaccaccuucaagcgcaagcacuuccggcccaugcccgacgcgugccgcgccgccuacaacuggaagauggccggggacccgcgguacgaggagucccugcacaaccccuaccccgacuaccacuggcuccgcacggugaagaccagcaaggagucccuggugaucaucagccccuccgucgccgaccuggacccguacgacaagagccuccacucccggguguuccccggcgggaagugcagcggcaucaccguguccagcacgugcugcuccaccaaccacgacuacaccaucuggaugcccgagaacccccgccuggggaccagcugcgacaucuucaccaacucccggggcaagcgcgcgagcaagggcgggaagacgugcggcuucgucgacgagcgggggcuguacaagagccucaagggcgccugcaagcugaagcugugcggcgugcucgggcugcgccugauggacggcaccuggguggccauccagaccuccgacgagaucaaguggugcagcccggaccagcucgucaaccugcacgacuuccacuccgacgagaucgagcaccuggugguggaggagcucgucaagaagcgggaggagugccuggacgcccuggagaccaucaugacgaccaccagcguguccuuccgccggcucagccaccuccgcaagcuggugcccggguucggccgggcguucuccaucuucaacaagacccucgucgaggccgacgcccuguuccagagcuuccgcacguggaacgagaucauccccuccaaggggugccugcgggugggcggccgcugccacccccacgucaacgggguguucuucaacggcaucauccucgggccggacggccacgugcugauccccgagaugcagagcucccugcuccaccagcacauggagcugcuggagagcuccgucaucccccucaugcacccccuggccgacccgagcaccguguucaaggacggggacgaggccgaggacuucguggagguccaccuccccgacgugcacaagcagaucuccggcguggaccugggccugcccaacugggggaaguacguccugaucagcgcgggcgcccucaccgcccugaugcugaugaucuuccucaugaccugcugccggaagacgaaccgcgccgaguccauccagcacagccccggggagaccggccggaagguguccgugaccagccacaacgggcgcgucaucagcuccugggagagcuacaaguccggcggcgagaccaagcuguga

SEQ ID NO: 94911 - RNA, 1575 nt, Artificial Sequence
  derived and/or modified CDS sequence (opt1) from glycoprotein__RABV__EU086141.1
augaucccccaggugcuccuguucgucccgcugcugguguucagcuccugccucggcaaguuccccaucuacaccauccccgacaagcuggggcccuggagcccgaucgacauccaccaccuguccugccccaacaaccucguggucgaggacgagggcugcaccaaccugagcggguucuccuacauggagcugaaggugggcuacaucagcgccaucaaggugaacggguucacgugcaccggcgucgugaccgaggccgagaccuacacgaacuucgugggcuacgucaccaccaccuucaagcgcaagcacuuccggcccaugcucgacgcgugccgcgccgccuacaacuggaagauggccggggacccccgguacgaggagucccugcacaacccguaccccgacuaccacuggcugcgcacggugaagaccagcaaggagucccucgugaucaucagccccuccgucgccgaccuggaccccuacgacaagagccugcacucccggguguucccgggcgggaagugcagcggcaucaccguguccagcacgugcugcuccaccaaccacgacuacaccaucuggaugcccgagaacccccgccucgggaccagcugcgacaucuucaccaacucccggggcaagcgcgcgagcaagggcgggaagacgugcggcuucgucgacgagcgggggcuguacaagagccugaagggcgccugcaagcucaagcugugcggcgugcuggggcuccgccugauggacggcaccuggguggccauccagaccuccgacgagaucaaguggugcagccccgaccagcuggucaaccuccacgacuuccacuccgacgagaucgagcaccuggugguggaggagcuggucaagaagcgggaggagugccucgacgcccuggagaccaucaugacgaccaagagcguguccuuccgccggcugagccaccuccgcaagcuggugccgggguucggcaaggcguacaccaucuucaacaagacccugauggaggccgacgcccacuacaaguccauccggacguggaacgagaucauccccagcaaggggugccuccgcgucggcggccggugccacccccacgugaacgaggucuucuucaacgggaucauccugggccccgacgggcacgugcugaucccggagaugcaguccagccuccugcaccagcacauggagcugcucgaguccagcgugaucccccugaugcacccccugaccgaccccuccaccgucuucaaggacggcgacgaggccgaggacuucguggaggugcaccucccggacguccacaagcagaucagcgggggcgaccugggccugcccaacugggggaaguacgugcucaucuccgccggcgcgcugaccgccagcaugcugaugaucuuccucaugacgugcugccgcaagaccaaccgggccgaguccauccagcacagccccggggagaccggcgaggagguguccgggaccagccagacgggccgcgucaucagcuccugggagagcuacaaguccggcggggagaccaagcuguga

SEQ ID NO: 94912 - RNA, 1575 nt, Artificial Sequence
  derived and/or modified CDS sequence (opt1) from glycoprotein__RABV__EU086142.1
augaucccccaggugcugcuguucgucccgcugcugguguucagcuccugccucggcaaguuccccaucuacaccauccccgacaagcuggggcccuggagcccgaucgacauccaccaccuguccugccccaacaaccucguggucgaggacgagggcugcaccaaccugagcggguucuccuacauggagcugaaggugggcuacaucagcgccaucaaggugaacggguucacgugcaccggcgucgugaccgaggccgagaccuacacgaacuucgugggcuacgucaccaccaccuucaagcgcaagcacuuccggcccaugcucgacgcgugccgcgccgccuacaacuggaagauggccggggacccccgguacgaggagucccugcacaacccguaccccgacuaccacugguuccgcacggugaagaccagcaaggagucccuggugaucaucagccccuccgucgccgaccucgaccccuacgacaagagccugcacucccggguguucccgggcgggaagugcagcggcaucaccguguccagcacgugcugcuccaccaaccacgacuacaccaucuggaugcccgagaacccccgccuggggaccagcugcgacaucuucaccaacucccggggcaagcgcgcgagcaagggcgggaagacgugcggcuucgucgacgagcgggggcucuacaagagccugaagggcgccugcaagcugaagcucugcggcgugcuggggcugcgccucauggacggcaccuggguggccauccagaccuccgacgagaucaaguggugcagccccgaccagcuggucaaccugcacgacuuccacuccgacgagaucgagcaccucgugguggaggagcuggucaagaagcgggaggagugccuggacgcccucgagaccaucaugacgaccaagagcguguccuuccgccggcugagccaccuccgcaagcucgugccgggguucggcaaggcguacaccaucuucaacaagacccugauggaggccgacgcccacuacaaguccauccggacguggaacgagaucauccccagcaaggggugccugcgcgucggcggccggugccacccccacgugaacggggucuucuucaacggcaucauccucgggcccgacggccacgugcugaucccggagaugcaguccugccugcuccaccagcacauggagcugcuggagagcuccuucaucccccucaugcugccccuggccgaccccagcaccguguucaaggacggggacgaggccgaggacuucgucgaggugcaccucccggacgugcacaagcagaucuccggcggcgaccuggggcugcccaacuggggcaaguacguccucaucagcgcgggggcccugaccgccuccaugcugaugaucuuccucaugaccugcugccgcaagacgaaccgggccgagagcauccagcacucccccggcgagaccgggcgcaaggugagcgugaccucccacaacggccgggucaucagcagcugggaguccuacaagagcggcggggagaccaagcuguga

SEQ ID NO: 94913 - RNA, 1575 nt, Artificial Sequence
  derived and/or modified CDS sequence (opt1) from glycoprotein__RABV__EU086143.1
augaucccccaggugcugcuguucgucccgcugcugguguucagcuccugcuucggcaaguuccccaucuacaccauccccgacaagcucgggcccuggagcccgaucgacauccaccaccuguccugccccaacaaccugguggucgaggacgagggcugcaccaaccucagcggguucuccuacauggagcugaaggugggcuacaucagcgccaucaaggugaacggguucacgugcaccggcgucgugaccgaggccgagaccuacacgaacuucgugggcuacgucaccaccaccuucaagcgcaagcacuuccggcccaugcccgacgcgugccgcgccgccuacaacuggaagauggccggggacccgcgguacgaggagucccugcacaaccccuaccccgacuaccacuggcuccgcacggugaagaccagcaaggagucccuggugaucaucagccccuccgucgccgaccuggacccguacgacaagagccuccacucccggguguuccccggcgggaagugcagcggcaucaccguguccagcacgugcugcuccaccaaccacgacuacaccaucuggaugcccgagaacccccgccuggggaccagcugcgacaucuucaccaacucccggggcaagcgcgcgagcaagggcgggaagacgugcggcuucgucgacgagcgggggcuguacaagagccucaagggcgccugcaagcugaagcugugcggcgugcucgggcugcgccugauggacggcaccuggguggccauccagaccuccgacgagaucaaguggugcagcccggaccagcucgucaaccugcacgacuuccacuccgacgagaucgagcaccuggugguggaggagcucgucaagaagcgggaggagugccuggacgcccuggagaccaucaugacgaccaagagcguguccuuccgccggcucagccaccuccgcaagcuggugcccggguucggcaaggcguacaccaucuucaacaagacccucauggaggccgacgcccacuacaaguccauccggacguggaacgagaucauccccagcaaggggugccugcgcgucggcggccggugccacccccacgugaacggggucuucuucaacggcaucauccuggggccggacggccacgugcucauccccgagaugcaguccagccugcugcaccagcacauggagcuccuggaguccagcgugaucccccugaugcacccccucgccgacccguccaccgucuucaaggacggggacgaggccgaggacuucguggaggugcaccuccccgacguccacaagcagaucagcggcguggaccugggccugcccaacugggggaaguacgugcugaucuccgcgggcgcccugaccgcccucaugcugaugaucuuccugaugaccugcugccgccggcucaaccgcgccgagagcauccagcacucccccggggagacgggccggaaggucagcgugaccucccacagcgggcgcgugaucagcuccugggagagcuacaaguccggcggcgagaccaagcuguga

SEQ ID NO: 94914 - RNA, 1575 nt, Artificial Sequence; identical to SEQ ID NO: 94551
  derived and/or modified CDS sequence (opt1) from glycoprotein__RABV__EU086144.1

SEQ ID NO: 94915 - RNA, 1575 nt, Artificial Sequence
  derived and/or modified CDS sequence (opt1) from glycoprotein__RABV__EU086145.1
augaucccccaggcccugcuguucgugccgcugcuggucuucagccucugcuucggcaaguuccccaucuacaccauccccgacaagcuggggcccugguccccgaucgacauccaccaccugagcugccccaacaaccucgugguggaggacgagggcugcaccaaccuguccggguucagcuacauggagcugaaggucggcuacaucuccgccaucaaggugaacggguucacgugcaccggcguggucaccgaggcggagaccuacacgaacuucgugggcuacgugaccaccaccuucaagcgcaagcacuuccggcccacgcccgacgccugccgcgccgccuacaacuggaagauggccggggacccgcgguacgaggagagccuccacaaccccuaccccgacuaccacuggcugcgcaccgucaagaccaccaaggagucccuggugaucaucagccccuccguggcggaccucgacccguacgacaagagccugcacucccgggucuuccccagcggcaagugcuccgggaucacggugagcuccaccuacugcagcaccaaccacgacuacaccaucuggaugcccgagaacccccgccugggcacguccugcgacaucuucgugaacagccgggggaagcgcgccuccaagggcagcaagaccugcggcuucgucgacgagcgggggcucuacaagagccugaagggcgccugcaagcugaagcucugcggggugcugggccugcgccucauggacggcaccuggguggccauccagaccuccgacgagacgaaguggugcccgcccgaccagcuggucaaccugcacgacuuccggagcgacgagaucgagcaccucgugguggaggagcuggucaagaagcgcgaggagugccuggacgcgcucgaguccaucaugaccaccaagagcguguccuuccggcgccugagccaccuccggaagcucgugcccggguucggcaaggccuacaccaucuucaacaagacgcugauggaggccgacgcccacuacaaguccguccgcaccuggaacgagaucauccccagcaaggggugccugcgggugggcgggcgcugccacccgcacgucaacggcguguucuucaacggcaucauccucgggcccgacggccacgugcugauccccgagaugcaguccagccugcuccagcagcacauggagcugcuggaguccagcgucaucccccucaugcacccgcuggccgaccccuccaccaucuucaaggacggguacgaggcggaggacuucguggaggugcaccuccccgacguccacaagcaggucagcggcguggaccuggggcugcccaacuggggcaaguacgugcugauguccgccggcgcccucaccgcccugaugcugaugaucuuccucaugacgugcugccggaagaccgaccgcaccgggagcacccaccacuccccgggcgagacggggcggaaggugagcgugaccucccagaacggccgcgucaucgccagcugggagagcuacaaguccgggggcgagaccaagcuguga

SEQ ID NO: 94916 - RNA, 1575 nt, Artificial Sequence; identical to SEQ ID NO: 94867
  derived and/or modified CDS sequence (opt1) from glycoprotein__RABV__EU086146.1

SEQ ID NO: 94917 - RNA, 1575 nt, Artificial Sequence; identical to SEQ ID NO: 94869
  derived and/or modified CDS sequence (opt1) from glycoprotein__RABV__EU086147.1

SEQ ID NO: 94918 - RNA, 1575 nt, Artificial Sequence
  derived and/or modified CDS sequence (opt1) from glycoprotein__RABV__EU086148.1
augaucccccaggugcugcuguucgucccgcugcugguguucagcuccugcuucggcaaguuccccaucuacaccauccccgacaagcucgggcccuggagcccgaucgacauccaccaccuguccugccccaacaaccugguggucgaggacgagggcugcaccaaccucagcggguucuccuacauggagcugaaggugggcuacaucagcgccaucaaggugaacggguucacgugcaccggcgucgugaccgaggccgagaccuacacgaacuucgugggcuacgucaccaccaccuucaagcgcaagcacuuccggcccaugcccgacgcgugccgcgccgccuacaacuggaagauggccggggacccgcgguacgaggagucccugcacaaccccuaccccgacuaccacuggcuccgcacggugaagaccaccaaggagagccuggugaucaucucccccagcgucgccgaccuggacccguacgacaagucccuccacagccggguguuccccggcgggaagugcuccggcaucaccgugagcuccacgugcugcagcaccaaccacgacuacaccaucuggaugcccgagaacccccgccuggggaccuccugcgacaucuucacgaacagccggggcaagcgcgcguccaagggcgggaagaccugcggcuucgucgacgagcgggggcuguacaagagccucaagggcgccugcaagcugaagcugugcggcgugcucgggcugcgccugauggacggcaccuggguggccauccagaccagcgacgagaucaaguggugcuccccggaccagcucgucaaccugcacgacuuccacagcgacgagaucgagcaccuggugguggaggagcucgucaagaagcgggaggagugccuggacgcccuggagacgaucaugaccaccaaguccgugagcuuccgccggcucucccaccuccgcaagcuggugcccggguucggcaaggcguacaccaucuucaacaagacgcucauggaggccgacgcccacuacaagagcauccggaccuggaacgagaucauccccuccaaggggugccugcgcgucggcggccggugccacccccacgugaacggggucuucuucaacggcaucauccuggggccggacggccacgugcucauccccgagaugcagagcugccugcugcaccagcacauggagcuccuggaguccagcgugaucccccugaugcacccccucgccgacccguccaccgucuucaaggacggggacgaggccgaggacuucguggaggugcaccuccccgacguccacaagcagaucagcggcguggaccugggccugcccaacugggggaaguacgugcugaucuccgcgggcgcccugaccgcccucaugagcaugaucuuccugaugacgugcugccgcaagaccaaccgggccgaguccauccagcacagccccggggagaccggccgcaaggucuccgugaccagccacaacgggcgggugaucuccagcugggagagcuacaaguccggcggcgagacgaagcuguga

SEQ ID NO: 94919 - RNA, 1575 nt, Artificial Sequence
  derived and/or modified CDS sequence (opt1) from glycoprotein__RABV__EU086149.1
augaucccccaggugcugcuguucgucccgcugcuggugagcuccagcugcuucggcaaguuccccaucuacaccauccccgacaagcucgggcccugguccccgaucgacauccaccaccugagcugccccaacaaccugguggucgaggacgagggcugcaccaaccucuccggguucagcuacauggagcugaaggugggcuacaucuccgccaucaaggugaacggguucacgugcaccggcgucgugaccgaggccgagaccuacacgaacuucgugggcuacgucaccaccaccuucaagcgcaagcacuuccggcccaugcccgacgcgugccgcgccgccuacaacuggaagauggccggggacccgcgguacgaggagagccugcacaaccccuaccccgacuaccacuggcuccgcacggugaagaccaccaaggagucccuggugaucaucagccccuccgucgccgaccuggacccguacgacaagagccuccacucccggguguuccccggcgggaagugcagcggcaucaccguguccagcacgugcugcuccaccaaccacgacuacaccaucuggaugcccgagaacccccgccuggggaccagcugcgacaucuucacgaacucccggggcaagcgcgcgagcaagggcgggaagaccugcggcuucgucgacgagcgggggcuguacaagagccucaagggcgccugcaagcugaagcugugcggcgugcucgggcugcgccugauggacggcaccuggguggccauccagaccuccgacgagaucaaguggugcagcccggaccagcucgucaaccugcacgacuuccacuccgacgagaucgagcaccuggugguggaggagcucgucaagaagcgggaggagugccuggacgcccuggagacgaucaugaccaccaagagcguguccuuccgccggcucagccaccuccgcaagcuggugcccggguucggcaaggcguacaccaucuucaacaagacgcucauggaggccgacgcccacuacaaguccauccggaccuggaacgagaucauccccagcaaggggugccugcgcgucggcggccggugccacccccacgugaacggggucuucuucaacggcaucauccuggggccggacggccacgugcucauccccgagaugcaguccagccugcugcaccagcacauggagcuccuggaguccagcgugaucccccugaugcacccccucgccgacccguccaccgucuucaaggacggggacgaggccgaggacuucguggaggugcaccuccccgacguccacaagcagaucagcggcguggaccugggccugcccaacugggggaaguacgugcugaucuccgcgggcgcccugaccgcccucaugagcaugaucuuccugaugacgugcugccgcaagaccaaccgggccgaguccauccagcacagccccggggagaccggccgcaaggucuccgugaccagccacaacgggcgggugaucagcuccugggagagcuacaaguccggcggcgagacgaagcuguga

SEQ ID NO: 94920 - RNA, 1575 nt, Artificial Sequence
  derived and/or modified CDS sequence (opt1) from glycoprotein__RABV__EU086150.1
augauccuccaggugcugcuguucgucccccuccagguguucagcuccugcuucggcgaguucccgaucuacaccauccccgacaagcuggggcccuggagccccaucgacauccaccaccuguccugcccgaacaaccugguggucaaggacgagggcugcaccaaccucagcggguucuccuacauggagcugaaggugggcuacaucagcgccaucaaggugaacggguucacgugcaccggcgucgugaccgaggccgagaccuacacgaacuucgugggcuacgucaccaccaccuucaagcgcaagcacuuccggcccaugcccgacgcgugccgcgccgccuacaacuggaagauggccggggacccccgguacgaggagucccugcacaacccguaccccgacuaccacuggcuccgcacggugaagaccaccaaggagagccuggugaucaucucccccagcgucgccgaccuggaccccuacgacaagucccuccacagccggguguucccgggcgggaagugcuccggcaucaccgugagcuccacgugcugcagcaccaaccacgacuacaccaucuggaugcccgagaacccccgccuggggaccuccugcgacaucuucacgaacagccggggcaagcgcgcguccaagggcgggaagaccugcggcuucgucgacgagcgggggcuguacaagagccucaagggcgccugcaagcugaagcugugcggcgugcucgggcugcgccugauggacggcaccuggguggccauccagaccagcgacgagaucaaguggugcccgcccgaccagcucgucaaccugcacgacuuccacuccgacgagaucgagcaccuggugguggaggagcucgucaagaagcgggaggagugccuggacgcccuggagacgaucaugaccaccaagagcguguccuuccgccggcucagccaccuccgcaagcuggugcccggguucggcaaggcguacaccaucuucaacaagacgcugauggaggccgacgcccacuacaaguccauccggaccuggaacgagaucauccccagcaaggggugccugcgcgucggcggccggugccacccccacgugaacggggucuucuucaacggcaucauccuggggccggacggccacgugcucauccccgagaugcaguccagccugcugcaccagcacauggagcuccuggaguccagcgugaucccccugaugcacccccucgccgacccguccaccgucuucaaggacggggacgaggccgaggacuucguggaggugcaccuccccgacguccacaagcagaucagcggcguggaccugggccugcccaacugggggaaguacgugcuggucuccgcgggcgcccugaccgcccucaugcugaugaucuuccugaugacgugcugccgcaagaccaaccgggccgagagcauccagcacucccccggggagaccggccgcaaggugagcgugaccucccacaacgggcgggucaucagcuccugggagagcuacaagagcggcggcgagacgaagcucuga

SEQ ID NO: 94921 - RNA, 1575 nt, Artificial Sequence
  derived and/or modified CDS sequence (opt1) from glycoprotein__RABV__EU086151.1
augaucccccaggcccuccuguucgugccgcugcuggucuucagccucugcuucggcaaguuccccaucuacaccauccccgacaagcuggggcccugguccccgaucgacauccaccaccugagcugccccaacaaccucgugguggaggacgagggcugcaccaaccuguccggguucagcuacauggagcugaaggucggcuacaucuccgccaucaaggugaacggguucacgugcaccggcguggucaccgaggcggagaccuacacgaacuucgugggcuacgugaccaccaccuucaagcgcaagcacuuccggcccacgcccgacgccugccgcgccgccuacaacuggaagauggccggggacccgcgguacgaggagagccuccacaaccccuaccccgacuaccacuggcugcgcaccgucaagaccaccaaggagucccuggugaucaucagccccuccguggcggaccucgacccguacgacaagagccugcacucccgggucuuccccaacggcaagugcagcgggaucacgguguccagcaccuacugcuccaccaaccacgacuacaccaucuggaugcccgagaacccccgccugggcacgagcugcgacaucuucaccaacucccgggggaagcgcgccagcaagggcuccaagaccugcggcuucguggacgagcgggggcucuacaagagccugaagggcgccugcaagcugaagcucugcgggguccugggccugcgccucauggacggcaccuggguggcccugcagacgagcgacgagaccaaguggugcuccccggaccagcuggugaaccuccacgacuuccacagcgacgagaucgagcaccuggucguggaggagcuggugaagaagcgggaggagugccucgacgcgcuggaguccaucaugaccaccaagagcgucuccuuccgccggcugagccaccuccgcaagcuggugcccggguucggcaaggccuacacgaucuucaacaagacccugauggaggccgacgcccacuacaaguccauccggaccuggaacgagaucauccccagcaaggggugccuccgcgugggcgggaagugccacccccacgucaacggcguguucuucaacggcaucauccuggggccggacggccacguccugauccccgagaugcaguccagccuccugcaccagcacauggagcugcucgaguccagcgugaucccccugaugcacccccuggccgacccguccaccguguucaaggacggggacgaggcggaggacuucgucgaggugcaccuccccgacgugcacaagcagaucagcggcgucgaccuggggcugcccaacuggggcaaguacgugcucauguccgccggcgcccugacggugcugaugcucaccaucuuccuggugaccugcugccggaagaccaaccgcgccgagagcauccagcacuccagcggggagacgggccggaaggucuccgugaccagccagaacgggcgcgucaucagcuccugggagagcuacaaguccggcggggagaccaagcuguga

SEQ ID NO: 94922 - RNA, 1575 nt, Artificial Sequence
  derived and/or modified CDS sequence (opt1) from glycoprotein__RABV__EU086152.1
augaucccccaggcccugcuguucgugccgcugcuggucuucagccucugcuucggcaaguuccccaucuacaccauccccgacaagcuggggcccugguccccgaucgacauccaccaccugagcugccccaacaaccucgugguggaggacgagggcugcaccaaccuguccggguucagcuacauggagcugaaggucggcuacaucuccgccaucaaggugaacggguucacgugcaccggcguggucaccgaggcggagaccuacacgaacuucgugggcuacgugaccaccaccuucaagcgcaagcacuuccggcccacgcccgacgccugccgcgccgccuacaacuggaagauggccggggacccgcgguacgaggagagccuccacaaccccuaccccgacuaccacuggcugcgcaccgucaagaccaccaaggagucccuggugaucaucagccccuccgugagcgaccucgacccguacgacaagucccugcacagccgggucuuccccuccggcaagugcagcgggaucacgguguccagcaccuacugccccaccaaccacgacuacaccaucuggaugcccgagaacccgcgccugggcacguccugcgacaucuucaccaacagccgggggaagcgcgcguccaagggcagcaagaccugcggcuucguggacgagcgggggcucuacaagagccugaagggcgccugcaagcugaagcucugcgggguccugggccugcgccucauggacggcaccugggccgccauccagacguccgacgaggcgaaguggugcccgcccgaccagcuggugaacauccacgacuuccggagcgacgagaucgagcaccugguggucgaggagcucgugaagaagcgcgaggagugccuggacgcccuggaguccaucaugaccaccaagagcguguccuuccggcgccucagccaccuccggaagcugguccccggguucggcaaggccuacaccaucuucaacaagacgcucauggaggccgacgcccacuacaaguccgugcgcaccuggaacgagaucauccccagcaaggggugccugcgggugggcgggcgcugccacccccacgucaacggcguguucuucaacggcaucauccuggggcccgacggccacguccucauccccgagaugcaguccagccugcugcagcagcacauggagcuccuggaguccagcgugaucccgcugaugcacccccucgcggaccccuccaccguguucaaggacggggacgaggccgaggacuucgucgaggugcaccuccccgacgugcacaagcaggucagcggcguggaccuggggcugccguccuggggcaaguacgugcugaugagcgucggcgccaugaucgcccugaugcucaugaucuuccugaugaccugcugccggaaguccaacggggccgagagcauccagcaccgccugggcgagacggggcggaagguguccgugaccagccagagcggccgcgucaucuccagcugggaguccuacaagagcgggggcgagaccaagcucuga

SEQ ID NO: 94923 - RNA, 1575 nt, Artificial Sequence
  derived and/or modified CDS sequence (opt1) from glycoprotein__RABV__EU086153.1
auggugccgcagguccugugguucgugccgcuccugguguucagcaugugcuucggcaaguuccccaucuacaccauccccgacaagcuggggcccugguccccgaucgacauccaccaccucagcugccccaacaaccuggucguggaggacgagggcugcaccaaccuguccggguucagcuacauggagcucaaggugggcuacaucuccgccaucaaggucaacggguucacgugcaccggcguggugaccgaggccgagaccuacacgaacuucgucggcuacgugaccaccaccuucaagcgcaagcacuuccggcccacgcccgacgcgugccgcgccgccuacaacuggaagauggccggggacccgcgguacgaggagagccugcacaaccccuaccccgacuaccacuggcugcgcaccgugaagaccaccaaggagucccucgucaucaucagccccuccguggccgaccuggacccguacgacaagagccugcacucccggguguuccccagcggcaagugcuccgggaucacgaucagcuccaccuacugcagcaccaaccacgacuacaccaucuggaugcccgagaacccccgccucggcacguccugcgacaucuucaccaacagccgggggaagcgcgcguccaagggcagcaagaccugcggcuucgucgacgagcgggggcuguacaagagccugaagggcgccugcaagcucaagcugugcggggugcugggccuccgccugauggacggcaccuggguggccaugcagacguccgacgagaccaaguggugcccgcccgaccagcuggucaaccuccacgacuuccggagcgacgagaucgagcaccuggugguggaggagcuggucaagaagcgcgaggagugccucgacgcccuggaguccaucaugaccaccaagagcguguccuuccggcgccugagccaccuccggaagcuggugcccggguucggcaaggcguacacgaucuucaacaagacccugauggaggccgacgcccacuacaaguccguccgcaccuggaacgagaucauccccagcaaggggugccuccgggugggcgggcgcugccacccgcacgucaacggcguguucuucaacggcaucauccuggggcccgacggccacgugcugauccccgagaugcaguccagccuccugcagcagcacauggagcugcucgaguccagcgucaucccccugaugcacccgcuggccgaccccuccaccguguucaaggacggggacgaggccgaggacuucguggagguccaccuccccgacgugcacaagcagaucagcggcguggaccuggggcugcccaacuggggcaaguacguccucguguccgcgggcgugcuggucgugcugaugcucgccaucuucaucaugacgugcugcgggcgggugaaccgccccaagagcacccagcacucccuggagggcaccgggcggaaggucagcgugaccucccagagcggcaaggugaucagcuccugggagagcuacaaguccgggggcgagacgcgccuguga

SEQ ID NO: 94924 - RNA, 1575 nt, Artificial Sequence
  derived and/or modified CDS sequence (opt1) from glycoprotein__RABV__EU086154.1
auggugccccagguccugugguucgugccgcuccugguguucagcaugugcuucggcaaguuccccaucuacaccauccccgacaagcuggggcccugguccccgaucgacauccaccaccucagcugccccaacaaccuggucguggaggacgagggcugcaccaaccuguccggguucagcuacauggagcucaaggugggcuacaucuccgccaucaaggucaacggguucacgugcaccggcguggugaccgaggccgagaccuacacgaacuucgucggcuacgugaccaccaccuucaagcgcaagcacuuccggcccacgcccgacgcgugccgcgccgccuacaacuggaagauggccggggacccgcgguacgaggagagccugcacaaccccuaccccgacuaccacuggcugcgcaccgugaagaccaccaaggagucccucgucaucaucagccccuccguggccgaccuggacccguacgacaagagccugcacucccggguguuccccagcggcaagugcuccgggaucacgaucagcuccaccuacugcagcaccaaccacgacuacaccaucuggaugcccgagaacccccgccucggcacguccugcgacaucuucaccaacagccgggggaagcgcgcguccaagggcagcaagaccugcggcuucgucgacgagcgggggcuguacaagagccugaagggcgccugcaagcucaagcugugcggggugcugggccuccgccugauggacggcaccuggguggccaugcagacguccgacgagaccaaguggugcccgcccgaccagcuggucaaccuccacgacuuccggagcgacgagaucgagcaccuggugguggaggagcuggucaagaagcgcgaggagugccucgacgcccuggaguccaucaugaccaccaagagcguguccuuccggcgccugagccaccuccggaagcuggugcccggguucggcaaggcguacacgaucuucaacaagacccugauggaggccgacgcccacuacaaguccguccgcaccuggaacgagaucauccccagcaaggggugccuccgggugggcgggcgcugccacccgcacgucaacggcguguucuucaacggcaucauccuggggcccgacggccacgugcugauccccgagaugcaguccagccuccugcagcagcacauggagcugcucgaguccagcgucaucccccugaugcacccgcuguccgaccccagcaccguguucaaggacggggacgaggccgaggacuucguggagguccaccuccccgacgugcacaagcagaucuccggcguggaccuggggcugcccaacuggggcaaguacguccucgugagcgccggcgugcuggucgugcugaugcucgcgaucuucaucaugacgugcugcgggcgggugaaccgcccgaaguccacccagcacagccuggagggcaccgggcggaaggucuccgugaccagccagagcggcaaggugaucuccagcugggaguccuacaagagcgggggcgagacgcgccuguga

SEQ ID NO: 94925 - RNA, 1575 nt, Artificial Sequence; identical to SEQ ID NO: 94657
  derived and/or modified CDS sequence (opt1) from glycoprotein__RABV__EU086155.1

SEQ ID NO: 94926 - RNA, 1575 nt, Artificial Sequence
  derived and/or modified CDS sequence (opt1) from glycoprotein__RABV__EU086156.1
auggugccccagguccugcuguucgugccgcugcugguguucagccucugcuucggcaaguuccccaucuacaccauccccgacaagcuggggcccugguccccgaucgacauccaccaccugagcugccccaacaaccucgucguggaggacgagggcugcaccaaccuguccggguucagcuacauggagcugaaggugggcuacaucuccgccaucaaggucaacggguucacgugcaccggcguggugaccgaggccgagaccuacacgaacuucgucggcuacgugaccaccaccuucaagcgcaagcacuuccggcccacgcccgacgcgugccgcgccgccuacaacuggaagcucgccggggacccgcgguacgaggagagccugcacaaccccuaccccgacuaccacuggcugcgcaccgugaagaccaccaaggagucccucgucaucaucagccccuccguggccgaccuggacccguacgacaagagccugcacucccggguguucagcggcgggaagugcuccggcaucacggucagcuccaccuacugcagcaccaaccacgacuacaccaucuggaugcccgagaacccccgccucgggacguccugcgacaucuucgugaacagccggggcaagcgcgcguccaagggcgggaagaccugcggcuucguggacgagcgggggcuguacaagagccugaagggcgccugcaagcucaagcugugcggcguccccgggcugcgccucauggacggcaccugggccgccauccagaccagcgacgagacgaaguggugcccgcccgaccagcuggugaaccugcacgacuuccgguccgacgagaucgagcaccucguggucgaggagcuggugaagaagcgcgaggagugccuggacgcgcucgagagcaucaugaccaccaaguccgugagcuuccggcgccugucccaccuccggaagcucguccccggguucggcaaggccuacaccaucuucaacaagacgcugauggaggccgacgcccacuacgagagcgugcgcaccuggaacgagaucauccccuccaaggggugccugcgggucggcggccgcugccacccgcacgugaacgggguguucuucaacggcaucauccucgggcccgacggccacguccugauccccgagaugcagagcucccugcuccagcagcacauggagcugcuggagagcuccgugaucccccucaugcacccgcuggccgaccccagcaccgugcugaaggacggggacgaggcggaggacuucgucgaggugcaccuccccgacgugcacaagcugaucuccggcgucgaccugggccuccccagcugggggaaguacgugcugauguccgccggcgugcugaccgcccucaugcugaugaucuuccugaugacgugcugccggcgcgggaaccaggccggcagcaagcagcacgggcuggagggcaccggccggaaggucuccgugaccagccagaacgggaaggugaucuccagcugggagagcuacaaguccggcggggagacccgccucuga

SEQ ID NO: 94927 - RNA, 1575 nt, Artificial Sequence
  derived and/or modified CDS sequence (opt1) from glycoprotein__RABV__EU086157.1
augaucccccaggcccugcuguucgugccgcugcuggucuucagccucugcuucggcaaguuccccaucuacaccauccccgacaagcuggggcccugguccccgaucgacauccaccaccugagcugccccaacaaccucgugguggaggacgagggcugcaccaaccuguccggguucagcuacauggagcugaaggucggcuacaucuccgccaucaaggugaacggguucacgugcaccggcguggucaccgaggcggagaccuacacgaacuucgugggcuacgugaccaccaccuucaagcgcaagcacuuccggcccacgcccgacgccugccgcgccgccuacaacuggaagauggccggggacccgcgguacgaggagagccuccacaaccccuaccccgacuaccacuggcugcgcaccgucaagaccaccaaggagucccuggugaucaucagccccuccgugagcgaccucgacccguacgacaagucccugcacagccgggucuuccccuccggcaagugcagcgggaucacgguguccagcaccuacugccccaccaaccacgacuacaccaucuggaugcccgagaacccgcgccugggcacguccugcgacaucuucaccaacagccgggggaagcgcgcguccaagggcagcaagaacugcggcuucguggacgagcgggggcucuaccgcagccugaagggcgccugcaagcugaagcucugcgggguccugggccugcggcucauggacggcaccugggccgccauccagaccuccgacgaggcgaaguggugcccgcccgaccagcuggugaacauccacgacuuccgcagcgacgagaucgagcaccugguggucgaggagcucgugaagaagcgggaggagugccuggacgcccuggaguccaucaugacgaccaagagcguguccuuccgccggcucagccaccuccgcaagcugguccccggguucggcaaggccuacaccaucuucaacaagacccucauggaggccgacgcccacuacaaguccgugcggacguggaacgagaucauccccagcaaggggugccugcgcgugggcgggcggugccacccccacgucaacggcguguucuucaacggcaucauccuggggcccgacggccacguccucauccccgagaugcaguccagccugcugcagcagcacauggagcuccuggaguccagcgugaucccgcugaugcacccccucgcggaccccuccaccguguucaaggacggggacgaggccgaggacuucgucgaggugcaccuccccgacgugcacaagcaggucagcggcguggaccuggggcugccguccuggggcaaguacgugcugaugagcgucggcgcccugaucgcccucaugcugaugaucuuccugaugaccugcugccgcaaggccaacgggguggaguccaugcagcaccggcucggcgagaccgggcgcaaggugagcgucacgucccagagcggccgcgugaucagcuccugggagagcuacaaguccgggggcgagaccaagcuguga

SEQ ID NO: 94928 - RNA, 1575 nt, Artificial Sequence
  derived and/or modified CDS sequence (opt1) from glycoprotein__RABV__EU086158.1
augaucccccaggcccugcuguucgugccgcugcuggucuucagccucugcuucggcaaguuccccaucuacaccauccccgacaagcuggggcccugguccccgaucgacauccaccaccugagcugccccaacaaccucgugguggaggacgagggcugcaccaaccuguccggguucagcuacauggagcugaaggucggcuacaucuccgccaucaaggugaacggguucacgugcaccggcguggucaccgaggcggagaccuacacgaacuucgugggcuacgugaccaccaccuucaagcgcaagcacuuccggcccacgcccgacgccugccgcgccgccuacaacuggaagauggccggggacccgcgguacgaggagagccuccacaaccccuaccccgacuaccacuggcugcgcaccgucaagaccaccaaggagucccuggugaucaucagccccuccgugagcgaccucgacccguacgacaagucccugcacagccgggucuuccccuccggcaagugcagcgggaucacgguguccagcaccuacugccccaccaaccacgacuacaccaucuggaugcccgagaacccgcgccugggcacguccugcgacaucuucaccaacagccgggggaagcgcgcguccaagggcagcaagaccugcggcuucguggacgagcgggggcucuaccgcagccugaagggcgccugcaagcugaagcucugcgggguccugggccugcggcucauggacggcaccugggccgccauccagacguccgacgaggcgaaguggugcccgcccgaccagcuggugaacauccacgacuuccgcagcgacgagaucgagcaccugguggucgaggagcucgugaagaagcgggaggagugccuggacgcccuggaguccaucaugaccaccaagagcguguccuuccgccggcucagccaccuccgcaagcugguccccggguucggcaaggccuacaccaucuucaacaagacgcucauggaggccgacgcccacuacaaguccgugcggaccuggaacgagaucauccccagcaaggggugccugcgcgugggcgggcggugccacccccacgucaacggcguguucuucaacggcaucauccuggggcccgacggccacguccucauccccgagaugcaguccagccugcugcgccagcacauggagcuccuggaguccagcgugaucccgcugaugcacccccucgcggaccccuccaccguguucaaggacggggacgaggccgaggacuucgucgaggugcaccuccccgacgugcacaaccagaucagcggcgucgaccuggggcugccguccuggggcaaguacgugcugaugagcgugggcgccaugaucgcccugaugcucgucaucuuccugaccacgugcugccggaaggccaacggggcggagaccauccagcaccgccugggcgagaccgggcgcaagguguccgugaccagccaguccggccgggucaugagcagcugggaguccuacaagagcgggggcgagacgaagcucuga

SEQ ID NO: 94929 - RNA, 1575 nt, Artificial Sequence
  derived and/or modified CDS sequence (opt1) from glycoprotein__RABV__EU086159.1
augaucccccaggcccugcuguucgugccgcugcuggucuucagccucugcuucggcaaguuccccaucuacaccauccccgacaagcuggggcccugguccccgaucgacauccaccaccugagcugccccaacaaccucgugguggaggacgagggcugcaccaaccuguccggguucagcuacauggagcugaaggucggcuacaucuccgccaucaaggugaacggguucacgugcaccggcguggucaccgaggcggagaccuacacgaacuucgugggcuacgugaccaccaccuucaagcgcaagcacuuccggcccacgcccgacgccugccgcgccgccuacaacuggaagauggccggggacccgcgguacgaggagagccuccacaaccccuaccccgacuaccacuggcugcgcaccgucaagaccaccaaggagucccuggugaucaucagccccuccgugagcgaccucgacccguacgacaagucccugcacagccgggucuuccccuccggcaagugcagcgggaucacgguguccagcaccuacugccccaccaaccacgacuacaccaucuggaugcccgagaacccgcgccugggcacguccugcgacaucuucaccaacagccgggggaagcgcgcguccaagggcagcaagaccugcggcuucguggacgagcgggggcucuacaagagccugaagggcgccugcaagcugaagcucugcgggguccugggccugcgccucauggacggcaccugggccgccauccagacguccgacgaggcgaaguggugcccgcccgaccagcuggugaacauccacgacuuccggagcgacgagaucgagcaccugguggucgaggagcucgugaagaagcgcgaggagugccuggacgcccuggaguccaucaugaccaccaagagcguguccuuccggcgccucagccaccuccggaagcugguccccggguucggcaaggccuacaccaucuucaacaagacgcucauggaggccgacgcccacuacaaguccgugcgcaccuggaacgagaucauccccagcaaggggugccugcgggugggcgggcgcugccacccccacgucaacggcguguucuucaacggcaucauccuggggcccgacggccacguccucauccccgagaugcaguccagccugcugcagcagcacauggagcuccuggaguccagcgugaucccgcugaugcucccccuggcggaccccuccaccguguucaaggacggggacgaggccgaggacuucgucgaggugcaccuccccgacgugcacaagcaggucagcggcguggaccuggggcugccguccuggggcaaguacgugcugaugagcgucggcgccaugaucgcccucaugcugaugaucuuccugaccacgugcugccggaaggccaacggggcgcgcaccaugcagcacgccuccggcgagaccgggcggaaggugagcgugaccuuccccuccggccgcgucaucagcagcugggaguccuacaagagcgggggcgagacgaagcucuga

SEQ ID NO: 94930 - RNA, 1575 nt, Artificial Sequence
  derived and/or modified CDS sequence (opt1) from glycoprotein__RABV__EU086160.1
augaucccccaggcccugcuguucgugccgcugcuggucuucagccucugcuucggcaaguuccccaucuacaccauccccgacaagcuggggcccugguccccgaucgacauccaccaccugagcugccccaacaaccucgugguggaggacgagggcugcaccaaccuguccggguucagcuacauggagcugaaggucggcuacaucuccgccaucaaggugaacggguucacgugcaccggcguggucaccgaggcggagaccuacacgaacuucgugggcuacgugaccaccaccuucaagcgcaagcacuuccggcccacgcccgacgccugccgcgccgccuacaacuggaagauggccggggacccgcgguacgaggagagccuccacaaccccuaccccgacuaccacuggcugcgcaccgucaagaccaccaaggagucccuggugaucaucagccccuccgugagcgaccucgacccguacgacaagucccugcacagccgggucuuccccuccggcaagugcagcgggaucacgguguccagcaccuacugccccaccaaccacgacuacaccaucuggaugcccgagaacccgcgccugggcacguccugcgacaucuucaccaacagccgggggaagcgcgcguccaagggcagcaagaccugcggcuucguggacgagcgggggcucuacaagagccugaagggcgccugcaagcugaagcucugcgggguccugggccugcgccucauggacggcaccugggccgccauccagacguccgacgaggcgaaguggugcccgcccgaccagcuggugaacauccacgacuuccggagcgacgagaucgagcaccugguggucgaggagcucgugaagaagcgcgaggagugccuggacgcccuggaguccaucaugaccaccaagagcguguccuuccggcgccucagccaccuccggaagcugguccccggguucggcaaggccuacaccaucuucaacaagacgcucauggaggccgacgcccacuacaaguccgugcgcaccuggaacgagaucauccccagcaaggggugccugcgggugggcgggcgcugccacccccacgucaacggcguguucuucaacggcaucauccuggggcccgacggccacguccucauccccgagaugcaguccagccugcugcagcagcacauggagcuccuggaguccagcgugaucccgcugaugcacccccucgcggaccccuccaccguguucaaggacggggacgaggccgaggacuucgucgaggugcaccuccccgacgugcacaagcaggucagcggcguggaccuggggcugccguccuggggcaaguacgugcugaugagcgucggcgccaugaucgcccugaugcucaugaucuuccugaccacgugcugccggaaggccaacggggcggagaccauccagcaccgccugggcgagaccgggcggaagguguccgugaccagccaguccggccgcgucaucagcagcugggaguccuacaagagcgggggcgagacgaagcucuga

SEQ ID NO: 94931 - RNA, 1575 nt, Artificial Sequence
  derived and/or modified CDS sequence (opt1) from glycoprotein__RABV__EU126641.1
auggugccccagguccugcuguucgugcugcugcucggcuucagccugugcuucgggaaguucccgaucuacaccauccccgacaagcugggccccuggucccccaucgacauccaccaccuccgcugcccgaacaaccugguggucgaggacgaggggugcaccaaccugagcggcuucuccuacauggagcucaaggugggguacaucagcgccaucaaggugaacggcuucacgugcaccggcgucgugaccgaggccgagaccuacacgaacuucgugggguacgucaccaccaccuucaagcggaagcacuuccgccccacgcccgacgcgugccgggccgccuacaacuggaagauggccggcgacccccgcuacgaggagucccugcagaacccguaccccgacuaccacuggcugcggaccgugcgcaccaccaaggagagccucaucaucaucucccccagcgugacggaccuggaccccuacgacaagucccugcacagccgggucuuccccgggggcaagugcuccgggaucaccgugagcuccaccuacugcagcaccaaccacgacuacacgaucuggaugccggaggacccccgccccggcaccccgugcgacaucuucaccaacucccggggcaagcgcgccagcaacgggaacaagaccugcggcuucguggacgagcgggggcucuacaagucccugaagggcgcgugccgccugaagcucugcggcguccuggggcugcggcucauggacggcacguggguggccaugcagaccagcgacgagaccaaguggugcucccccgaccagcuggugaaccugcacgacuuccgcagcaacgagaucgagcaccucgucguggaggaccuggugaagaagcgggaggagugccuggacacccucgagagcaucaugacgaccaaguccgucagcuuccgccggcugucccaccuccgcaagcucgugcccggguucggcaaggccuacaccaucuucaacaagacccugauggaggccgacgugcacuacaagagcguccggacguggaacgagaucauccccuccaaggggugccugaaggugggcggccgcugccacccgcacgucaacgggguguucuucaacggcaucauccucgggcccgacgaccgggugcugauccccgagaugcagagcucccugcuccgccagcacauggagcugcuggagagcuccgucaucccccucaugcacccgcuggcggaccccagcaccguguucaaggagggcgacgaggccgaggacuucguggagguccaccuccccgacguguacaagaagaucuccgggguggaccugggccugcccaacuggggcaaguacguccugaugaccgccggggccaugaucggccucgugcugaucuucagccugaugaccuggugccgccgggccaaccgcccggaguccaagcagcggagcuucgggggcaccgggggcaacguguccgucacgagccaguccggcaaggugauccccagcugggaguccuacaagagcgggggcgagauccgccucuga

SEQ ID NO: 94932 - RNA, 1575 nt, Artificial Sequence
  derived and/or modified CDS sequence (opt1) from glycoprotein__RABV__EU182346.1
auggugccccaggcccugcuguucgucccccugcugguguucccccucugcuucggcaaguuccccaucuacaccauccccgacaagcuggggccguggagccccaucgacauccaccaccuguccugccccaacaaccucguggucgaggacgagggcugcaccaaccugagcggguucuccuacauggagcugaaggugggcuacauccucgccaucaagaugaacggguucacgugcaccggcguggucaccgaggcggagaccuacacgaacuucgugggcuacgugaccaccaccuucaagcgcaagcacuuccggcccacgccggacgccugccgcgccgccuacaacuggaagauggccggggacccccgguacgaggagagccugcacaaccccuaccccgacuaccgcuggcugcggaccgucaagaccaccaaggagucccucgugaucaucagcccguccguggcggaccuggaccccuacgaccgcagccugcacucccgggucuuccccagcggcaagugcuccgggguggccgugagcuccacguacugcagcaccaaccacgacuacaccaucuggaugcccgagaacccgcgccucggcauguccugcgacaucuucaccaacagccgggggaagcgcgccuccaagggcagcgagacgugcggcuucgucgacgagcgggggcuguacaagucccugaagggcgccugcaagcucaagcugugcggggugcugggccuccgccugauggacggcaccuggguggcgaugcagaccagcaacgagaccaaguggugcccgcccgaccagcuggucaaccuccacgacuuccggagcgacgagaucgagcaccuggugguggaggagcugguccgcaagcgggaggagugccucgacgcccuggaguccaucaugacgaccaagagcguguccuuccgccggcugagccaccuccgcaagcuggugcccggguucggcaaggccuacaccaucuucaacaagacccugauggaggccgacgcccacuacaaguccguccggacguggaacgagauccuccccagcaaggggugccugcgcgugggcgggcggugccacccccacgucaacggcguguucuucaacggcaucauccuggggcccgacggcaacgugcucauccccgagaugcaguccagccugcugcagcagcacauggagcuccuggaguccagcgucaucccgcuggugcacccccucgcggaccccuccaccguguucaaggacggggacgaggccgaggacuucgucgaggugcaccuccccgacgugcacaaccaggucagcggcguggaccuggggcucccgaacuggggcaaguacgugcugcuguccgccggcgcccucaccgcccugaugcugaucaucuuccugaugaccugcugccgccgcgucaaccggagcgagcccacgcagcacaaccuccgcgggaccggccgggagguguccgugaccccgcagagcgggcgcaucaucuccagcugggagucccacaagagcggcggggagacccggcuguga

SEQ ID NO: 94933 - RNA, 1575 nt, Artificial Sequence
  derived and/or modified CDS sequence (opt1) from glycoprotein__RABV__EU182347.1
auggugccccaggcccugcuguucgucccccugcugguguucccccucugcuucggcaaguuccccaucuacaccauccccgacaagcuggggccguggagccccaucgacauccaccaccuguccugccccaacaaccucguggucgaggacgagggcugcaccaaccugagcggguucuccuacauggagcugaaggugggcuacaaccucgccaucaagaugaacggguucacgugcaccggcguggucaccgaggcggagaccuacacgaacuucgugggcuacgugaccaccaccuucaagcgcaagcacuuccggcccacgccggacgccugccgcgccgccuacaacuggaagauggccggggacccccgguacgaggagagccugcacaaccccuaccccgacuaccgcuggcugcggaccgucaagaccaccaaggagucccucgugaucaucagcccguccguggcggaccuggaccccuacgaccgcagccugcacucccgggucuuccccagcggcaagugcuccgggguggccgugagcuccacguacugcagcaccaaccacgacuacaccaucuggaugcccgagaacccgcgccucggcauguccugcgacaucuucaccaacagccgggggaagcgcgccuccaagggcagcgagacgugcggcuucgucgacgagcgggggcuguacaagucccugaagggcgccugcaagcucaagcugugcggggugcugggccuccgccugauggacggcaccuggguggcgaugcagaccagcaacgagaccaaguggugcccgcccgaccagcuggucaaccuccacgacuuccggagcgacgagaucgagcaccuggugguggaggagcugguccgcaagcgggaggagugccucgacgcccuggaguccaucaugacgaccaagagcguguccuuccgccggcugagccaccuccgcaagcuggugcccggguucggcaaggccuacaccaucuucaacaagacccugauggaggccgacgcccacuacaaguccguccggacguggaacgagauccuccccagcaaggggugccugcgcgugggcgggcggugccacccccacgucaacggcguguucuucaacggcaucauccuggggcccgacggcaacgugcucauccccgagaugcaguccagccugcugcagcagcacauggagcuccuggaguccagcgucaucccgcuggugcacccccucgcggaccccuccaccguguucaaggacggggacgaggccgaggacuucgucgaggugcaccuccccgacgugcacaaccaggucagcggcguggaccuggggcucccgaacuggggcaaguacgugcugcuguccgccggcgcccucaccgcccugaugcugaucaucuuccugaugaccugcugccgccgcgucaaccggagcgagcccacgcagcacaacauccgcgggaccggccgggagguguccgugaccccgcagagcgggaagaucaucuccagcugggagucccacaagagcggcggggagacccgccucuga

SEQ ID NO: 94934 - RNA, 1575 nt, Artificial Sequence
  derived and/or modified CDS sequence (opt1) from glycoprotein__RABV__EU253477.1
augacgccccaggcccugcuguucgugccgcugcuggucuucagcuccugcuucggcaaguuccccaucuacaccauccccgacaagcucgggcccuggagcccgaccgacauccaccaccuguccugccccaacaaccuggugguggaggacgagggcugcaccaaccucagcggguucuccuacauggagcugaaggucggcuacaucagcgccaucaaggugaacggguucacgugcaccggcguggucaccgaggcggagaccuacaccaacuucgugggcuacgugaccacgaccuucaagcgcaagcacuuccggcccaugcccgacgccugccgcgccgccuacaacuggaagauggccggggacccgcgguacgaggagucccugcacaaccccuaccccgacuaccacuggcuccgcaccgucaagaccacgaaggagagccuggugaucaucucccccagcguggcggaccuggacccguacgacaagucccuccacagccgggucuuccccggcgggaagugcuccggcaucaccgugagcuccacgugcugcagcaccaaccacgacuacaccaucuggaugcccgagaacccccgccuggggaccuccugcgacaucuucaccaacagccggggcaagcgcgccuccaagggcgggaagaccugcggcuucguggacgagcgggggcuguacaagagccucaagggcgccugcaagcugaagcugugcggcguccucgggcugcgccugauggacggcacguggguggccauccagaccagcgacgagaucaaguggugcuccccggaccagcucgugaaccugcacgacuuccacagcgacgagaucgagcaccuggucguggaggagcucgugaagaagcgggaggagugccuggacgcgcuggagaccaucaugaccacgaaguccgucagcuuccgccggcucucccaccuccgcaagcuggugcccggguuccggaaggccuacaccaucuucaacaagacccucauggaggccgacgcccacuacaagagcauccgcaccuggaacgagaucauccccuccaagggcugccugcgggucgggggccgcugccacccccacgugaacggcguguucuucaacgggaucauccugggcccggacgggcacguccucauccccgagaugcagagcucccugcugcaccagcacauggagcuccuggagagcuccgugaucccccugaugcacccccucgccgacccgagcacgguguucaaggacggcgacgaggcggaggacuucgucgaggugcaccuccccgacgugcacaagcagaucuccggggucgaccugggccugcccaacuggggcaaguacgugcugaucagcgccggggcccugaccgcccucaugcugaccaucuuccugaugaccugcugccggaagacgaaccgcgccgaguccauccagcacagccccggcgagaccgggcggaagguguccgucaccagccacaacggccgcgugaucuccagcugggagagcuacaaguccgggggcgagaccaagcucuga

SEQ ID NO: 94935 - RNA, 1575 nt, Artificial Sequence
  derived and/or modified CDS sequence (opt1) from glycoprotein__RABV__EU267742.1
augaucccccaggugcugcuccuggucccgcugcucguguucagcuccugcuucggcaaguuccccaucuacaccauccccgacaagcuggggcccuggagcccgaucgacauccaccaccuguccugccccaacaaccucguggucgaggacgagggcugcaccaaccugagcggguucuccuacauggagcugaaggugggcuacaucagcgccaucaaggugaacggguucacgugcaccggcgucgugaccgaggccgagaccuacacgaacuucgugggcuacgucaccaccaccuucaagcgcaagcacuuccggcccacgcccgacgcgugccgcgccgccuacaacuggaagauggccggggacccgcgguacgaggagucccuccacaaccccuaccccgacuaccacugguuccgcaccgugaagaccagcaaggagucccuggugaucaucagccccuccgucgccgaccuggacccguacgacaagagccuccacucccggguguuccccggcgggaagugcagcggcaucaccguguccagcacgugcugcuccaccaaccacgacuacaccaucuggaugcccgagaacccccgccuggggaccagcugcgacaucuucacgaacucccggggcaagcgcgcgagcaagggcgggaagaccugcggcuucgucgacgagcgggggcuguacaagagccucaagggcgccugcaagcugaagcugugcggcgugcucgggcugcgccugauggacggcaccuggguggccauccagaccuccgacgagaucaaguggugcagcccggaccagcucgucaaccugcacgacuuccacuccgacgagaucgagcaccuggugguggaggagcucgucaagaagcgggaggagugccuggacgcccuggagacgaucaugaccaccaagagcguguccuuccgccggcucagccaccuccgcaagcuggugcccggguucggcaaggcguacaccaucuucaacaagacgcugauggaggccgacgcccacuacaaguccauccggaccuggaacgagaucauccccagcaaggggugccugcgcgucggcggccggugccacccccacgugaacggggucuucuacaacggcaucauccuggggccggacggccacgugcucauccccgagaugcaguccagccugcugcaccagcacauggagcuccuggaguccagcgugaucccccugaugcacccccucgccgacccguccaccgucuucaaggacggggacgaggccgaggacuucguggaggugcaccuccccgacguccacaagcagaucagcggcguggaccugggccugcccaacugggggaaguacgugcuggucuccgcgggcgcccugaccgcccucaugcugaugaucuuccugaugacgugcugccgcaagaccaaccgggccgagagcauccagcacucccccggggagaccggccgcaaggugagcgugaccucccacaacgggcgggucaucagcagcugggaguccuacaagagcggcggcgagacgaagcucuga

SEQ ID NO: 94936 - RNA, 1575 nt, Artificial Sequence
  derived and/or modified CDS sequence (opt1) from glycoprotein__RABV__EU267743.1
augaucccccaggugcugcuguucgucccgcugcugguguucagcuccugcuucggcaaguuccccaucuacaccaccagcgacaagcucgggcccuggucccccaucgacaugcaccaccugagcugcccgaacaaccugguggucgaggacgagggcugcacgaaccucuccggguucagcuacauggagcugaaggugggcuacaucuccgccaucaaggugaacggguucacgugcaccggcgucgugaccgaggccgagaccuacaccaacuucgugggcuacgucaccaccacguucaagcgcaagcacuuccggcccaugcccgacgcgugccgcgccgccuacaacuggaagauggccggggacccccgguacgaggagagccugcacaacccguaccccgacuaccacuggcuccgcaccgugaagaccaccaaggagucccuggugaucaucagccccuccgucgccgaccuggaccccuacgacaagagccuccacucccggguguucccgggcgggaagugcagcggcaucacgguguccagcacgugcugcuccaccaaccacgacuacaccaucuggaugcccgagaacccccgccuggggaccagcugcgacaucuucaccaacucccggggcaagcgcgcgagcaagggcgggaagaccugcggcuucgucgacgagcgggggcuguacaagagccucaagggcgccugcaagcugaagcugugcggcgugcucgggcugcgccugauggacggcaccuggguggccauccagacguccgacgagaucaaguggugcagccccgaccagcucgucaaccugcacgacuuccacuccgacgagaucgagcaccuggugguggaggagcucgccaaggagcgggaggagugccuggacgcgcuggaggccaucaugaccaccaagagcgucuccuuccgccggcucagccaccuccgcaagcuggugccgggguucggcaaggccuacaccaucuucaacaagacgcucauggaggccgacgcccacuacaaguccauccggaccuggaacgagaucauccccagcaaggggugccugcgcgugggcggccggugccacccccacgucaacgggguguucuucaacggcaucauccuggggcccgacggccacguccucaucccggagaugcaguccagccugcugcaccagcacauggagcuccuggaguccagcgugaucccccugaugcacccccucgcggaccccuccaccguguucaaggacggggacgaggccgaggacuucgucgaggaccaccucccggacgugcacaagcagaucagcggcguggaccugggccugcccaacugggggaaguacguccugaucuccgccggcgcccugaccgcccucaugagcaugaucuuccugaugacgugcugccgcaagaccaaccgggcggaguccauccagcacagccccggggagaccggccgcaagguguccgugaccagccacaacgggcgggucaucagcuccugggagagcuacaaguccggcggcgagacgaagcuguga

SEQ ID NO: 94937 - RNA, 1575 nt, Artificial Sequence
  derived and/or modified CDS sequence (opt1) from glycoprotein__RABV__EU267744.1
auggugccccagguccuccuguucgugccgcugcugguguucagcuccugcuucggcaaguuccccaucuacaccauccccgacaagcucgggcccuggagcccgaucgacauccaccaccuguccugccccaacaaccuggucguggaggacgagggcugcaccaaccucagcggguucuccuacauggagcugaaggugggcuacaucagcgccaucaaggucaacggguucacgugcaccggcguggugaccgaggccgagaccuacacgaacuucgucggcuacgugaccaccaccuucaagcgcaagcacuuccggcccaugcccgacgcgugccgcgccgccuacaacuggaagauggccggggacccgcgguacgaggagucccugcacaaccccuaccccgacuaccacuggcuccgcacggugaagaccaccaaggagagccuggucaucaucucccccagcguggccgaccuggacccguacgacaagucccuccacagccggguguuccccggcgggaagugcuccggcaucaccgucagcuccacgugcugcagcaccaaccacgacuacaccaucuggaugcccgagaacccccgccuggggaccuccugcgacaucuucacgaacagccggggcaagcgcgcguccaagggcgggaagaccugcggcuucguggacgagcgggggcuguacaagagccucaagggcgccugcaagcugaagcugugcggcgugccggggcuccgccugauggacggcaccugggucgccauccagaccagcgacgagaucaaguggugcucccccgaccagcuggugaaccuccacgacuuccacagcgacgagaucgagcaccugguggucgaggagcuggugaagaagcgggaggagugccucgacgcccuggagacgaucauggcgaccaaguccgugagcuuccgccggcugucccaccuccgcaagcugguccccggguucggcaaggccuacaccaucuucaacaagacccugauggaggccgacgcccacuacaagagcauccggacguggaacgagaucauccccuccaaggggugccuccgcgugggcggccggugccacccgcacgucagcgggguguucuucaacggcaucauccuggggcccgacggccacgugcugauccccgagaugcaguccagccuccugcaccagcacauggagcugcucgaguccagcgucaucccccugaugcacccgcuggccgaccccuccaccguguucaaggacggggacgaggcggaggacuucguggagguccaccuccccgacgugcacaagcagaucagcggcguggaccugggccugcccaacugggagaaguacguccucaucuccgccggggcccugaccgcccugaugcucaugaucuuccugaugaccugcugccgcaaggccaaccgggcggagagcauccagcacaacccgggcgagacggggcgcaagguguccgugaccagccacaacggccgggucaucuccagcugggagagcuacaaguccgggggcgaggccaagcuguga

SEQ ID NO: 94938 - RNA, 1575 nt, Artificial Sequence
  derived and/or modified CDS sequence (opt1) from glycoprotein__RABV__EU267745.1
auggugccccaggcccugcuguucgucccccugcugguguucccccucugcuucggcaaguuccccaucuacaccauccccgacaagcuggggccguggagccccaucgacauccaccaccuccgcugccccaacaaccucguggucgaggacgagggcugcaccaaccuguccggguucagcuacauggagcugaaggugggcuacauccucgccaucaagaugaacggguucacgugcaccggcguggucaccgaggcggagaccuacacgaacuucgugggcuacgugaccaccaccuucaagcggaagcacuuccgccccacgccggacgccugccgggccgccuacaacuggaagauggccggggacccccgcuacgaggagucccugcacaaccccuaccccgacuaccgguggcugcgcaccgucaagaccaccaaggagagccucgugaucaucuccccgagcguggcggaccuggaccccuacgaccggucccugcacagccgcgucuuccccuccggcaagugcagcgggguggccguguccagcacguacugcuccaccaaccacgacuacaccaucuggaugcccgagaacccgcggcucggcaugagcugcgacaucuucaccaacucccgcgggaagcgggccagcaagggcuccgagacgugcggcuucgucgacgagcgcgggcuguacaagagccugaagggcgccugcaagcucaagcugugcggggugcugggccuccggcugauggacggcaccuggguggcgaugcagaccuccaacgagaccaaguggugcccgcccgaccagcuggucaaccuccacgacuuccgcagcgacgagaucgagcaccuggugguggaggagcugguccggaagcgcgaggagugccucgacgugcuggagagcaucaugacgaccaaguccgugagcuuccggcgccugucccaccuccggaagcugguccccggguucggcaaggccuacaccaucuucaacaagacccugauggaggccgacgcccacuacaagagcgugcgcacguggaacgagauccuccccuccaaggggugccugcgggucggcgggcgcugccacccccacgugagcggcguguucuucaacggcaucauccuggggcccgacggcaacguccucauccccgagaugcaguccagccugcugcagcagcacauggagcuccuggaguccagcgugaucccgcuggugcacccccucgccgaccccuccaccgucuucaaggacggggacgaggcggaggacuucguggaggugcaccuccccgacguccacaaccaggugagcggcguggaccuggggcugccgaacuggggcaaguacguccugcuguccgccggcgcccucaccgcccugaugcugaucaucuuccugaugaccugcugccgccgggugaaccgcagcgagcccacgcagcacaaccuccgggggaccggccgcgagguguccgucaccccgcagagcgggaagaucaucuccagcugggagucccacaagagcggcggggagacccggcuguga

SEQ ID NO: 94939 - RNA, 1575 nt, Artificial Sequence
  derived and/or modified CDS sequence (opt1) from glycoprotein__RABV__EU267746.1
auggugccccaggcccugcuguucgucccgcugcuggccaucccccucugcuucggcaaguuccccaucuacaccauccccgacaagcuggggccguggagccccaucgacauccaccaccuguccugccccaacaaccucgugguggaggacgagggcugcaccaaccugagcggguucuccuacauggagcugaaggucggcuacaucagcgcgaucaaggugaacggguucacgugcaccggcguggucaccgaggccgagaccuacacgaacuucgugggcuacgugaccaccaccuucaagcgcaagcacuuccggcccacgccggacgccugccgcuccgccuacaacuggaagauggccggggacccccgguacgaggagagccuccacaaccccuaccccgacuaccacuggcugcgcaccgucaagaccaccaaggaguccuucgugaucaucagcccguccguggcggaccuggaccccuacgacaagagccuccacucccgggucuucccccgcggcaagugcagcgggaucacgguguccagcaccuacugcuccaccaaccacgacuacaccaucuggaugcccgagaacccgcggcugggcacgagcugcgacaucuucaccaacucccgcgggaagcgggccagcaagggcuccaagaccugcggcuucguggacgagcgcgggcuguacaagagccucaagggcgccugcaagcugaagcugugcgggguccucggccugcggcugauggacggcaccuggguggccauccagacgagcguggagaccaaguggugcccgcccgaccagcucgucaaccugcacgacuuccacuccgacgagaucgagcaccuggugguggaggagcucgucaagaagcgcgaggagugccuggacgcgcuggagagcaucaugaccaccaaguccgugagcuuccggcgccucucccaccuccggaagcuggugcccggguucggcaaggccuacacgaucuucaacaagacccucauggaggccgacgcccacuacaagagcguccgcaccuggaacgagaucauccccuccaaggggugccugcgggugggcgggcgcugccacccccacgucaacggcguguucuucaacggcaucauccuggggcccgacggccacgugcucauccccgagaugcagagcucccugcugcagcagcacauggagcuccuggagagcuccgucaucccgcugaugcacccccucgccgaccccagcaccguguucaaggacggggacgaggcggaggacuucguggagguccaccuccccgacgugcacaagcaggucuccggcguggaccuggggcugccgagcuggggcaaguacgugcugauguccgccggcauccugacggcccucaugcugaugaucuuccugaugaccugcugccggcgcaccaaccgggccgagagcauccagcacucccucggggagaccggccgcaaggugagcgucacgucccagagcgggcgcgugaucagcuccugggagagcuacaaguccggcggggagaccaagcuguga

SEQ ID NO: 94940 - RNA, 1575 nt, Artificial Sequence
  derived and/or modified CDS sequence (opt1) from glycoprotein__RABV__EU267747.1
auggugccccaggcccuccuguucgucccgcugcuggccaucccccucugcuucggcaaguuccccaucuacaccauccccgacaagcuggggccguggagccccaucgacauccaccaccuguccugccccaacaaccucgugguggaggacgagggcugcaccaaccugcccggguucagcuacauggagcugaaggucggcuacaucuccgcgaucaaggugaacggguucacgugcaccggcguggucaccgaggccgagaccuacacgaacuucgugggcuacgugaccaccaccuucaagcgcaagcacuuccggccgacgcccgacgccugccgcagcgccuacaacuggaagauggccggggacccccgguacgaggagagcccccacaacccguaccccgacuaccacuggcuccgcaccgucaagaccaccaaggaguccuucgugaucaucucccccagcguggcggaccuggaccccuacgacaagucccugcacagccgggucuucccgcgcggcaagugcuccgggaucacggugagcuccaccuacugcagcaccaaccacgacuacaccaucuggaugcccgagaacccccggcucggcacguccugcgacaucuucaccaacagccgcgggaagcgggccuccaagggcagcaagaccugcggcuucguggacgagcgcgggcuguacaagucccugaagggcgccugcaagcucaagcugugcgggguccugggccuccggcugauggacggcaccuggguggugauccagacgagcgacgagaccaaguggugcccgcccgaccagcuggucaaccuccacgacuuccacagcgacgagaucgagcaccuggugguggaggagcuggucaagaagcgcgaggagugccucgacgcccuggaguccaucaugaccaccaagagcguguccuuccggcgccugagccaccuccggaagcuggugcccggguucggcaaggcguacacgaucuucaacaagacccugauggaggccgacgcccacuacaaguccguccgcaccuggaacgagaucauccccagcaaggggugccuccgggugggcgggcgcugccacccccacgucaacggcguguucuucaacggcaucauccuggggccggacggccacgugcugauccccgagaugcaguccagccuccugcagcagcacauggagcugcucgaguccagcgucaucccccugaugcacccccuggccgacccguccaccguguucaaggacggggacgaggccgaggacuucguggagguccggcuccccgacgugcacaagcaggucagcggcguggaccuggggcugcccuccuggggcaaguacgugcucaugagcgcgggcauccugacggcccugaugcucaugaucuuccugaugaccugcugccgccggaccaacggggccgaguccauccagcacagccugggcgagaccgggcgcaagguguccgucacgagccaguccggccgcgugaucagcagcugggaguccuacaagagcgggggcgagaccaagcucuga

SEQ ID NO: 94941 - RNA, 1575 nt, Artificial Sequence
  derived and/or modified CDS sequence (opt1) from glycoprotein__RABV__EU267748.1
augaucccccaggugcugcuguucuucccgcugcuggucuucagcuccugcuucggcaaguuccccaucuacaccauccccgacaagcucgggcccuggagcccgaucgacauccaccaccuguccugccccaacaaccuggugguggaggacgagggcugcaccaaccucagcggguucuccuacauggagcugaaggucggcuacaucagcgccaucaaggugaacggguucacgugcaccggcguggucaccgaggccgagaccuacacgaacuucgugggcuacgugaccaccaccuucaagcgcaagcacuuccggcccaugcccgacgcgugccgcgccgccuacaacuggaagauggccggggacccgcgguacgaggagucccugcacaaccccuaccccgacuaccacuggcuccgcacggucaagaccaccaaggagagccuggugaucaucucccccagcguggccgaccuggacccguacgaccggucccuccacagccgcgucuuccccggcgggaagugcuccggcaucaccgugagcuccacgugcugcagcaccaaccacgacuacaccaucuggaugcccgagaacccccggcugcgcaccuccugcgacaucuucacgaacagccgggggaagcgcgcgccgaagggcggcaagaccugcggguucguggacgagcggggccuguacaagucccucaagggggccugcaagcugaagcugugcggcguccucggccugcgccugauggacgggaccuggguggccauccagaccagcgacgagaucaaguggugcagccccgaccagcucgugaaccugcacgacuuccacuccgacgagaucgagcaccuggucguggaggagcucgugaagaagcgggaggagugccuggacgcccuggagacgaucaugaccaccaagagcgucuccuuccgccggcucagccaccuccgcaagcuggugcccggcuucgggaaggcguacaccaucuucaacaagacgcucauggaggccgacgcccacuacaaguccauccggaccuggaacgagaucauccccagcaagggcugccugcgcgucgggggccggugccacccgcacgugaacggcguguucuucaacgggaucauccugggccccgacgggcacguccucauccccgagaugcaguccagccugcugcaccagcacauggagcuccuggaguccagcgugaucccccugaugcacccgcucgccgaccccuccaccguguucaaggacggcgacgaggccgaggacuucgucgaggugcaccuccccgacgugcacaagcagaucagcggggucgaccugggccugcccaacuggggcaaguacgugcugaucuccgcgggggcccugaccgcccucaugagcaugaucuuccugaugacgugcugccgcaagaccaaccgggccgaguccauccagcacagcccgggcgagaccgggcgcaagguguccgucaccagccacaacggccgcgugaucuccagcugggagagcuacaaguccgggggcgagacgaagcuguga

SEQ ID NO: 94942 - RNA, 1575 nt, Artificial Sequence
  derived and/or modified CDS sequence (opt1) from glycoprotein__RABV__EU267749.1
auggugccccagguccugcuguucgugccgcugcugguguucagcuccugcuucggcaaguuccccaucuacaccauccccgacaagcucgggcccuggagcccgaucgacauccaccaccuguccugccccaacaaccuggucguggaggacgagggcugcaccaaccucagcggguucuccuacauggagcugaaggugggcuacaucagcgccaucaaggucaacggguucacgugcaccggcguggugaccgaggccgagaccuacacgaacuucgucggcuacgugaccaccaccuucaagcgcaagcacuuccggcccaugcccgacgcgugccgcgccgccuacaacuggaagauggccggggacccgcgguacgaggagucccugcacaaccccuaccccgacuaccacuggcuccgcacggugaagaccaccaaggagagccuggucaucaucucccccagcguggccgaccuggacccguacgacaagucccuccacagccggguguuccccggcgggaagugcuccggcaucaccgucagcuccacgugcugcagcaccaaccacgacuacaccaucuggaugcccgagaacccccgccuggggaccuccugcgacaucuucacgaacagccggggcaagcgcgcguccaagggcgggaagaccugcggcuucguggacgagcgggggcuguacaagagccucaagggcgccugcaagcugaagcugugcggcgugcucgggcugcgccugauggacggcaccugggucgccauccagaccagcgacgagaucaaguggugcuccccggaccagcucgugaaccugcacgacuuccacagcgacgagaucgagcaccugguggucgaggagcucgugaagaagcgggaggagugccuggacgcccuggagacgaucaugaccaccaaguccgugagcuuccgccggcucucccaccuccgcaagcugguccccggguucggcaaggcguacaccaucuucaacaagacgcucaugggggccgacgcccacuacaagagcauccggaccuggaacgagaucauccccuccaagggcugccugcgcgugggcgggcggugccacccccacgucaacggcguguucuucaacgggaucauccugggcccggacgggcacgcccucauccccgagaugcagagcucccugcugcaccagcacauggagcuccuggagagcuccgugaucccccugaugcacccccucgccgacccgagcaccgucuucaaggacggcgacgaggcggaggacuucguggaggugcaccuccccgacguccacaagcagaucuccggcguggaccuggggcugcccaacuggggcaaguacgugcugaucagcgccggggcccugaccgcccucaugcugaugaucuuccugaugacgugcugccgcaaggccgaccgggcggaguccauccagcacaaccccggcgagaccgggcgcaaggucagcgugaccucccggaacggccgcgugaucagcuccugggagagcuacaagagcggcggggagaccaagcucuga

SEQ ID NO: 94943 - RNA, 1575 nt, Artificial Sequence
  derived and/or modified CDS sequence (opt1) from glycoprotein__RABV__EU267750.1
auggugccccagguccugcuguucgugccgcugcugguguucagcuccugcuucggcaaguuccccaucuacaccauccccgacaagcucgggcccuggagcccgaucgacauccaccaccuguccugccccaacaaccuggucguggaggacgagggcugcaccaaccucagcggguucuccuacauggagcugaaggugggcuacaucagcgccaucaaggucaacggguacacgugcaccggcguggugaccgaggccgagaccuacacgaacuucgucggcuacgugaccaccaccuucaagcgcaagcacuuccggcccaugcccgacgcgugccgcgccgccuacaacuggaagauggccggggacccgcgguacgaggagucccugcacaaccccuaccccgacuaccacuggcuccgcacggugaagaccaccaaggagagccuggucaucaucucccccagcguggccgaccuggacccguacgacaagucccuccacagccggguguuccccggcgggaagugcuccggcaucaccgucagcuccacgugcugcagcaccaaccacgacuacaccaucuggaugcccgagaacccccgccuggggaccuccugcgacaucuucacgaacagccggggcaagcgcgcguccaagggcgggaagaccugcggcuucguggacgagcgggggcuguacaagagccucaagggcgccugcaagcugaagcugugcggcgugcucgggcugcgccugauggacggcaccugggucgccauccagaccagcgacgagaucaaguggugcuccccggaccagcucgugaaccugcacgacuuccacagcgacgagaucgagcaccugguggucgaggagcucgugaagaagggggaggagugccuggacgcccuggagacgaucaugaccaccaaguccgugagcuuccggcgccucucccaccuccggaagcugguccccggcuucgggaaggcguacaccaucuucaacaagacgcucauggaggccgacgcccacuacaagagcauccgcaccuggaacgagaucauccccuccaagggcugccugcgggugggcgggcgcugccacccccacgucaacggcguguucuucaacgggaucauccugggcccggacgggcacgugcucauccccgagaugcagagcucccugcugcaccagcacauggagcuccuggagagcuccgucaucccccugaugcacccccucgccgacccgagcaccguguucaaggacggcgacgaggccgaggacuucguggagguccaccuccccgacgugcacaagcagaucuccggcguggaccuggggcugcccaacuggggccgguacguccugaucagcgcgggggcccugaccgcccucaugcugaugaucuuccugaugacgugcugccgcaaggccaaccgggccgaguccauccagcacaaccccgaggagaccggccgcaaggugagcgugaccucccacaacgggcgggucaucagcuccugggagagcuacaagagcggcggcgagaccaagcucuga

SEQ ID NO: 94944 - RNA, 1575 nt, Artificial Sequence
  derived and/or modified CDS sequence (opt1) from glycoprotein__RABV__EU267751.1
auggugccccagguccugcuguucgugccgcugcugguguucagcuccugcuucggcaaguuccccaucuacaccauccccgacaagcucgggcccuggagcccgaucgacauccaccaccugggcugccccaacaaccuggucguggaggacgaggggugcaccaaccucuccggcuucagcuacauggagcugaaggugggguacaucuccgccaucaaggucaacggcuucacgugcaccggcguggugaccgaggccgagaccuacacgaacuucgucggguacgugaccaccaccuucaagcgcaagcacuuccggcccaugcccgacgcgugccgcgccgccuacaacuggaagauggccggcgacccgcgguacgaggagagccugcacaaccccuaccccgacuaccacuggcuccgcacggugaagaccaccaaggagucccuggucaucaucagccccuccguggccgaccuggacccguacgacaagagccuccacucccggguguuccccgggggcaagugcagcgggaucaccgucuccagcacgugcugcuccaccaaccacgacuacaccaucuggaugcccgagaacccccgccugggcaccagcugcgacaucuucacgaacucccggggcaagcgcgcgagcaagggcgggaagaccugcggguucguggacgagcggggccuguacaagucccucaagggcgccugcaagcugaagcugugcggggugcucggccugcgccugauggaccggaccugggucgccauccagaccagcgacgagaucaaguggugcagcccggaccagcucgugaaccugcacgacuuccacuccgacgagaucgagcaccugguggucgaggagcucgugaagaagcgcgaggagugccuggacgcccuggagacgaucaugaccaccaagagcguguccuuccggcgccucagccaccuccggaagcugguccccggguucggcaaggcguacaccaucuucaacaagacgcucauggaggccgacgcccacuacaaguccauccgcaccuggaacgagaucauccccagcaaggggugccugcgggugggcggccgcugccacccccacgucaacgggguguucuucaacggcaucauccuggggccggacggccacgugcucauccccgagaugcaguccagccugcugcaccagcacauggagcuccuggaguccagcgucaucccccugaugcacccccucgccgacccguccaccguguucaaggacggggacgaggccgaggacuucguggagguccaccuccccgacgugcacaagcagaucagcggcguggaccugggccugcccaacugggggaaguacguccugaucuccgcgggcgcccugaccgcccucaugcugaugauccugcucaugacgugcugccggaaggccaaccgcgccgagagcauccagcacaaccccggggagaccggccggaagguguccgugaccagccacaacgggcgcgucaucuccagcugggaguccuacaagagcggcggcgagaccaagcuguga

SEQ ID NO: 94945 - RNA, 1575 nt, Artificial Sequence
  derived and/or modified CDS sequence (opt1) from glycoprotein__RABV__EU267752.1
augaucccccaggugcugcuguucgucccgcugcugguguucagcuccugcuucggcaaguuccccaucuacaccauccccgacaagcucgggcccuggagcccgaucuucauccacccccugcugcgccccaacaaccucguggucgaggacgagggcugcaccaaccuguccggguucagcuacauggagcugaaggugggcuacaucuccgccaucaaggugaacggguucacgugcaccggcgucgugaccgaggccgagaccuacacgaacuucgugggcuacgucaccaccaccuucaagcggaagcacuuccgccccaugccggacgcgugccgggccgccuacaacuggaagauggccggggacccccgcuacgaggagagccuccacaaccccuaccccgacuaccacuggcugcggacggugaagaccaccaaggagucccuggugaucaucagcccguccgucgccgaccucgaccccuacgacaagagccugcacucccgcguguuccccggcgggaagugcagcggcaucaccguguccagcacgugcugcuccaccaaccacgacuacaccaucuggaugcccgagaacccgcggcuggggaccagcugcgacaucuucacgaacucccgcggcaagcgggcgagcaagggcgggaagaccugcggcuucgucgacgagcgcgggcucuacaagucccugaagggcgccugcaagcugaagcucugcggcgugcuggggcugcggcucauggacggcaccuggguggccauccagaccagcgacgagaucaaguggugcagccccgaccagcuggucaaccugcacgacuuccacuccgacgagaucgagcaccucgugguggaggagcuggucaagaagcgcgaggagugccuggacgcccucgagacgaucaugaccaccaagagcguguccuuccggcgccugagccaccuccggaagcucgugcccggguucggcaaggcguacaccaucuucaacaagacgcugauggaggccgacgcccacuacaaguccauccgcaccuggaacgagaucauccccagcaaggggugccugcgggucggcggccgcugccacccgcacgugaacggggucuucuucaacggcaucauccucgggcccgacggccacgugcugauccccgagaugcaguccagccugcuccaccagcacauggagcugcuggaguccagcgugaucccccucaugcacccgcuggccgaccccuccaccgucuucaaggacggggacgaggccgaggacuucguggaggugcaccuccccgacguccacaagcagaucagcggcguggaccugggccugcccaacugggggaaguacgugcugaucuccgcgggcgcccucaccgcccugaugcugacgaucuuccucaugaccugcugccggaagaccaaccgcgccgggagcauccagcacuccccgggcgagaccgggcggaaggucagcgugacgucccacaacggccgcgugaucagcuccugggagagcuacaagagcggcuccgagaccaagcuguga

SEQ ID NO: 94946 - RNA, 1575 nt, Artificial Sequence
  derived and/or modified CDS sequence (opt1) from glycoprotein__RABV__EU267753.1
augaucccccaggugcugcuguucgucccgcugcugguguucagcuccugcuucggcaaguuccccaucuacaccauccccgacaagcucgggcccuggagcccgaucgacauccaccaccuguccugccccaacaaccugguggucgaggacgagggcugcaccaaccucagcggguucuccuacauggagcugaaggugggcuacaucagcgccaucaaggugaacggguucacgugcaccggcgucgugaccgaggccgagaccuacacgaacuucgugggcuacgucaccaccaccuucaagcgcaagcacuuccggcccacgcccgacgcgugccgcgccgccuacaacuggaagauggccggggacccgcgguacgaggagucccugcacaaccccuaccccgacuaccacuggcuccgcaccgugaagaccagcaaggagucccuggugaucaucagccccuccgucgccgaccuggacccguacgacaagagccuccacucccggguguuccccggcgggaagugcagcggcaucaccguguccagcacgugcugcuccaccaaccacgacuacaccaucuggaugcccgagaacccccgccuggggaccagcugcgacaucuucacgaacucccggggcaagcgcgcgagcaagggcgggaagaccugcggcuucgucgacgagcgggggcuguacaagagccucaagggcgccugcaagcugaagcugugcggcgugcucgggcugcgccugauggacggcaccuggguggccauccagaccuccgacgagaucaaguggugcagcccggaccagcucgucaaccugcacgacuuccacuccgacgagaucgagcaccuggugguggaggagcucgucaagaagcgggaggagugccuggacgcccuggagacgaucaugaccaccaagagcguguccuuccgccggcucagccaccuccgcaagcuggugcccggguucggcaaggcguacaccaucuucaacaagacgcucauggaggccgacgcccacuacaaguccauccggaccuggaacgagaucauccccagcaaggggugcuuccgcgucggcggccggugccacccccacgugaacggggucuucuucuccggcaucauccuggggccggacggccacgugcugauccccgagaugcagagcucccuccugcaccagcacauggagcugcucgagagcuccgugaucccccugaugcacccccuggccgacccgagcaccgucuucaaggacggggacgaggccgaggacuucguggaggugcaccuccccgacguccacaagcagaucuccggcguggaccugggccugcccaacugggggaaguacgugcucgucggcgcgggggcccugaccgcccugaugcucaugaucuuccugaugacgugcugccgcaagaccaaccgggccgagagcauccagcacucccccggcgagaccgggcgcaaggugagcgugaccucccacaacggccgggucaucagcagcugggaguccuacaagagcggcggggagacgaagcuguga

SEQ ID NO: 94947 - RNA, 1575 nt, Artificial Sequence
  derived and/or modified CDS sequence (opt1) from glycoprotein__RABV__EU267754.1
augaucccccaggugcuccuguucgucccgcugcugguguucagcuccugcuucggcaaguuccccaucuacaccauccccgaccgccucgggcccuggagcccgaucgacauccaccaccuguccugccccaacaacaugguggucgaggacgagggcugcaccaaccugagcggguucuccuacauggagcucaaggugggcuacaucagcgccaucaaggugaacggguucacgugcaccggcgucgugaccgaggccgagaccuacacgaacuucgugggcuacgucaccaccaccuucaagcggaagcacuuccgccccaugcccgacgcgugccgggccgccuacaacuggaagauggccggggacccgcgcuacgaggagucccugcacaaccccuaccccgacuaccacuggcugcggacggugaagaccaccaaggagagccucgugaucaucucccccagcgucgccgaccuggacccguacgacaagucccugcacagccgcguguuccccggcgggaagugcuccggcaucaccgugagcuccacgugcugcagcaccaaccacgacuacaccaucuggaugcccgagaacccccggcucgggaccuccugcgacaucuucacgaacagccgcggcaagcgggcguccaagggcgggaagaccugcggcuucgucgacgagcgcgggcuguacaagagccugaagggcgccugcaagcuccggcugugcggcgugcuggggcuccgccugauggacggcaccuggguggccauccagaccagcgacgagaucaaguggugcuccccggaccagcuggucaaccuccacgacuuccacagcgacgagaucgagcaccugguggccgaggagcuggugaagaagcgggaggagugccucgacgcgcuggagacgaucaugaccaccaaguccgucagcuuccgccggcugucccaccuccgcaagcuggugcccggguucggcaaggccuacaccaucuucaacaagacgcugauggaggccgacgcccacuacaagagcauccggaccuggaacgagaucauccccuccaaggggugccuccgcgugggcggccggugccacccccacgucaacgggguguucuucaacggcaucauccuggggccggacggccacguccugauccccgagaugcagagcucccuccugcaccagcacauggagcugcucgagagcuccgugaucccccugaugcacccccuggccgacccgagcaccguguucaaggacggggacgaggcggaggacuucgucgaggugcaccuccccgacgugcacaagcagaucuccggcgucgaccugggccugcccaacugggggaaguacgugcucaucagcgccggcgcccugaccgcccugaugcucacgaucuuccugaugaccugcugccgcaagaccucccgggccgagagcauccagcacucccccggggagaccggccgcaaggugagcgucacgucccacaacgggcgcgugaucagcagcugggaguccuacaagagcggcggcgagaccaagcuguga

SEQ ID NO: 94948 - RNA, 1575 nt, Artificial Sequence
  derived and/or modified CDS sequence (opt1) from glycoprotein__RABV__EU267755.1
augaucccccaggugcugcuguucgucccgcugcugguguucagcuccugcuucggcaaguuccccaucuacaccauccccgacaagcucgggcccuggagcccgaucgacauccaccaccuguccugccccaacaaccugguggucgaggacgagggcugcaccaaccucagcggguucuccuacauggagcugaaggugggcuacaucagcgccaucaaggugaacggguucacgugcaccggcgucgugaccgaggccgagaccuacacgaacuucgugggcuacgucaccaccaccuucaagcgcaagcacuuccggcccacgcccgacgcgugccgcgccgccuacaacuggaagauggccggggacccgcgguacgaggagucccugcacagccccuaccccgacuaccacuggccccgcaccgugaagaccuccaaggagagccucgugaucaucuccccgggcgucgccgaccuggaccccuacgacaagagccugcacucccggguguuccccgggggcaagugcagcgggaucaccguguccagcacgugcugcuccaccaaccacgacuacaccaucuggaugcccgagaacccgcgccucggcaccagcugcgacaucuucacgaacucccggggcaagcgcgcgagcaagggcgggaagaccugcggguucgucgacgagcggggccuguacaagagccugaagggcgccugcaagcucaagcugugcggggugcugggccuccgccugauggacgggaccuggguggccauccagaccuccgacgagaucgaguggugcagccccgaccagcuggucaaccuccacgacuuccacuccgacgagaucgagcaccuggugguggaggaguucgucaagaagcgggaggagugccuggacgcccucgagacgaucaugaccaccaagagcguguccuuccgccggcugagccaccuccgcaagcucgugcccggcuucgggaaggcguacaccaucuucaacaagacgcugauggaggccgacgcccacuacaaguccauccggaccuggaacgagaucauccccagcaagggcugccugcgcgucggcgggcggugccacccgcacguguacggcgucuucuucaacgggaucauccucggccccgacgggcacgugcugauccccgagaugcaguccagccugcuccgccagcacauggagcugcuggaguccagcgugaucccccucaugcacccgcuggccgaccccuccaccgucuucaaggacggcgacgaggccgaggacuucguggaggugcaccuccccgacguccacaagcagaucagcggcguggaccccgggcugccgaacuggggcaaguacgugcuggucuccgcgggggcccugaccgcccucaugcugaugaucuuccugacgaccugcugccggaagaccaaccgcgccgagagcauccagcacucccccggcgagaccgggcggaaggugagcgugacgucccacaacggccgcgucaucagcagcugggaguccuacaagagcggcggggagaccaagcucuga

SEQ ID NO: 94949 - RNA, 1575 nt, Artificial Sequence
  derived and/or modified CDS sequence (opt1) from glycoprotein__RABV__EU267756.1
augaucccccaggugcuccuguucgucccgcugcugguguucagccucugcuucggcaaguuccccaucuacaccauccccgacaagcuggggcccugguccccgaucgacauccugcaccucagcugccccaacaaccugguggucgaggacgagggcugcaccgaccuguccggguucagcuacauggagcucaaggugggcuacaucuccgccaucaaggugaacggguucacgugcaccggcgucgugaccgaggccgagaccuacacgaacuucgugggcuacgucaccaccaccuucaagcgcaagcacuuccggcccacgcccgacgcgugccgcgccgccuacaacuggaagauggccggggacccgcgguacgaggagagccugcacaaccccuaccccgacuaccacuggcugcgcaccgugaagaccuccaaggagagccucgugaucaucucccccagcgacgccgaccuggacccguacgacaagucccugcacagccgggucuuccccggcgggaagugcuccggcaucaccgugagcuccacgugcugcagcaccaaccacgacuacaccaucuggaugcccgagaacccccgccucgggaccuccugcgacaucuucacgaacagccggggcaagcgcgcguccaagggcgggaagaccugcggcuucguggacgagcgggggcuguacaagagccugaagggcgccugcaagcucaagcugugcggcguccuggggcuccgccugauggacggcaccuggguggccauccagaccagcgacgagaucaaguggugcuccccggaccagcuggugaaccuccacgacuuccacagcgacgagaucgagcaccuggucguggaggagcuggugaagaagcgggaggagugccucgacgcccuggagacgaucaugaccaccaaguccgucagcuuccgccggcugucccaccuccgcaagcuggugcccggguucggcaaggcguacaccaucuucaacaagacgcugauggaggccgacgcccacuacaagagcauccggaccuggaacgagaucauccccuccaaggggugccuccgcgugggcggccggugccacccccacgucaacgggguguucuucaacggcaucauccuggggccggacggccacguccugauccccgagaugcagagcucccuccugcaccagcacauggagcugcucgagagcuccgugaucccccugaugcacccccuggccgacccgagcaccguguucaaggacggggacgaggccgaggacuucgucgaggugcaccuccccgacgugcacaagcagaucuccggcgucgaccugggccugcccaacugggggaaguacgugcucgugagcgcgggcgcccugaccgcccugaugcucaugaucuuccugaugacgugcugccgcaagaccaaccgggccgaguccauccagcacagccccggggagaccggccgcaaggucuccgugaccagccacaacgggcgggugaucuccagcugggagagcuacaaguccggcggcgagacgaagcuguga

SEQ ID NO: 94950 - RNA, 1575 nt, Artificial Sequence
  derived and/or modified CDS sequence (opt1) from glycoprotein__RABV__EU267757.1
augaucccccaggugcugcuguucgucccgcugcugguguucagcuccugccucggcaaguuccccaucuacaccauccccgacaagcuggggcccuggagcccgaucgacauccaccaccuguccugccccaacaaccucguggucgaggacgagggcugcaccaaccugagcggguucuccuacauggagcugaaggugggcuacaucagcgccaucaaggugaacggguucacgugcaccggcgucgugaccgaggccgagaccuacacgaacuucgugggcuacgucaccaccaccuucaagcgcaagcacuuccggcccacgcccgacgcgugccgcgccgccuacaacuggaagauggccggggacccgcgguacgaggagucccuccacaaccccuaccccgacuaccacuggcugcgcaccgugaagaccagcaaggagucccuggugaucaucagccccuccgucgccgaccucgacccguacgacaagagccugcacucccggguguuccccggcgggaagugcagcggcaucaccguguccagcacgugcugcuccaccaaccacgacuacaccaucuggaugcccgagaacccccgccuggggaccagcugcgacaucuucacgaacucccggggcaagcgcgcgagcaagggcgggaagaccugcggcuucgucgacgagcgggggcucuacaagagccugaagggcgccugcaagcugaagcucugcggcgugcuggggcugcgccucauggacggcaccuggguggccauccagaccuccgacgagaucaaguggugcagcccggaccagcuggucaaccugcacgacuuccacuccgacgagaucgagcaccucgugguggaggagcuggucgagaagcgggaggagugccuggacgcccucgggacgaucaugaccaccaagagcguguccuucggccgccugagccaccuccggaagcucgugcccggguucggcaaggcguacaccaucuucaacaagacgcugauggaggccgacgcccacuacaaguccauccgcaccuggaacgagaucauccccagcaagggcugccugcgggucgggggccgcugccacccccacgugaacggggucuucuucaacggcaucauccucgggccggaccggcacgugcugauccccgagaugcaguccagccugcuccaccagcacauggagcugcuggaguccagcgugaucccccucaugcacccccuggccgacccguccaccgucuucaaggacggcgacgaggccgaggacuucguggaggugcaccuccccgacguccacaagcagaucagcggcguggaccuggggcugcccaacuggggcaaguacgugcuggucuccgcgggggcccucaccgcccugaugcugaugaucuuccucaugacgugcugccgcaagaccaaccgggccgagagcauccagcacucccccggcgagaccgggcgcaaggugagcgugaccucccacaacggccgggucaucagcagcugggaguccuacaagagcggcggggagacgaagcuguga

SEQ ID NO: 94951 - RNA, 1575 nt, Artificial Sequence
  derived and/or modified CDS sequence (opt1) from glycoprotein__RABV__EU267758.1
augaucccccaggugcugcuguucgucccgcugcugguguucagcuccugcuucggcaaguuccccaucuacaccauccccgacaagcucgggcccuggaucccgaucgacauccaccaccugagcugccccaacaaccugguggucgaggacgagggcugcaccaaccucuccggguucagcuacauggagcugaaggugggcuacaucuccgccaucaaggugaacggguucacgugcaccggcgucgugaccgaggccgagaccuacacgaacuucgugggcuacgucaccaccaccuucaagcgcaagcacuuccggcccaugcccgacgugugccgcgcggccuacaacuggaagauggccggggacccgcgguacgaggagagccugcacaaccccuaccccgacuaccacuggcuccgcacggugaagaccaccaaggagucccuggucaucaucagccccuccguggccgaccuggacccguacgacaagagccuccacucccggguguuccccggcgggaagugcagcggcaucaccgucuccagcacgugcugcuccaccaaccacgacuacaccaucuggaugcccgagaacccccgccuggggaccagcugcgacaucuucacgaacucccggggcaagcgcgccagcaagggcgggaagaccugcggcuucguggacgagcgggggcuguacaagucccucaagggcgcgugccgccugaagcugugcggcgugcucgggcugcggcugauggacggcaccugggucgccauccagaccagcgacgagaucaaguggugcagcccggaccagcucgugaaccugcacgacuuccacuccgacgagaucgagcaccugguggucgaggagcucgugaagaagcgcggggagugccuggacgcccuggagacgaucaugaccaccaagagcguguccuuccggcgccucagccaccuccggaagcuggucccccgcuucggcaaggccuacaccaucuucaacaagacgcucauggaggcggacgcccacuacaaguccauccggaccuggaacgagaucauccccagcaaggggugccugcgcgugggcggccggugccgcccccacgucaacgggguguucuucaacggcaucauccuggggccggacggccacgugcucauccccgagaugcaguccagccugcugcaccagcacauggagcuccuggaguccagcgucaucccccugaugcacccccucgccgacccguccaccguguucaaggacggggacgaggccgaggacuucguggaggucuaccugcccgacgugcacaagcagaucagcggcguggaccugggccuccccaacugggggaaguacguccugaucuccgccggcgcgcugaccgcccucaugagcaugaucuuccugaugacgugcugccggaagaccaaccgcgccgaguccauccagcacagccccggggagaccggccgcaagguguccgugaccagccacaacgggcgggacaucuucuccugggagagcuacaagagcggcggcgagacgaagcuguga

SEQ ID NO: 94952 - RNA, 1575 nt, Artificial Sequence
  derived and/or modified CDS sequence (opt1) from glycoprotein__RABV__EU267759.1
augaucccccaggugcugcuguucgucccgcugcugguguucagcuccugcuucggcaaguuccccaucuacaccauccccgacaagcucgggcccuggagcccgaucgacauccaccaccuguccugccccaacaaccugguggucgaggacgagggcugcaccaaccucagcggguucuccuacauggagcugaaggugggcuacaucagcgccaucaaggugaacggguucacgugcaccggcgucgugaccgaggccgagaccuacacgaacuucgugggcuacgucaccaccaccuucaagcgcaagcacuuccggcccacgcccgacgcgugccgcgccgccuacaacuggaagauggccggggacccgcgguacgaggagucccugcacaaccccuaccccgacuaccacuggcuccgcaccguggagaccagcaaggagucccuggugaucaucagccccuccgucgccgaccuggacccguacgacaagagccuccacucccggguguuccccggcgggaagugcagcggcaucaccguguccagcacgugcugcuccaccaaccacgacuacaccaucuggaugcccgagaacccccgccuggggaccagcugcgacaucuucacgaacucccggggcaagcgcgcgagcaagggcgggaagaccugcggcuucgucgacgagcgggggcuguacaagagccucaagggcgccugcaagcugaagcugugcggcgugcucgggcugcgccugauggacggcaccuggguggccauccagaccuccgacgagaucaaguggugcagcccggaccagcucgucaaccugcacggguuccacuccgacgagaucgagcaccuggugguggaggagcucgucaagaagcgggaggagugccuggacgcccuggagacgaucaugaccaccaagagcguguccuuccgccggcucagccaccuccgcaagcuggugcccggcuucgggaaggcguacaccaucuucaacaagacgcucauggaggccgacgcccacuacaaguccauccggaccuggaacgagaucauccccagcaagggcugccugcgcgucggcgggcggugccacccccacgugaacggcgucuucuucaacgggaucauccugggcccggacgggcacgugcucauccccgagaugcaguccagccugcugcaccagcacauggagcuccuggaguccagcgugaucccccugaugcacccccucgccgacccguccaccgucuucaaggacggcgacgaggccgaggacuucguggaggugcaccuccccgacguccacaagcagaucagcggcguggaccuggggcugcccaacuggggcaaguacgugcuggucuccgcgggggcccugaccgcccucaugcugaugaucuuccugaugacgugcugccgcaagaccaaccgggccgagagcauccagcacucccccggcgagaccgggcgcaaggugagcgugaccucccacaacggccgggucaucagcagcugggaguccuacaagagcggcggggagacgaagcucuga

SEQ ID NO: 94953 - RNA, 1575 nt, Artificial Sequence
  derived and/or modified CDS sequence (opt1) from glycoprotein__RABV__EU267760.1
augaucccccaggugcugcuguucgucccgcugcugguguucagcuccugcuucggcaaguuccccaucuacaccauccccgacaagcucgggcccuggagcccgaucgacauccaccaccuguccugccccaacaaccugguggucgaggacgagggcugcaccaaccucagcggguucuccuacauggagcugaaggugggcuacaucagcgccaucaaggugaacggguucacgugcaccggcgucgugaccguggccgagaccuacacgaacuucgucggcuacgugaccaccaccuucaagcgcaagcacuuccggcccaugcccgacgcgugccgcgccgccuacaacuggaagauggccggggacccgcgguacgaggagucccugcacaacagcuaccccgacuaccacuggcuccgcacggugaagacccccaaggagucccuggucaucaucagccccuccguggccgaccuggacccguacgacaagagccuccacucccggguguuccccggcgggaagugcagcggcaucaccgucuccagcacgugcugcuccaccaaccacgacuacaccaucuggaugcccgagaacccccgccuggggaccagcugcgacaucuucaccaacucccggggcaagcgcgcgagcaagggcgggaagacgugcggcuucguggacgagcgggggcuguacaagagccucaagggcgccugcaagcugaagcugugcggcgugcucgggcugcgccugauggacggcaccugggucgccauccagaccuccgacgagaucaaguggugcagcccggaccagcucgugaaccugcacgacuuccacuccgacgagaucgagcaccugguggucgaggagcucgugaagaagcgggaggagugccuggacgcccuggagaccaucaugacgaccaagagcguguccuuccgccggcucagccaccuccgcaagcugguccccggguucggcaaggcguacaccaucuucaacaagacccucauggaggccgacgcccacuacaaguccauccggacguggaacgagaucauccccagcaaggggugccugcgcgugggcggccggugccacccccacgucaacgggguguucuucaacggcaucauccuggggccggacggccacgugcucauccccgagaugcaguccagccugcugcaccagcacauggagcuccuggaguccagcgucaucccccugaugcacccccucgccgacccguccaccguguucaaggacggggacgaggccgaggacuucguggagguccaccuccccgacgugcacaagcagaucagcggcguggaccugggccugcccaacugggggaaguacguccugaucuccgcgggcgcccugaccgcccucaugcugaugaucuuccugaugaccugcugccgcaagacgaaccgggccgagagcauccagcacucccccggggagaccggccgcaaggugagcgugaccucccacaacgggcgggucaucagcagcugggagccguacaaguccggcggcgagaccaagcucuga

SEQ ID NO: 94954 - RNA, 1575 nt, Artificial Sequence; identical to SEQ ID NO: 94867
  derived and/or modified CDS sequence (opt1) from glycoprotein__RABV__EU267761.1

SEQ ID NO: 94955 - RNA, 1575 nt, Artificial Sequence; identical to SEQ ID NO: 94863
  derived and/or modified CDS sequence (opt1) from glycoprotein__RABV__EU267762.1

SEQ ID NO: 94956 - RNA, 1575 nt, Artificial Sequence
  derived and/or modified CDS sequence (opt1) from glycoprotein__RABV__EU267763.1
augaucccccaggugcugcuguucgucccgcugcugguguucagcuccugcuucggcaaguuccccaucuacaccauccccgacaagcucgggcccuggagcccgaucgacauccaccaccuguccugccccaacaaccugguggucgaggacgagggcugcaccaaccucagcggguucuccuacauggagcugaaggugggcuacaucagcgccaucaaggugaacggguucacgugcaccggcgucgugaccgaggccgagaccuacacgaacuucgugggcuacgucaccaccacccugaagcgcaagcacuuccggcccaugcccgacgcgugccgcgccgccuacaacuggaagaucgccggggacccgcgguacgaggagucccuccacaaccccuaccccgacuaccaccgccugcggacggugaagaccaccaaggagagccuggugaucaucucccccagcgucgccgaccucgacccguacgacaagucccugcacagccgcguguuccccggcgggaagugcuccggcaucaccgugagcuccacgugcugcagcaccaaccacgacuacaccaucuggaugcccgagaacccccggcuggggaccuccugcgacaucuucacgaacagccgcggcaagcgggcguccaagggcgggaagaccugcggcuucgucgacgagcgcgggcucuacaagagccugaagggcgccugcaagcugaagcucugcggcgugcuggggcugcggcucauggacggcaccuggguggccauccagaccagcgacgagaucaaguggugcuccccggaccagcuggucaaccugcacgacuuccacagcgacgagaucgagcaccucgugguggaggagcuggucaagaugcgcgaggagugccuggacgcccucgagacgaucaugaccaccaaguccgugagcuuccggcgccugucccaccuccggaagcucgugcccggguucggcaaggcguacaccaucuucaacaagacgcugauggaggccgacgcccacuacaagagcauccgcaccuggaacgagaucauccccuccaaggggugccugcgggucggcggccgcugccacccccacgugaacggggucuucuucaacggcaucauccucgggccggacggccacgugcugauccccgagaugcagagcucccugcuccaccagcacauggagcugcuggagagcuccgugaucccccucaugcacccccuggccgacccgagcaccgucuucaaggacggggacgaggccgaggacuucguggaggugcaccuccccgacguccacaagcagaucuccggcguggaccugggccugcccaacugggggaaguacgugcugaucagcgcgggcgcccucaccgcccugauguccaugaucuuccugaugacgugcugccggaagaccaaccgcgccgagagcauccagcacucccccggggagaccggccggaaggucagcgugaccucccacaacgggcgcgugaucagcagcugggaguccuacaagagcggcggcgagacgaagcucuga

SEQ ID NO: 94957 - RNA, 1575 nt, Artificial Sequence
  derived and/or modified CDS sequence (opt1) from glycoprotein__RABV__EU267764.1
augaucccccaggugcugcuguucgucccgcugcuggugagcuccagcugcuucggcaaguuccccaucuacaccauccccgacaagcucgggcccugguccccgaucgacauccaccaccugagcugccccaacaaccugguggucgaggacgagggcugcaccucccucagcggguucuccuacauggagcugaaggugggcuacaucagcgccaucaaggugaacggguucacgugcaccggcgucgugaccgaggccgagaccuacacgaacuucgugggcuacgucaccaccaccuucaagcgcaagcacuuccggcccaugcccgacgcgugccgcgccgccuacaacuggaagauggccggggacccgcgguacgaggagucccugcacaaccccuaccccgacuaccacuggcuccgcacggugaagaccaccaaggagagccuggugaucaucucccccagcgucgccgaccuggacccguacgacaagucccuccacagccggguguuccccggcgggaagugcuccggcaucaccgugagcuccacgugcugcagcaccaaccacgacuacaccaucuggaugcccgagaacccccgccuggggaccuccugcgacgucuucacgaacagccggggcaagcgcgcgagcaagggcgggaagaccugcggcuucguggacgagcgggggcuguacaagucccucaagggcgccugcaagcugaagcugugcggcgugcucgggcugcgccugauggacggcaccugggucgccauccagaccagcgacgggaucaaguggugcuccccggaccagcucgugaaccugcacgacuuccacagcgacgagaucgagcaccugguggucgaggagcucgugaagaagcgggaggagugccuggacgcccuggagacgaucaugaccaccaaguccgugagcuuccgccggcucucccaccuccgcaagcugguccccggcuucgggaaggcguacaccaucuucaacaagacgcucauggaggccgacgcccacuacaagagcauccggaccuggaacgagaucauccccuccaagggcugccugcgcgugggcgggcggugccacccccacgucaacggcguguucuucaacgggaucauccugggcccggacgggcacgugcucauccccgagaugcagagcucccugcugcaccagcacauggagcuccuggagagcuccgucaucccccugaugcacccccucgccgacccgagcaccguguucaaggacggcgacgaggccgaggacuucguggagguccaccuccccgacgugcacaagcagaucuccggcguggaccuggggcugcccaacuggggcaaguacguccugaucagcgcgggggcccugaccgcccucauguccaugaucuuccugaugacgugcugccgcaagaccaaccgggccgagagcauccagcacucccccggcgagaccgggcgcaaggugagcgugaccagccacaacggccgggucaucuccagcugggaguccuacaagagcggcggggagacgaagcuguga

SEQ ID NO: 94958 - RNA, 1575 nt, Artificial Sequence
  derived and/or modified CDS sequence (opt1) from glycoprotein__RABV__EU267765.1
augaucccccaggugcugcuguucgucccgcugcugguguucagcuccugcuucuggaaguuccccaucuacaccauccccgacaagcucggccccuggagcccgaucgacauccaccaccuguccugccccagcaaccugguggucgaggacgaggggugcaccaaccucuucggcuucuccuacauggagcugaaggugggguacaucagcgccaucaaggugaacggcuucacgugcaccggggucgugaccgaggccgagaccuacacgaacuucgugggcuacgucaccaccaccuucaagcgcaagcacuuccggcccaugcccgacgcgugccgcgccgccuacaacuggaagauggccggcgacccgcgguacgaggagucccugcacaaccccuaccccgacuaccacuggcuccgcacggugaagaccaccaaggagagccuggugaucaucucccccagcgucgccgaccuggacccguacgacaagucccuccacagccggguguuccccgggggcaagugcuccgggaucaccgugagcuccacgugcugcagcaccaaccacgacuacaccaucuggaugcccgagaacccccgccugggcaccuccugcgacaucuucacgaacagccgggggaagcgcgcguccaagggcggcaagaccugcggguucgucgacgagcggggccuguacaagagccucaagggggccugcaagcugaagcugugcggcgugcucggccugcgccugauggacgggaccuggguggccauccagaccagcgacgagaucaaguggugcuccccggaccagcucgucaaccugcacgacuuccacagcgacgagaucgagcaccuggugguggaggagcucgucaagaagcgggaggagugccuggacgcccuggagacgaucaugaccaccaaguccgugagcuuccgccggcucucccaccuccgcaagcuggugcccggcuucgggaaggcguacaccaucuucaacaagacgcucauggaggccgacgcccacuacaagagcauccggaccuggaacgagaucauccccuccaagggcugccugcgcgucgggggccggugccacccccacgugaacggcgucuucuucaacgggaucauccugggcccggacgggcacgugcucauccccgagaugcagagcucccugcugcaccagcacauggagcuccuggagagcuccgugaucccccugaugcacccccucgccgacccgagcaccgucuucaaggacggcgacgaggccgaggacuucguggaggugcaccuccccgacguccacaagcagaucuccgggguggaccugggccugcccaacuggggcaaguacgugcugaucagcgcgggggcccugaccgcccucauguccaugaucuuccugaugacgugcugccgcaagaccauccgggccgagagcauccagcacucccccggcgagaccgggcgcaaggucagcgugaccucccacaacggccgggugaucagcagcugggaguccuacaagagcgggggcgagacgaagcuguga

SEQ ID NO: 94959 - RNA, 1575 nt, Artificial Sequence
  derived and/or modified CDS sequence (opt1) from glycoprotein__RABV__EU267766.1
augaucccccaggugcugcuguucgucccgcugcugguguucagcuccugcuucggcaaguuccccaucuacaccauccccgacaagcucgggcccuggagcccgaucgacauccaccaccuguccugccccaacaaccugguggucgaggacgacggcugcaccaaccucagcgggcuguccuacauggagcugaaggugggcuacaucagcgccaucaaggugaacggguucacgugcaccggcgucgugaccgaggccgagaccuacacgaacuucgugggcuacgucaccaccaccuucaagcgcaagcacuuccggcccaugcccgacgcgugccgcgccgccuacaacuggaagaucgccggggacccgcgguacgaggagucccuccacaaccccuaccccgacuaccacuggcugcgcacggugaagaccaccaaggagagccccgugaucaucuccccgagcgucgccgaccuggaccccuacgacaagucccuccacagccggguguuccccggcgggaagugcuccggcaucaccgugagcuccacgugcugcagcaccaaccacgacuacaccaucuggaugcccgagaacccgcgccuggggaccuccugcgacaucuucacgaacagccggggcaagcgcgcguccaagggcgggaagaccugcggcuucgucgacgagcgggggcuguacaagagccucaagggcgccugcaagcugaagcugugcggcgugcucgggcugaagcugauggacggcaccuggguggccauccagaccagcgacgagaucaaguggugcucccccgaccagcucgucaaccugcacgacuuccacagcgacgagaucgagcaccuggugguggaggagcucgucaagaagcgcgaggagugccuggacgcccuggagacgaucaugaccaccaaguccgugagcuuccggcgccucucccaccuccggaagcuggugcccggguucggcaaggcguacaccaucuucaacaagacgcucauggaggccgacgcccacuacaagagcauccgcaccuggaacgagaucauccccuccaaggggugccugcgggucggcggccgcugccacccgcacgugaacggggucuucuucaacggcaucauccuggggcccgacggccacgugcucauccccgagaugcagagcucccugcugcaccagcacauggagcuccuggagagcuccgugaucccccugaugcacccgcucgccgaccccagcaccgucuucaaggacggggacgaggccgaggacuucguggaggugcaccuccccgacguccacaagcagaucuccggcguggaccugggccugcccaacugggggaaguacgugcugaucagcgcgggcgcccugaccgcccucauguccaugaucuuccugaugacgugcugccggaagaccaaccgcgccgagagcauccagcacuccccgggggagaccggccggaaggucagcgugaccucccacaacgggcgcgugaucagcagcugggaguccuacaagagcggcggcgagacgaagcuguga

SEQ ID NO: 94960 - RNA, 1575 nt, Artificial Sequence
  derived and/or modified CDS sequence (opt1) from glycoprotein__RABV__EU267767.1
augacgccccaggugcugcuguucgucccgcugcugguguucagcuccugcuucggccgcuuccccaucuacaccauccccgacaagcucgggcccuggagcccgaucgacauccaccaccuguccugccccaacaaccugguggucgaggacgagggcugcaccaaccucagcggguucuccugcauggagcugaaggugggcuacaucagcgccaucaaggugaacggguucacgugcaccggcgucgugaccgaggccgagaccuacaccaacuucgugggcuacgucaccaccacguucaagcggaagcacuuccgccccaugcccgacgcgugccgggccgccuacaacuggaagauggccggggacccgcgcuacgaggagucccugcacaaccccuaccccgacuaccacuggcuccggaccgugaagaccaccaaggagagccuggugaucaucucccccagcgucgccgaccuggacccguacgacaagucccuccacagccgcguguuccccggcgggaagugcuccggcaucacggugagcuccacccggugcagcaccaaccacgacuacaccaucuggaugcccgagaacccccgccuggggacguccugcgacaucuucaccaacagccggggcaagcgcgcguccaagggcgggaagaccugcggcuucgucgacgagcgggggcuguacaagagccucaagggcgccugcaagcugaagcugugcggcgugcucgagcugcgccugauggacgggaccugggccgccauccagacgagcgacgagaucaaguggugcuccccggaccagcucgugaaccugcacgacuuccacagcgacgagaucgaccaccuggucguggaggagcucgugaagaagcgggaggagugccuggacgcgcuggagaccaucaugaccaccaaguccgucagcuuccgccggcucucccaccuccgcaagcuggugcccggcuucgggaaggccuacacgaucuucaacaagacccucauggaggccgacgcccacuacaagagcauccggaccuggaacgagaucauccccuccaagggcugccugcgcgucgggggccggugccacccccacgugaacggcguguucuucaacgggaucauccugggcccggacgggcacguccucauccccgagaugcagagcucccugcugcaccagcacauggagcuccuggagagcuccgugaucccccugaugcacccccucgccggcccgagcaccguguucaaggacggggacgaggcggaggacuucgucgaggugcaccuccccgacgugcacaagcagaucuccggcgucgaccugggccugcccaacugggggaaguacgugcugaucagcgccggcgcccugacggcccucauguccaugaucuuccugaugaccugcugccgcaagaccaaccgggccgagagcauccagcacucccccggggagaccggccgcaaggugagcgucacgucccacaacgggcgcgugaucagcagcugggaguccuacaagagcggcggcgagaccaagcuguga

SEQ ID NO: 94961 - RNA, 1575 nt, Artificial Sequence
  derived and/or modified CDS sequence (opt1) from glycoprotein__RABV__EU267768.1
augaucccccaggugcugcuguucgucccgcugcugguguucagcuccugcuucggcaaguuccccaucuacaccauccccgacaagcucgggcccuggagcccgaucgacauccaccaccuguccugccccaacaaccugguggucgaggacgagggcugcaccaaccucagcggguucuccuacauggagcugaaggugggcuacaucagcgccaucaagguguccggguucacgugcaccggcgucgugaccgaggccgagaccuacacgaacuucgugggcuacgucaccaccaccuucaagcgcaagcacuuccggcccaugcccgacgcgugccgcgccgccuacaacuggaagauggccggggacccgcgguacgaggagagccugcacaaccccuaccccgacuaccacuggcuccgcacggugaagaccaccaaggagucccuggugaucaucagccccuccgucgccgaccuggacccguacgacaagagccuccacucccggguguuccccggcgggaagugcagcggcaucaccguguccagcacgugcugcuccaccaaccacgacuacaccaucuggaugcccgagaacccccgccuggggaccagcugcgacaucuucacgaacucccggggcaagcgcgcgagcaagggcgggaagaccugcggcuucgucgacgagcgggggcuguacaagagccucaagggcgccugcaagcugaagcugugcggcgugcucgggcugcgccugauggacggcaccuggguggccauccagaccuccgacgagaucaaguggugcagcccggaccagcucgucaaccugcacgacuuccacuccgacgagaucgagcaccuggugguggaggagcucgucaagaagcgggaggagugccuggacgcccuggagacggugaugaccaccaagagcguguccuuccgccggcucagccaccuccgcaagcugguccccggguucggcaaggcguacaccaucuucaacaagacgcucauggaggccgacgcccacuacaaguccauccggaccuggaacgagaucauccccagcaaggggugccugcgcgugggcggccggugccacccccacgucaacgggguguucuucgacggcaucauccuggggccggacggccgcgugcucauccccgagaugcaguccagccugcugcaccagcacauggagcuccuggaguccagcgucaucccccugaugcacccccucgccgacccguccaccguguucaaggacggggacgaggccgaggacuucguggagguccaccuccccgacgugcacaagcugaucagcggcguggaccugggccugcccaacugggggaaguacguccugaucuccgcgggcgcccucaccgcccugaugagcaugaucuuccugaugacgugcugccggaagaccaaccgcgccgaguccauccagcacagccccggggagaccggccggaagguguccgugaccagccacaacgggcgcgucaucagcuccugggagagcuacaaguccggcggcgagacgaagcucuga

SEQ ID NO: 94962 - RNA, 1575 nt, Artificial Sequence
  derived and/or modified CDS sequence (opt1) from glycoprotein__RABV__EU267769.1
augaucccccaggugcuccuguucgucccgcugcugguguucagcuccugcuucggcaaguuccccaucuacaccauccccgacaagcucgggcccuggagcccgaucgacauccaccaccuguccugccccaacaacaugguggucgaggacgagggcugcaccaaccugagcggguucuccuacauggagcucaaggugggcuacaucagcgccaucaaggugaacggguucacgugcaccggcgucgugaccgaggccgagaccuacacgaacuucgugggcuacgucaccaccaccuucaagcgcaagcacuuccggcccaugcccgacgcgugccgcgccgccuacaacuggaagauggccggggacccgcgguacgaggagucccugcacaaccccuaccccgacuaccacuggcugcgcacggugaagaccaccaaggagagccucgugaucaucucccccagcgucgccgaccuggacccguacgacaagucccugcacagccggguguuccccggcgggaagugcuccggcaucaccgcgagcuccacgugcugcagcaccaaccacgacuacaccaucuggaugcccgagaacccccgccucgggaccuccugcgacaucuucacgaacagccggggcaagcgcgccuccaagggcgggaagaccugcggcuucgucgggggccggggccuguacaagagccugaagggggccugcaagcucaagcugugcggcgugcuggggcuccgccugauggacggcaccuggguggccauccagaccagcgacgggaucaaguggugcuccccggaccagcuggugaaccuccacgacuuccacagcgacgagaucgagcaccuggucguggaggagcuggugaagaagcgggaggagugccucgacgcgcuggucacgaucaugaccaccaaguccgugagcuuccgccggcugucccaccuccgcaagcuggugcccggcuucggcaaggccuacaccaucuucaacaagacgcugauggaggccgacgcccacuacaagagcauccggaccuggaacgagaucauccccuccaaggggugccuccgcgucggcgggcggugccacccccacgugaacggcgucuucuucaacgggaucauccugggcccggacggccacgugcugauccccgagaugcagagcucccuccugcaccagcacauggagcugcucgagagcuccgugaucccccugaugcacccccuggccgacccgagcaccgucuucaaggacggggacgaggcggaggacuucguggaggugcaccuccccgacguccacaagcagaucuccggcguggaccuggggcugcccaacuggggcaaguacgugcucaucagcgccggggcccugaccgcccugaugcucacgaucuuccugaugaccugcugccgcaagaccucccgggccgagagcauccagcacucccccggcgagaccggccgcaaggucagcgugacgucccacaacgggcgggugaucagcagcugggaguccuacaagagcggcggggagaccaagcuguga

SEQ ID NO: 94963 - RNA, 1575 nt, Artificial Sequence
  derived and/or modified CDS sequence (opt1) from glycoprotein__RABV__EU267770.1
augaucccccaggugcuccuguucgucccgcugcugguguucagcuccugcuucggcaaguuccccaucuacaccauccccgacaagcucgggcccuggagcccgaucgacauccaccaccuguccugccccaacaacaugguggucgaggacgagggcugcaccaaccugagcggguucuccuacauggagcucaaggugggcuacaucagcgccaucaaggugaacggguucacgugcaccggcgucgugaccgaggccgagaccuacacgaacuucgugggcuacgucaccaccaccuucaagcgcaagcacuuccggcccaugcccgacgcgugccgcgccgccuacaacuggaagauggccggggacccgcgguacgaggagucccugcacaaccccuaccccgacuaccacuggcugcgcacggugaagaccaccaaggagagccucgugaucaucucccccagcgucgccgaccuggacccguacgacaagucccugcacagccggguguuccccggcgggaagugcuccggcaucaccgugagcuccacgugcugcagcaccaaccacgacuacaccaucuggaugcccgagaacccccgccucgggaccuccugcgacaucuucacgaacagccggggcaagcgcgcguccaagggcgggaagaccugcggcuucgucgacgagcgggggcuguacaagagccugaagggcgccugcaagcucaagcugugcggcgugcuggggcuccgccugauggacggcaccuggguggccauccagaccagcgacgagaucaaguggugcuccccggaccagcuggucaaccuccacgacuuccacagcgacgagaucgagcaccuggugguggaggagcuggucaagaagcgggaggagugccucgacgcccuggagacgaucaugaccaccaaguccgugagcuuccgccggcugaaccaccuccgcaagcuggugcccggguucggcaaggcguacaccaucuucaacaagacgcugauggaggccgacgcccacuacaaguccauccggaccuggaacgagaucauccccagcaaggggugccuccgcgucggcggccggugccacccccacgugaacggggucuucuucaacggcaucauccuggggccggacggccacgugcugauccccgagaugcaguccagccuccugcaccagcacauggagcugcucgaguccagcgugaucccccugaugcacccccuggccgacccguccaccgucuucaaggacggggacgaggccgaggacuucguggaggugcaccuccccgacguccacaagcagaucagcggcguggaccugggccugcccaacugggggaaguacgugcucaucuccgcgggcgcccugaccgcccugaugcucacgaucuuccugaugaccugcugccgcaagaccagccgggccgaguccauccagcacagccccggggagaccggccgcaaggucuccgugacgagccacaacgggcgggugaucuccagcugggagagcuacaaguccggcggcgagaccaagcuguga

SEQ ID NO: 94964 - RNA, 1575 nt, Artificial Sequence
  derived and/or modified CDS sequence (opt1) from glycoprotein__RABV__EU267771.1
augaucccccaggugcuccuguucgucccgcugcugguguucagcuccugcuucggcaaguuccccaucuacaccauccccgacaagcucgggcccuggagcccgaucgacauccaccaccuguccugccccaacaacaugguggucgaggacgagggcugcaccaaccugagcggguucuccuacauggagcucaaggugggcuacaucagcgccaucaagguguccggguucacgugcaccggcgucgugaccgaggccgagaccuacacgaacuucgugggcuacgucaccaccaccuucaagcgcaagcacuuccggcccaugcccgacgcgugccgcgccgccuacaacuggaagauggccggggacccgcgguacgaggagagccugcacaacccccaccccgacuaccacuggcugcgcacggugaagaccaccaaggagucccucgugaucaucagccccuccgucgccgaccuggacccguacgacaagagccugcacucccggguguuccccggcgggaagugcagcggcaucaccguguccagcacgugcugcuccaccaaccacgacuacaccaucuggaugcccgagaacccccgccucgggaccagcugcgacaucuucacgaacucccggggcaagcgcgcgagcaagggcgggaagaccugcggcuucgucgacgagcgggggcuguacaagagccugaagggcgccugcaagcucaagcugugcggcgugcuggggcuccgccugauggacggcaccuggguggccauccagaccuccgacgagaucaaguggugcagcccggaccagcuggucaaccuccacgacuuccacuccgacgggaucgagcaccuggugguggaggagcuggucaagaagcgggaggagugccucgacgcccuggagacgaucaugaccaccaagagcguguccuuccgccggcugagccaccuccgcaagcuggugcccggcuucgggaaggcguacaccaucuucaacaagacgcugauggaggccgacgcccacuacaaguccauccggaccuggaacgagaucauccccagcaagggcugccuccgcgucggcgggcggugccacccccacgugaacggcgucuucuucaacgggaucauccugggcccggacgggcacgugcugauccccgagaugcaguccagccuccugcaccagcacauggagcugcucgaguccagcgugaucccccugaugcacccccuggccgacccguccaccgucuucaaggacggcgacgaggccgaggacuucguggaggugcaccuccccgacguccacaagcagaucagcggcguggaccuggggcugcccaacuggggcaaguacgugcucaucuccgcgggggcccugaccgcccugaugcucacgaucuuccugaugaccugcugccgcaagaccagccgggccgaguccauccagcacagccccggcgagaccgggcgcaaggucuccgugacgagccacagcggccgggugaucuccagcugggaguccuacaagagcggcggggagaccaagcuguga

SEQ ID NO: 94965 - RNA, 1575 nt, Artificial Sequence
  derived and/or modified CDS sequence (opt1) from glycoprotein__RABV__EU267772.1
auggugccccaggcccugcuguucgucccccugcugguguucccccucugcuucggcaaguuccccaucuacaccauccccgacaagcuggggccguggagccccaucgacauccaccaccuguccugccccaacaaccucguggucgaggacgagggcugcaccaaccugagcggguucuccuacauggagcugaaggugggcuacauccucgccaucaagaugaacggguucacgugcaccggcguggucaccgaggcggagaccuacacgaacuucgugggcuacgugaccaccaccuucaagcgcaagcacuuccggcccacgccggacgccugccgcgccgccuacaacuggaagauggccggggacccccgguacgaggagagccugcacaaccccuaccccgacuaccgcuggcugcggaccgucaagaccaccaaggagucccucgugaucaucagcccguccguggcggaccuggaccccuacgaccgcagccugcacucccgggucuuccccagcggcaagugcuccgggguggccgugagcuccacguacugcagcaccaaccacgacuacaccaucuggaugcccgagaacccgcgccucggcauguccugcgacaucuucaccaacagccgggggaagcgcgccuccaagggcagcgagacgugcggcuucgucgacgagcgggggcuguacaagucccugaagggcgccugcaagcucaagcugugcggggugcugggccuccgccugauggacggcaccuggguggcgaugcagaccagcaacgagaccaaguggugcccgcccgaccagcuggucaaccucuacgacuuccggagcgacgagaucgagcaccuggugguggaggagcugguccgcaagcgggaggagugccucgacgcccuggaguccaucaugacgaccaagagcguguccuuccgccggcugagccaccuccgcaagcuggugcccggguucggcaaggccuacaccaucuucaacaagacccugauggaggccgacgcccacuacaaguccguccggacguggaacgagauccuccccagcaaggggugccugcgcgugggcgggcggugccacccccacgucaacggcguguucuucaacggcaucauccuggggcccgacggcaacgugcucauccccgagaugcaguccagccugcugcagcagcacauggagcuccuggaguccagcgucaucccgcuggugcacccccucgcggaccccuccaccguguucaaggacggggacgaggccgaggacuucgucgaggugcaccuccccgacgugcacaaccaggucagcggcguggaccuggggcucccgaacuggggcaaguacgugcugcuguccgccggcgcccucaccgcccugaugcugaucaucuuccugaugaccugcugccgccgcgucaaccggagcgagcccacgcagcacaaccuccgcgggaccggccgggagguguccgugaccccgcagagcgggaagaucaucuccagcugggagucccacaagagcggcggggagacccgccuguga

SEQ ID NO: 94966 - RNA, 1575 nt, Artificial Sequence
  derived and/or modified CDS sequence (opt1) from glycoprotein__RABV__EU267773.1
augaucccccaggugcugcuguucgucccgcugcugguguucagcuccugcuucggcaaguuccccaucuacaccauccccgacaagcucgggcccuggagcccgaucgacauccaccaccuguccugccccaacaaccugguggucgaggacgagggcugcaccaaccucagcggguucuccuacauggagcugaaggugggcuacaucagcgccaucaaggugaacggguucacgugcaccggcgucgugaccgaggccgagaccuacacgaacuucgugggcuacgucaccaccaccuucaagcgcaagcacuuccggcccaugcccgacgcgugccgcgccgccuacaacuggaagauggccggggacccgcgguacgaggagucccugcacaaccccuaccccgacuaccacuggcuccgcacggugaagaccaccaaggagagccuggugaucaucucccccagcgucgccgaccuggacccguacgacaagucccuccacagccggguguuccccggcgggaagugcuccggcaucgcggugagcuccacgugcugcagcaccaaccacgacuacaccaucuggaugcccgagaacccccgccuggggaccuccugcgacaucuucaccaacagccggggcaagcgcgccuccaagggcgggaagacgugcggcuucgucgacgagcgggggcuguacaagagccucaagggcgccugcaagcugaagcugugcggcgugcucgggcugcgccugauggacggcaccuggguggccauccagaccagcgacgagaucaaguggugcuccccgguccagcucgugaaccugcacgacuuccacagcgacgagaucgagcaccugguggucgaggagcucgugaagaagcgggaggagugccuggacgugcuggagaccaucaugacgaccaaguccgucagcuuccgccggcucucccaccuccgcaagcuggugcccggguucggcaaggcguacaccaucuucaacaagacccucauggaggccgacgcccacuacaagagcauccggacguggaacaagaucauccccuccaaggggugccugcgcgucggcggccggugccacccccacgugaacgggguguucuucaacggcaucauccuggggccggacggccacguccucauccccgagaugcagagcucccugcugcaccagcacauggagcuccuggagagcuccgugaucccccugaugcacccccucgccgacccgagcaccguguucaaggacggggacgaggccgaggacuucgucgaggugcaccuccccgacgugcacaagcagaucuccggcgucgaccugggccugcccaacugggggaaguacgugcugaucagcgcgggcgcccugaccgcccucaugcugaccaucuuccugaugacgugcugccgcaagaccaaccgggccgaguccauccagcacagccccggggagaccggccgcaagguguccgucaccagccacaacgggcgggugaucuccagcugggagagcuacaaguccggcagcgagacgaagcucuga

SEQ ID NO: 94967 - RNA, 1575 nt, Artificial Sequence
  derived and/or modified CDS sequence (opt1) from glycoprotein__RABV__EU267774.1
augaucccccaggugcugcuguucgucccgcugcugguguucagcuccugcuucggcaaguuccccaucuacaccauccccgacaagcucgggcccuggagcccgaccgacauccaccaccuguccugccccaacaaccugguggucgaggacgagggcugcacgaaccucagcggguucuccuacauggagcugaaggugggcuacaucagcgccaucaaggugaacggguucacgugcaccggcgucgugaccgaggccgagaccuacaccaacuucgugggcuacgucaccaccacguucaagcgcaagcacuuccggcccaugcccgacgcgugccgcgccgccuacaacuggaagauggccggggacccgcgguacgaggagucccugcacaaccccuaccccgacuaccacuggcuccgcaccgugaagaccaccaaggagagccuggugaucaucucccccagcgucgccgaccuggacccguacgacaagucccuccacagccggguguuccccggcgggaagugcuccggcaucacggugagcuccacgugcugcagcaccaaccacgacuacaccaucuggaugcccgagaacccccgccuggggaccuccugcgacaucuucaccaacagccggggcaagcgcgcguccaagggcgggaagaccugcggcuucgucgacgagcgggggcuguacaagagccucaagggcgccugcaagcugaagcugugcggcgugcucgggcugcgccugauggacggcaccuggguggccauccagacgagcgacgagaucaaguggugcuccccggaccagcucgucaaccugcacgacuuccacagcgacgagaucgagcaccuggugguggaggagcucgucaagaagcgggaggagugccuggacgcccuggagaccaucaugaccacccgcuccgugagcuuccggcgccucucccaccuccggaagcuggugcccggguucggcaaggcguacacgaucuucaacaagacccucauggaggccgacgcccacuacaagagcauccgcaccuggaacgagaucauccccuccaaggggugccugcgggucggcggccgcugccacccccacgugaacggggucuucuucaacggcaucauccuggggccggacggccacgugcucauccccgagaugcagagcucccugcugcaccagcacauggagcuccuggagagcuccgugaucccccugaugcacccccucgccgacccgagcaccgucuucaaggacgggggcgaggccgaggacuucguggaggugcaccuccccgacguccacaagcagaucuccggcguggaccuggggcugcccaacuggggcaaguacgugcugaucagcgcgggggcccugacggcccucauguccaugaucuuccugaugaccugcugccggaagaccaaccgcgccgagagcauccagcacucccccggcgagaccgggcggaaggucagcgugacgucccacaacggccgcgugaucagcagcugggaguccuacaagagcggcggggagaccaagcuguga

SEQ ID NO: 94968 - RNA, 1575 nt, Artificial Sequence
  derived and/or modified CDS sequence (opt1) from glycoprotein__RABV__EU267775.1
augaucccccaggugcugcuguucgucccgcugcugguguucagcuccugcuuccgcaaguuccccaucuacaccauccccgacaagcucggccccuggagcccgaucgacauccaccaccuguccugccugaacaaccucguggucgaggacgaggggugcaccaaccugagcggcuucuccuacauggagcugaaggugggguacaucagcgccaucaaggugaacggcuucacgugcaccggggucgugaccgaggccgagaccuacacgaacuucgugggcuacgucaccaccaccuucaagcggaagcacuuccgccccaugcccgacgcgugccgggccgccuacaacuggaagauggccggcgacccccgcuacgaggagucccuccacaacccguaccccgacuaccacuggcugcggacggugaagaccaccaaggagagccuggugaucaucucccccagcgucgccgaccucgaccccuacgacaagucccugcacagccgcguguucccguccgggaagugcagcggcaucaccguguccagcacgugcugcuccaccaaccacgacuacaccaucuggaugcccgagaacccccggcuggggaccagcugcgacaucuucacgaacucccgcggcaagcgggcgagcaagggcgggaagaccugcggcuucgucgacgagcgcgggcucuacaagagccugcggggcgccugcaagcugaagcucugcggggugcugggccugcgccucauggacggcaccuggguggccauccagaccuccgacgagaucaaguggugcagccccgaccagcuggucaaccugcacgacuuccacuccgacgagaucgagcaccucgugguggaggagcuggucaagaagcgggaggagugccuggacgcccucgagacgaucaugaccaccaagagcguguccuuccgccggcugagccaccuccgcaagcucgugccgggguucggcaaggcguacaccaucuucaacaagacgcugauggaggccgacgcccaccacaaguccauccggaccuggaacgagaucauccccagcaaggggugccugcgcgucggcgggcggugccacccccacgugaacggcgucuucuccaacggcaucauccucgggcccgacggccacgugcugaucccggagaugcagagcucccugcuccaccagcacauggagcugcuggagagcuccgugaucccccucaugcacccccuggccgaccccagcaccgucuucaaggacuccgacgaggccgaggacuucguggaggugcaccucccggacguccacaagcagaucagcgggguggaccugggccugcccaacugggggaaguacgugcugaucuccgcgggcgcccucaccgcccugaugcugaugaucuuccucaugacgugcugccgcaagaccaaccgggccgagagcauccagcacucccccggcgagaccgggcgcaaggucagcgugaccagccacaacggccgcgugaucuccagcugggaguccuacaagagcggguccgagacgaagcuguga

SEQ ID NO: 94969 - RNA, 1575 nt, Artificial Sequence
  derived and/or modified CDS sequence (opt1) from glycoprotein__RABV__EU267776.1
augaucccccaggugcugcuguucgucccgcugcugguguucagcuccugcuucggcaaguuccccaucuacaccauccccgacaagcucgggcccuggagcccgaucgacauccaccaccuguccugccccaacaaccugguggucgaggacgagggcugcaccaaccucagcggguucuccuacauggagcugaaggugggcuacaucagcgccaucaaggugaacggguucacgugcaccggcgucgugaccgaggccgagaccuacacgaacuucgugggcuacgucaccaccaccuucaagcgcaagcacuuccggcccaugcccgacgcgugccgcgccgccuacaacuggaagauggccggggacccgcgguacgaggagucccugcacaaccccuaccccgacuaccacuggcuccgcacggugaagaccaccaaggagagccuggugaucaucucccccagcgucgccgaccuggacccguacgacaagucccuccacagccggguguuccccuccggcaagugcagcgggaucaccguguccagcacgugcugcuccaccaaccacgacuacaccaucuggaugcccgagaacccccgccugggcaccagcugcgacaucuucacgaacucccgggggaagcgcgcgagcaagggcggcaagaccugcggguucgucgacgagcggggccuguacaagagccuccgcggggccugcaagcugaagcugugcggcgugcucggccugcggcugauggacgggaccuggguggccauccagaccuccgacgagaucaaguggugcagcccggaccagcucgucaaccugcacgacuuccacuccgacgagaucgagcaccuggugguggaggagcucgucaagaagcgcgaggagugccuggacgcccuggagacgaucaugaccaccaagagcguguccuuccggcgccucagccaccuccggaagcuggugcccggcuucgggaaggcguacaccaucuucaacaagacgcucauggaggccgacgcccacuacaaguccauccgcaccuggaacgagaucauccccagcaagggcugccugcgggucgggggccgcugccacccccacgugaacggcgucuucuucaacgggaucauccugggcccggacgggcacgugcucauccccgagaugcaguccagccugcugcaccagcacauggagcuccuggaguccagcgugaucccccugaugcacccccucgccgacccguccaccgucuucaaggacggcgacgaggccgaggacuucguggaggugcaccuccccgacguccacaagcagaucagcgggguggaccugggccugcccaacuggggcaaguacgugcugaucuccgcgggggcccugaccgcccucaugcugaugaucuuccugaugacgugccggcgcaagaccaaccgggccgagagcauccagcacucccccggcgagaccgggcgcaaggucagcgugaccucccacaacggccgcgugaucagcagcugggaguccuacaagagcggguccgagacgaagcucuga

SEQ ID NO: 94970 - RNA, 1575 nt, Artificial Sequence
  derived and/or modified CDS sequence (opt1) from glycoprotein__RABV__EU275240.1
augaucccccaggcccugcuguucgugccgcugcuggucuucagcuccugcuucggcaaguuccccaucuacaccauccccgacaagcucgggcccuggagcccgaucgacauccaccaccuguccugccccaacaaccuggugguggaggacgagggcugcaccaaccucagcggguucuccuacauggagcugaaggucggcuacaucagcgccaucaaggugaacggguucacgugcaccggcguggucaccgaggcggagaccuacacgaacuucgugggcuacgugaccaccaccuucaagcgcaagcacuuccggcccaugcccgacgccugccgcgccgccuacaacuggaagauggccggggacccgcgguacgaggagucccugcacaaccccuaccccgacuaccacuggcuccgcacggucaagaccaccaaggagagccuggugaucaucucccccagcguggcggaccuggacccguacgacaagucccuccacagccgggucuuccccgacggcaagugcuccgggaucaccgugagcuccacgugcugcagcaccaaccacgacuacaccaucuggaugcccgagaacccccgccugggcaccuccugcgacaucuucacgaacagccgggggaagcgcgccuccaagggcggcaagaccugcggguucguggacgagcggggccuguacaagagccucaagggggccugcaagcugaagcugugcggcguccucggccugcgccugauggacgggaccuggguggccauccagaccagcgacgagaucaaguggugcuccccggaccagcucgugaaccugcacgacuuccacagcgacgagaucgagcaccuggucguggaggagcucgugaagaagcgggaggagugccuggacgcgcuggagacgaucaugaccaccaaguccgucagcuuccgccggcucucccaccuccgcaagcuggugcccggcuucgggaaggccuacaccaucuucaacaagacgcucauggaggccgacgcccacuacaagagcauccggaccuggaacgagaucauccccuccaagggcugccugcgcgucgggggccggugccacccccacgugaacggcguguucuucaacgggaucauccugggcccggacgggcacguccucauccccgagaugcagagcucccugcugcaccagcacauggagcuccuggagagcuccgugaucccccugaugcacccccucgccgacccgagcaccguguucaaggacggcgacgaggcggaggacuucgucgaggugcaccuccccgacgugcacaagcagaucuccggggucgaccugggccugcccaacuggggcaaguacgugcugaucagcgccggggcccugaccgcccucaugcugaugaucuuccugaugacgugcugccgcaaggccaaccgggcggaguccauccagcacaaccccggcgagaccgggcgcaaggugagcgucaccucccacaacggccgggugaucagcuccugggagagcuacaagagcggguccgagaccaagcucuga

SEQ ID NO: 94971 - RNA, 1575 nt, Artificial Sequence
  derived and/or modified CDS sequence (opt1) from glycoprotein__RABV__EU275241.1
augaucccccaggcccugcuguucgugccgcugcuggucuucagcucccgcuucggcaaguuccccaucuacaccauccccgacaagcucgggcccuggagcccgaucgacauccaccaccuguccugccccaacuaccuggugguggaggacgagggcugcaccaaccucagcggguucuccuacauggagcugaaggucggcuacaucagcgccaucaaggugaacggguucacgugcaccggcguggucaccgaggcggagaccuacacgaacuucgugggcuacgugaccaccaccuucaagcggaagcacuuccgccccacgcccgacgccugccgggccgccuacaacuggaagauggccggggacccgcgcuacgaggagucccugcacaaccccuaccccgacuaccacuggcuccggaccgucaagaccagcaaggagucccuggugaucaucagccccuccguggcggaccuggacccguacgacaagccccuccacagccgcgucuuccccggcgggaagugcuccggcaucaccgugagcuccacgugcugcagcaccaaccacgacuacaccaucuggaugcccgagaacccgcggcugcgcaccuccugcgacaucuucacgaacagccgggggaagcgcgccuccaagggcggcaagaccugcggguucguggacgagcggggccuguacaagagccucaagggggccugcaagcugaagcugugcggcguccucggccugcgccugauggacgggaccuggguggccauccagaccagcgacgagaucaaguggugcucccccgaccagcucgugaaccugcacgacuuccacagcgacgagaucgagcaccuggucguggaggagcucgugaagaagcgggaggagugccuggacgcgcuggagacgaucaugaccaccaaguccgucagcuuccgccggcucucccaccuccgcaagcuggugcccggcuucgggaaggccuacaccaucuucaacaagacgcucauggaggccgacgcccacuacaagagcauccggaccuggaacgagaucauccccuccaagggcugccugcgcgucgggggccggugccacccgcacgugaacggcguguucuucaacgggaucauccugggccccgacgggcacguccucauccccgagaugcagagcucccugcugcaccagcacauggagcuccuggagagcuccgugaucccccugaugcacccgcucgccgaccccagcaccguguucaaggacggcgacgaggcggaggacuucgucgaggugcaccuccccgacgugcacaagcagaucuccggggucgaccugggccugcccaacuggggcaaguacgugcuggugagcgccggggcccugaccgcccucaugcugaugaucuuccugaugacgugcugccgcaagaccaaccgggccgaguccauccagcacagcccgggcgagaccgggcgcaaggucuccgugaccagccacaacggccgcgugaucuccagcugggagagcuacaaguccgggagcgagacgaagcucuga

SEQ ID NO: 94972 - RNA, 1575 nt, Artificial Sequence
  derived and/or modified CDS sequence (opt1) from glycoprotein__RABV__EU275242.1
augacgccccaggcccugcuguucgugccgcugcuggucuucagccucugcuucggcaaguuccccaucuacaccauccccgacaagcuggggcccugguccccgaucgacauccaccaccugagcugccccaacaaccucgugguggaggacgagggcugcaccaaccugcccggguucuccuacauggagcugaaggucggcuacaucagcgccaucaaggugaacggguucacgugcaccggcguggucaccgaggcggagaccuacaccaacuucgugggcuacgugaccaccacguucaagcgcaagcacuuccggcccaccccggacgccugccgcgccgccuacaacuggaagauggccggggacccccgguacgaggagucccuccacaaccccuaccccgacuaccacuggcugcgcaccgucaagaccacgaaggagagccuggugaucaucuccccgagcguguccgaccucggccccuacgacaagagccugcacucccgggucuuccccagcgggaagugcuccggcaucaccgugagcuccaccuacugccccaccaaccacgacuacacgaucuggaugccggagaacccccgccuggggaccagcugcgacaucuucaccaacucccggggcaagcgcgcgagcaagggcuccaagaccugcggguucguggacgagcggggccucuacaagagccugaagggggccugcaagcugaagcucugcggcguccugggccugcgccucauggacgggacgugggccgccauccagaccagcgacgaggcgaaguggugcccgcccgaccagcuggugaacauccacgacuuccgguccgacgagaucgagcaccugguggucgaggagcucgugaagaagcgcgaggagugccuggacgcccuggagagcaucaugaccaccaaguccgugagcuuccggcgccucucccaccuccggaagcugguccccggcuucgggaaggccuacacgaucuucaacaagacccucauggaggccgacgcccacuacaagagcgugcgcaccuggaacgagaucauccccuccaagggcugccugcgggucgggggccgcugccacccccacgcgaacggcguguucuucaacgggaucauccugggccccgacgggcacgugcucaucccggagaugcagagcucccugcugcagcagcacauggagcuccuggagagcuccgucaucccccugaugcacccccucgccgaccccagcaccguguucaaggacggcgacgaggccgaggacuucguggagguccaccucccggacgugcacaagcaggucuccgggguggaccugggccugcccagcuggggcaaguacgugcugauguccgugggggcccugaucgcccucaugcugaugaucuuccuggcgacgugcugccggaaggccaacggcgccgagagcauccagcaccgccucggggagaccggccggaaggucuccgugaccagccagaacgggcgcgugaucuccagcugggagagcuacaaguccggcggcgagaccaagcuguga

SEQ ID NO: 94973 - RNA, 1575 nt, Artificial Sequence
  derived and/or modified CDS sequence (opt1) from glycoprotein__RABV__EU293111.1
augaucccccaggcccugcuguuccugccgcugcucguguucagccugugcuccggcaaguuccccaucuacaccauccccgacaagcuggggcccuggagcccgaucgacauccaccaccucuccugccccaacaaccuggucguggaggacgagggcugcaccaaccugagcggguucuccuacauggagcucaaggugggcuacaucagcgccaucaaggucaacggguucacgugcaccggcguggugaccgaggcggagaccuacacgaacuucgucggcuacgugaccaccaccuucaagcgcaagcacuuccggcccacgcccgacgccugccgcgccgccuacaacuggaagauggccggggacccgcgguacgaggagucccugcacaaccccuaccccgacuaccacuggcugcgcaccgugaagaccaccaaggagagccucgucaucaucucccccagcguguccgaccuggacccguacgacaagagccugcacucccggguguuccccagcggcaagugcuccgggaucacggucagcuccaccuacugccccaccagccacgacuacaccaucuggaugcccgagaacccgcgccucggcacguccugcgacaucuucaucaacagccgggggaagcgcgcgagcaagggcuccaagaccugcggcuucguggacgagcgggggcuguacaagagccugaagggcgccugcaagcucaagcugugcggggugcugggccuccgccugauggacggcaccugggucgccauccagaccuccgacgaggccaaguggugcccgcccgaccagcuggugaacauccacgacuuccacagcgacgagaucgagcaccucguggucgaggagcuggugaagaagcgggaggagugccuggacgcgcucgaguccaucaugacgaccaagagcguguccuuccgccggcugagccaccuccgcaagcucguccccggguucggcaaggccuacaccaucuucaacaagacccugauggaggccgacgcccacuacaaguccgugcggacguggaacgagaucauccccagcaaggggugccugcgcgugggcgggcggugccacccccacgucaacggcguguucuucaacggcaucauccucgggcccgacggccacguccugauccccgagaugcaguccagccugcuccagcagcacauggagcugcuggaguccagcgugaucccgcucaugcacccccuggccgaccccuccaccguguucaaggacggggacgaggcggaggacuucgucgaggugcaccuccccgacgugcacaagcaggucagcggcguggaccuggggcugccgaacuggggcaaguacgugcuggucuccgugggcgcccucaucgcccugaugcugaugaucuuccucaugaccugcugccgcaaggccaacgggguggagagcaugcagcaccggcugggcgagaccgggcgcaaggucuccgugacgagccagagcggccgggugaucuccagcugggaguccuacaagagcgggggcgagaccaagcuguga

SEQ ID NO: 94974 - RNA, 1575 nt, Artificial Sequence
  derived and/or modified CDS sequence (opt1) from glycoprotein__RABV__EU293115.1
auggugccccaggcccuccuguucgucccgcugcugguguucagccucugcuucggcaaguuccccaucuacaccauccccgacaagcuggggcccugguccccgaucgacauccaccaccugagcugccccaacaaccucguggucgaggacgagggcugcaccaaccuguccggguucagcuacauggagcugaaggugggcuacaucuccagcaucaaggugaacggguucacgugcaccggcgucgugaccgaggccgagaccuacacgaacuucgugggcuacgucaccaccaccuucaagcgcaagcacuuccggcccacgcccgacgcgugccgcgccgccuacaacuggaagauggccggggacccgcgguacgaggagucccuccacaaccccuaccccgacuaccacuggcugcgcaccgugaagaccaccaaggagagccuggugaucaucucccccagcgucgccgaccucgacccguacgacaagucccugcacagccggguguuccccggcgggaagugcuccggcaucacggugagcuccaccuacugcagcaccaaccacgacuacaccaucuggcugcccgagaacccccgccucgggacguccugcgacaucuucaccaacagccggggcaagcgcgcguccaagggcagcaagaccugcggguucgucgacgagcggggccuguacaagagccugaagggggccugcaagcucaagcugugcggcgugcugggccuccgccugauggacgggaccuggguggccaugcagacguccgacgagaccaaguggugcccgcccgaccagcuggucaaccuccacgacuuccggagcgacgagaucgagcaccuggugguggaggagcuggucaagaagcgcgaggagugccucgacgcccuggaguccaucaugaccaccaagagcguguccuuccggcgccugagccaccuccggaagcuggugcccggcuucgggaaggcguacacgaucuucaacaagacccugauggaggccgacgcccacuacaaguccguccgcaccuggaacgagaucauccccagcaagggcugccuccgggucgggggccgcugccaccaccacgugaacggcguguucuucaacgggaucauccugggcccggacgggcacgugcugauccccgagaugcaguccagccuccugcagcagcacauggagcugcucgaguccagcgucaucccccugaugcacccccuggccgacccguccaccguguucaaggacggcgacgaggccgaggacuucguggagguccaccuccccgacgugcacaagcaggucagcgggguggaccugggccugcccaacuggggcaaguacgugcuccuguccgcgggggcccugguggcccucaugcugaucaucuuccugaugacgugcugccggcgcgucaaccggcccgagagcacccgccgcuccuucggcgggaccgagcggaaggugagcaucaccccgcaguccggcaaggugaucagcagcugggaguccuacaagagcggguccgagacgcgccuguga

SEQ ID NO: 94975 - RNA, 1575 nt, Artificial Sequence
  derived and/or modified CDS sequence (opt1) from glycoprotein__RABV__EU293116.1
augauccugcaggcccuccuguucgugccccugcucaucagcucccugugcuucggcaaguucccgaucuacaccauccccgacaagcuggggcccuggagccccaucgacauccaccaccucuccugcccgaacaaccuggucguggaggacgagggcugcaccagccuguccggguucagcuacauggagcucaaggugggcuacaucuccgccaucaaggucaacggguucacgugcaccggcguggugaccgaggcggagaccuacacgaacuucgucggcuacgugaccaccaccuucaagcgcaagcacuuccggcccacgcccgacgccugccgcgccgccuacaacuggaagguggccggggacccccgguacgaggagagccugcagaacccguaccccgacuaccacuggcugcgcaccgucaagaccaccaaggagucccucaucaucaucagccccuccguggcggaccuggaccccuacgacaagagccugcacucccggguguucccgagcggcaagugccucgggaucacgaucuccagcaccuacugcuccaccaaccacgacuacaccaucuggaugcccgaggaggcccgccugggcacgagcugcgacaucuucaccaacuccaaggggaagaaggccagcaagggcggccggaccugcggguucgucgacgagcgcggccuguacaagagccucaagggggccugcaagcugaagcugugcggcgugcccggccuccggcugauggacgggaccugggugacgauccagaccuccgacgagaccaaguggugcccgcccgaccagcuggucaaccuccacgacuuccacagcgacgagaucgagcaccuggugguggaggagcuggucaagaagcgcgaggagugccucgacgcgcuggaguccaucaugaccaccaagagcguguccuuccggcgccugagccaccuccggaagcuggugcccggcuucgggaaggccuacacgaucuucaacaagacccugauggaggccgacgcccacuacaaguccguccgcaccuggaacgagaucauccccagcaagggcugccucaaggucgggggccggugccacccccacguggacggcguguucuucaacgggaucauccugggcccggacgggaacgugcugauccccgagaugcaguccagccuccugcagcagcacauggagcugcucgaguccagcgucaucccccugaugcacccccuggccgacccguccacgguguucaaggacggcgacgaggcggaggacuucguggagguccaccuccccgacgugcacaagcagaucagcgggguggaccugggccugcccaacuggggcaaguaccuccugaugaucgccggggcccuggccggccucauccugaucaucuuccugauggccugcugccgccgggcgaagcgcaccgagucccggcgccgggggagcggcgaguccgagcgcaagguccccgugccgccccagaacgggaaggugaucagcuccugggagcuguacaagagcgagggcgagaccggccucuga

SEQ ID NO: 94976 - RNA, 1575 nt, Artificial Sequence
  derived and/or modified CDS sequence (opt1) from glycoprotein__RABV__EU293121.1
augaucccccaggcccugcuguucgugccgcugcuggucuucagccucugcuucggcaaguuccccaucuacaccauccccgacaagcuggggcccugguccccgaucgacauccaccaccugagcugccccaacaaccucgugguggaggacgagggcugcaccaaccuguccggguucagcuacauggagcugaaggucggcuacaucuccgccaucaaggugaacggguucacgugcaccggcguggucaccgaggcggagaccuacacgaacuucgugggcuacgugaccaccaccuucaagcgcaagcacuuccggcccacgcccgacgccugccgcgccgccuacaacuggaagauggccggggacccgcgguacgaggagagccuccacaaccccuaccccgacuaccacuggcugcgcaccgucaagaccaccaaggagucccuggugaucaucagccccuccgugagcgaccucgacccguacgacaagucccugcacagccgggucuuccccuccggcaagugcagcgggaucacgguguccagcaccuacugccccaccaaccacgacuacaccaucuggaugcccgagaacccgcgccugggcacguccugcgacaucuucaccaacagccgggggaagcgcgcguccaagggcagcaagaccugcggcuucguggacgagcgggggcucuaccgcagccugaagggcgccugcaagcugaagcucugcgggguccugggccugcggcucauggacggcaccugggccgccauccagacguccgacgaggcgaaguggugcccgcccgaccagcuggugaacauccacgacuuccgcagcgacgagaucgagcaccugguggucgaggagcucgugaagaagcgggaggagugccuggacgcccuggaguccaucaugaccaccaagagcguguccuuccgccggcucagccaccuccgcaagcugguccccggguucggcaaggccuacaccaucuucaacaagacgcucauggaggccgacgcccacuacaaguccgugcggaccuggaacgagaucauccccagcaaggggugccugcgcgugggcgggcggugccacccccacgucaacggcguguucuucaacggcaucauccuggggcccgacggccacguccucauccccgagaugcaguccagccugcugcgccagcacauggagcuccuggaguccagcgugaucccgcugaugcacccccucgcggaccccuccaccguguucaaggacggggacgaggccgaggacuucgucgaggugcaccuccccgacgugcacgagcagaucagcggcgucgaccuggggcugccguccuggggcaaguacgugcugaugagcgugggcgccaugaucgcccugaugcucgucaucuuccugaccacgugcugccggaaggccaacggggcggagaccauccagcaccgccugggcgagaccgggcgcaagguguccgugaccagccaguccggccgggucaucagcagcugggaguccuacaagagcgggggcgagacgaagcucuga

SEQ ID NO: 94977 - RNA, 1575 nt, Artificial Sequence
  derived and/or modified CDS sequence (opt1) from glycoprotein__RABV__EU352767.1
auggugccccagguccugcuguucgugccgcugcugggcuucagccucugcuucgggaaguuccccaucuacaccauccccgacgagcugggccccugguccccgaucgacauccaccaccugagcugccccaacaaccucguggucgaggacgaggggugcaccaaccuguccgaguucagcuacauggagcugaaggugggcuacaucuccgccaucaaggugaacggguucacgugcaccggcgucgugaccgaggccgagaccuacacgaacuucgugggcuacgucaccaccaccuucaagcgcaagcacuuccggcccacgcccgacgcgugccgcgccgccuacaacuggaagauggccggggacccgcgguacgaggagagccuccacaaccccuaccccgacuaccacuggcugcgcaccgugcggaccaccaaggagucccugaucaucaucagccccuccgugacggaccucgacccguacgacaagagccugcacucccgcgucuuccccggcgggaagugcagcggcaucaccguguccagcaccuacugcuccaccaaccacgacuacacgaucuggaugcccgaggacccccggccgcgcacccccugcaacaucuucaccaacagccgggggaagcgcgccuccaagggcaacaagaccugcggcuucguggacgagcgggggcuguacaagagccucaagggcgcgugccgccugaagcugugcgggguccucggccugcggcugauggacggcacguggguggccaugcagaccuccgacgagaccaaguggugcccgcccgaccagcucgugaaccugcacgacuuccacagcgacgagaucgagcaccuggucguggaggagcucgugaagaagcgcgaggagugccuggacgcccuggagagcaucaugaccacgaaguccgucagcuuccggcgccucucccaccuccggaagcuggugcccggguucggcaaggccuacaccaucuucaacaagacccucauggaggcggacgcccacuacaagagcgugcgcaccuggaacgagaucauccccuccaaggggugccugaaggucggcgggcggugccacccccacgugaacggcgucuucuucaacggcaucauccuggggcccgacggccacgugcucaucccggagaugcagagcucccugcugcagcagcacauggagcuccucaagagcuccgugaucccccugaugcacccccuggccgaccccagcacggucuucaaggagggggacgaggccgaggacuucguggaggugcaccucccggacgucuacaagcgcaucuccggcguggaccuggggcugcccaacuggggcaaguacgugcugaugaccgccggcgcgaugaucgggcugguccucaucuucagccugaugaccuggugccggcgcgccaaccgccccgaguccaagcagcggagcuucggcgggaccggccgcaacguguccgugacgagccaguccgggaaggucaucccgagcugggaguccuacaagagcggcggcgagauccggcuguga

SEQ ID NO: 94978 - RNA, 1575 nt, Artificial Sequence
  derived and/or modified CDS sequence (opt1) from glycoprotein__RABV__EU549783.1
augaucccccaggugcugcuguucgucccgcugcugguguucagcuccugcuucggcaaguuccccaucuacaccauccccgacaagcucgggcccuggagcccgaucgacauccaccaccuguccugccccaacaaccugguggucgaggacgagggcugcaccaaccucagcggguucuccuacauggagcugaaggugggcuacagcuccgccaucaaggugaacggguucacgugcaccggcgucgugaccgaggccgagaccuacacgaacuucgugggcuacgucaccaccaccuucaagcgcaagcacuuccggcccaugcccgacgcgugccgcgccgccuacaacuggaagauggccggggacccgcgguacgaggagagccugcacaaccccuaccccgacuaccacuggcuccgcacggugaagaccaccaaggagucccuggugaucaucagccccuccgucaccgaccuggacccguacgacaagagccuccacucccggguguuccccggcgggaagugcagcggcaucacgguguccagcacgugcugcuccaccaaccacgacuacaccaucuggaugcccgagaacccccgccuggggaccagcugcgacaucuucaccaacucccggggcaagcgcgccagcaagggcgggaagaccugcggcuucgucgacgagcgggggcuguacaagagccucaagggcgcgugcaagcugaagcugugcggcgugcucgggcugcgccugauggacggcaccuggguggccauccagacguccgacgagaucaaguggugcagcccggaccagcucgucaaccugcacgacuuccacuccgacgagaucgagcaccuggugguggaggagcucgucaagaagcgggaggagugccuggacgcccuggagaccaucaugaccaccaagagcguguccuuccgccggcucagccaccuccgcaagcuggugcccggguucggcaaggccuacacgaucuucaacaagacccucauggaggcggacgcccacuacaaguccauccggaccuggaacgagaucauccccagcaaggggugccugcgcgucggcggccggugccacccccacgugaacggggucuucuucaacggcaucauccuggggccggacggccacgugcucauccccgagaugcaguccagccugcugcaccagcacauggagcuccuggaguccagcgugaucccccugaugcacccccucgccgacccguccaccgucuucaaggacggggacgaggccgaggacuucguggaggugcaccuccccgacguccacaagcagaucagcggcguggaccugggccugcccaacugggggaaguacgugcugaucuccgccggcgcgcugacggcccucaugcugaccaucuuccugaugaccugcugccgcaagaccaaccgggccgggagcauccagcacucccccggcgggacgggccgcaaggucagcgugaccccgcacaacggccgggugaucugcuccugggagagcuacaagagcggguccgagaccaagcucuga

SEQ ID NO: 94979 - RNA, 1575 nt, Artificial Sequence
  derived and/or modified CDS sequence (opt1) from glycoprotein__RABV__EU643590.1
auggugccccaggcccugcuguucgucccgcugcuggccgugccccucugcuucggcaaguuccccaucuacaccauccccgacaagcuggggccguggagccccaucgacauccaccaccuguccugccccaacaaccucguggucgaggacgagggcugcaccaaccugagcggguucuccuacauggagcugaaggugggcuacaucagcgcgaucaaggugaacggguucacgugcaccggcgucgugaccgaggccgagaccuacacgaacuucgugggcuacgucaccaccaccuucaagcgcaagcacuuccggcccacgccggacgccugccgcuccgccuacaacuggaagauggccggggacccccgguacgaggagagccuccacaaccccuaccccgacuaccacuggcugcgcaccgugaagaccaccaaggaguccuucgugaucaucagcccguccgucgcggaccuggaccccuacgacaagagccuccacucccggguguucccccgcggcaagugcagcgggaucacgguguccagcaccuacugcuccaccaaccacgacuacaccaucuggaugcccgagaacccgcggcugggcacgagcugcgacaucuucaccaacucccgcgggaagcgggccagcaagggcuccaagaccugcggcuucgucgacgagcgcgggcuguacaagagccucaagggcgccugcaagcugaagcugugcggggugcucggccugcggcugauggacggcaccuggguggccauccagacgagcgacgagaccaaguggugcccgcccgaccagcucgucaaccugcacgacuuccacuccgacgagaucgagcaccuggugguggaggagcucgucaagaagcgcgaggagugccuggacgcgcuggagagcaucaugaccaccaaguccgugagcuuccggcgccucucccaccuccggaagcuggugcccggguucggcaaggccuacacgaucuucaacaagacccucauggaggccgacgcccacuacaagagcguccgcaccuggaacgagaucauccccuccaaggggugccugcgggugggcgggcgcugccacccccacgucaacggcguguucuucaacggcaucauccuggggcccgacggccacgugcucauccccgagaugcagagcucccugcugcagcagcacauggagcuccuggagagcuccgucaucccgcugaugcacccccucgccgaccccagcaccguguucaaggacggggacgaggcggaggacuucguggagguccaccuccccgacgugcacaagcaggucuccggcguggaccuggggcugccgagcuggggcaaguacgugcugauguccgccggcauccugacggcccucaugcugaccaucuuccugaugaccugcugccggcgcaccaaccgggccgagagcauccagcacucccucggggagacgggccgcaaggugagcgucaccucccagagcgggcgcgugaucagcuccugggagagcuacaaguccggcggggagaccaagcuguga

SEQ ID NO: 94980 - RNA, 1575 nt, Artificial Sequence
  derived and/or modified CDS sequence (opt1) from glycoprotein__RABV__EU700029.1
augaucccccaggugcugcuguucgucccgcugcugguguucagcuccugcuucggcaaguuccccaucuacaccauccccgacaagcucgggcccuggagcccgaucgacauccaccaccuguccugccccaacaaccugguggucgaggacgagggcugcaccaaccucagcggguucuccuacauggagcugaaggugggcuacaucagcgccaucaaggugaacggguucacgugcaccggcgucgugaccgaggccgagaccuacacgaacuucgugggcuacgucaccaccaccuucaagcgcaagcacuuccggcccaugcccgacgcgugccgcgccgccuacaacuggaagauggccggggacccgcgguacgaggagucccugcacaaccccuaccccgacuaccacuggcuccgcacggugaagaccaccaaggagagccuggugaucaucucccccagcgucgccgaccuggacccguacgacaagucccuccacagccggguguuccccggcgggaagugcuccggcaucaccgugagcuccacgugcugcagcaccaaccacgacuacaccaucuggaugcccgagaacccccgccuggggaccuccugcgacaucuucacgaacagccggggcaagcgcgcguccaagggcgggaagaccugcggcuucgucgacgagcgggggcuguacaagagccucaagggcgccugcaagcugaagcugugcggcgugcucgggcugcgccugauggacggcaccuggguggccauccagaccagcgacgagaucaaguggugcccgcccgaccagcucgucaaccugcacgacuuccacuccgacgagaucgagcaccuggugguggaggagcucgucaagaagcgggaggagugccuggacgcccuggagacgaucaugaccaccaagagcguguccuuccgccggcucagccaccuccgcaagcuggugcccggguucggcaaggcguacaccaucuucaacaagacgcucauggaggccgacgcccacuacaaguccauccggaccuggaacgagaucauccccagcaaggggugccugcgcgucggcggccggugccacccgcacgugaacggggucuucuucaacggcaucauccuggggcccgacggccacgugcucauccccgagaugcaguccagccugcugcaccagcacauggagcuccuggaguccagcgugaucccccugaugcacccgcucgccgaccccuccaccgucuucaaggacggggacgaggccgaggacuucguggaggugcaccuccccgacguccacaagcagaucagcggcguggaccugggccugcccaacugggggaaguacgugcugaucuccgcgggcgcccugaccgcccucaugcugacgaucuuccugaugaccugcugccgcaagaccaaccgggccgggagcauccagcacuccccgggcgagaccgggcgcaaggucagcgugacgucccacaacggccgggugaucagcuccugggagagcuacaagagcggcuccgagaccaagcucuga

SEQ ID NO: 94981 - RNA, 1575 nt, Artificial Sequence
  derived and/or modified CDS sequence (opt1) from glycoprotein__RABV__EU700030.1
auggugccccuggcccuccugcuggucccgcuccugguguucagcuccugcuucggcaaguuccccaucuacaccauccccgacaagcuggggcccuggagcccgaucgacauccaccaccucuccugccccaacaaccugguggucgaggacgagggcugcaccaaccugagcggguucuccuacauggagcucaaggugggcuacaucagcgccaucaaggugaacggguucacgugcaccggcgucgugaccgaggcggagaccuacacgaacuucgugggcuacgucaccaccaccuucaagcgcaagcacuuccggcccaugcccgacgccugccgcgccgccuacaacuggaagauggccggggacccgcgguacgaggagucccugcacaaccccuaccccgacuaccacuggcugcgcacggugaagaccaccaaggagagccucgugaucaucucccccagcgucgcggaccuggacccguacgacaagucccugcacagccggguguuccccggcgggaagugcuccggcaucaccgugagcuccacgugcugcagcaccaaccacgacuacaccaucuggaugcccgagaacccccgccucgggaccuccugcgacaucuucacgaacagccggggcaagcgcgccuccaagggcgggaagaccugcggcuucgucgacgagcgggggcuguacaagagccugaagggcgccugcaagcucaagcugugcggcgugcuggggcuccgccugauggacggcaccuggguggccauccagaccagcgacgagaucaaguggugcuccccggaccagcuggucaaccuccacgacuuccacagcgacgagaucgagcaccuggugguggaggagcuggucaagaagcgggaggagugccucgacgcgcuggagacgaucaugaccaccaaguccgugagcuuccgccggcugucccaccuccgcaagcuggugcccggguucggcaaggccuacaccaucuucaacaagacgcugauggaggccgacgcccacuacaagagcauccggaccuggaacgagaucauccccuccaaggggugccuccgcgucggcggccggugccacccccacgugaacggggucuucuucaacggcaucauccuggggccggacggccacgugcugauccccgagaugcagagcucccuccugcaccagcacauggagcugcucgagagcuccgugaucccccugaugcacccccuggccgacccgagcaccgucuucaaggacggggacgaggcggaggacuucguggaggugcaccuccccgacguccacaagcagaucuccggcguggaccugggccugcccaacugggggaaguacgugcucaucagcgccggcgcccugaccgcccugaugcucacgaucuuccugaugaccugcugccgcaagaccaaccgggccgaguccauccagcacagccccggggagaucggccgcaaggucuccgugaccagccacaacgggcgggugaucuccagcugggagagcuacaaguccggcagcgagacgaagcuguga

SEQ ID NO: 94982 - RNA, 1575 nt, Artificial Sequence
  derived and/or modified CDS sequence (opt1) from glycoprotein__RABV__EU827276.1
auggugccccugacccuccuggucgccccgcugcucgugcugagccugugcuccggcaaguuccccaucuacaccauccccgacaagcucgggcccuggagcccgaucgacauccaccaccuguccugccccaacaaccugguggucgaggacgagggcugcacgaaccucagcggguucuccuacauggagcugaaggugggcuacaucagcgccaucaaggugaacggguucacgugcaccggcgucgugaccgaggcggagaccuacaccaacuucgugggcuacgucaccaccacguuccgccggaagcacuuccgccccacccccgacgccugccggaccgccuacaacuggaagauggccggggacccgcgcuacgaggagucccugcacaaccccuaccccgacuaccacuggcuccggaccgugaagacgaccaaggagagccuggugaucaucucccccagcgucgccgaccuggacccguacgaccgcucccuccacagccggguguuccccaacggcaagugcuccgggaucaccgugagcuccaccuacugccccacgaaccacgacuacaccaucuggaugcccgagaacccgcgccugggcaccagcugcgacaucuucgucaacucccgggggaagcgcgcgagcaagggcuccaagaccugcggcuucguggacgagcgggggcuguacaagagccucaagggcgccugcaagcugaagcugugcggggugcucggccugcgccugauggacggcacgugggucgccaugcggaccagcgacgagaccaaguggugcccgcccgaccagcucgugaacauccacgacuuccacuccgacgagaucgagcaccugguggucgaggagcuggugaagaagcgcgaggagugccucgacgcccuggagagcaucaugaccacgaaguccgugagcuuccggcgccugucccaccuccggaagcugguccccggguucggcaaggcguacaccaucuucaacaagacccugauggaggccgacgcccacuacaagagcgugcgcaccugggacgagaucauccccuccaaggggugccuccgggucggcgggcgcugccacccccacgugcacggcguguucuucaacggcaucauccuggggcccgacggccacguccugauccccgagaugcagagcucccuccugcagcagcacauggagcugcucgagagcuccgugaucccgcugaugcacccccuggccgaccccagcacgguguucaaggacgacgacgaggccgaggacuucgucgaggugcaccuccccgacgugcacaagcagaucuccggggucgaccugggccugccgaacugggggaaguacgugcucaugagcgcgggcgcccugaucgcccugaugcuccugaucuuccugaugaccugcugccggaagaucaagcgccccgaguccacccagcacagcccccgcggcaccgggcggaagguguccgucacgagccagaacggcaaggugaucuccagcugggagagcuacaaguccgggggcgagacccgccuguga

SEQ ID NO: 94983 - RNA, 1575 nt, Artificial Sequence
  derived and/or modified CDS sequence (opt1) from glycoprotein__RABV__EU827277.1
auggugccccugacccuccuggucgugccgcugcucgugcugagccugugcuccggcaaguuccccaucuacaccauccccgacaagcucgggcccuggagcccgaucgacauccaccaccuguccugccccaacaaccuggucguggaggacgagggcugcacgaaccucagcggguucuccuacauggagcugaaggugggcuacaucagcgccaucaaggucaacggguucacgugcaccggcguggugaccgaggccgagacguacaccaacuucgucggcuacgugaccaccacguuccgccggaagcacuuccgccccacccccgacgcgugccggaccgccuacaacuggaagauggccggggacccgcgcuacgaggagucccugcacaaccccuaccccgacuaccacuggcuccggaccgugaagacgaccaaggagagccugaucaucaucucccccagcgucgccgaccuggacccguacgaccgcucccuccacagccggguguuccccaacggcaagugcuccgggaucaccgugagcuccaccuacugccccacgaaccacgacuacaccaucuggaugcccgagaacccgcgccugggcaccagcugcgacaucuucgucaacucccgggggaagcgcgccagcaagggcuccaagaccagcggcuucguggacgagcgggggcuguacaagagccucaagggcgcgugcaagcugaagcugugcggggugcucggccugcgccugauggacggcacgugggucgccaugcggaccuccgacgagaccaaguggugcccgcccgugcagcucgugaacauccacgacuuccacagcgacgagaucgagcaccuggucguggaggagcuggugaagaagcgcgaggagugccucgacgcccuggaguccaucaugaccaccaagagcgucuccuuccggcgccugagccaccuccggaagcuggugcccggguucggcaaggccuacaccaucuucaacaagacccugauggaggcggacgcccacuacaaguccguccgcaccugggacgagaucauccccagcaaggggugccuccgggugggcgggcgcugccacccccacgugcacggcgucuucuucaacggcaucauccuggggcccgacggccacgugcugauccccgagaugcaguccagccuccugcagcagcacauggagcugcucgaguccagcgugaucccgcugaugcacccccuggccgaccccuccacggucuucaaggacggggacgaggccgaggacuucguggaggugcaccuccccgacguccacaagcagaucagcggcguggaccuggggcugccgaacuggggcaaguacgugcucauguccgccggcgcgcugaucgcccugaugcucaucaucuuccugaugaccugcugccggaagaucaagcgccccgagagcacccagcacucccccgggggcaccgggcgcaaggucagcgugacgucccagaacggcaaggugaucagcagcugggaguccuacaagagcgggggcgagacccggcuguga

SEQ ID NO: 94984 - RNA, 1575 nt, Artificial Sequence; identical to SEQ ID NO: 94882
  derived and/or modified CDS sequence (opt1) from glycoprotein__RABV__EU877067.1

SEQ ID NO: 94985 - RNA, 1575 nt, Artificial Sequence
  derived and/or modified CDS sequence (opt1) from glycoprotein__RABV__FJ418876.1
augaucccccaggcccugcuguucgugccgcugcuggucuucagccucugcuucggcaaguuccccaucuacaccauccccgacaagcuggggcccugguccccgaucgacauccaccaccugagcugccccaacaaccucgugguggaggacgagggcugcaccaaccuguccggguucagcuacauggagcugaaggucggcuacaucuccgccaucaaggugaacggguucacgugcaccggcguggucaccgaggcggagaccuacacgaacuucgugggcuacgugaccaccaccuucaagcgcaagcacuuccggcccacgcccgacgccugccgcgccgccuacaacuggaagauggccggggacccgcgguacgaggagagccuccacaaccccuaccccgacuaccacuggcugcgcaccgucaagaccaccaaggagucccuggugaucaucagccccuccguggcggaccucgacccguacgacaagagccugcacucccgggucuuccccagcggcaagugcuccgggaucacggugagcuccaccuacugcagcaccaaccacgacuacaccaucuggaugcccgagaacccccgccugggcacguccugcgacaucuucgugaacagccgggggaagcgcgccuccaagggcagcaagaccugcggcuucgucgacgagcgggggcucuacaagagccugaagggcgccugcaagaucaagcugugcggggugcucggccugcgccugauggacggcaccuggguggccauccagaccuccgacgagacgaaguggugcccgcccgaccagcucgucaaccugcacgacuuccggagcgacgagaucgagcaccuggugguggaggagcucgucaagaagcgcgaggagugccuggacgcgcuggaguccaucaugaccaccaagagcguguccuuccggcgccucagccaccuccggaagcuggugcccggguucggcaaggccuacaccaucuucaacaagacgcucauggaggccgacgcccacuacaaguccguccgcaccuggaacgagaucauccccagcaaggggugccugcgggugggcgggcgcugccacccgcacgucaacggcguguucuucaacggcaucauccuggggcccgacggccacgugcucauccccgagaugcaguccagccugcugcagcagcacauggagcuccuggaguccagcgucaucccccugaugcacccgcucgccgaccccuccaccaucuucaaggacggggacgaggcggaggacuucguggaggugcaccuccccgacguccacaagcaggucagcggcguggaccuggggcugcccaacuggggcaaguacgugcugauguccgccggcgcccugaucgcccucaugcugaugaucuuccugaugaccugcugccggaagacggaccgcaccgggagcacccaccacuccccgggcgagaccgggcggaaggugagcgugacgucccagaacggccgcgucaucgccagcugggagagcuacaaguccgggggcgagacccgccucuga

SEQ ID NO: 94986 - RNA, 1575 nt, Artificial Sequence
  derived and/or modified CDS sequence (opt1) from glycoprotein__RABV__FJ418877.1
auggugccccaggcccuccuguucgucccgcugcuggccaucccccucugcuucggcaaguuccccaucuacaccauccccgacaagcuggggccguggagccccaucgacauccaccaccuguccugccccaacaaccucgugguggaggacgagggcugcaccaaccugagcggguucuccuacauggagcugaaggucggcuacaucagcgcgaucaaggugaacggguucacgugcaccggcguggucaccgaggccgagaccuacacgaacuucgugggcuacgugaccaccaccuucaagcgcaagcacuuccggcccacgccggacgccugccgcuccgccuacaacuggaagauggccggggacccccgguacgaggagagccuccacaaccccuaccccgacuaccacuggcugcgcaccgucaagaccaccaaggaguccuucgugaucaucagcccguccguggcggaccuggaccccuacgacaagagccuccacucccgggucuucccccgcggcaagugcagcgggaucacgguguccagcaccuacugcuccaccaaccacgacuacaccaucuggaugcccgagaacccgcggcugggcacgagcugcgacaucuucaccaacucccgcgggaagcgggccagcaagggcuccaagaccugcggcuucguggacgagcgcgggcuguacaagagccucaagggcgccugcaagaugaagcugugcgggguccugggccuccggcugauggacggcaccuggguggccauccagacgagcgacgagaccaaguggugcccgcccgaccagcuggugaaccuccacgacuuccacuccgacgagaucgagcaccuggucguggaggagcuggugaagaagcgcgaggagugccucgacgcgcuggagagcaucaugaccaccaaguccgucagcuuccggcgccugucccaccuccggaagcuggugcccggguucggcaaggccuacacgaucuucaacaagacccugauggaggccgacgcccacuacaagagcgugcgcaccuggaacgagaucauccccuccaaggggugccuccgggucggcgggcgcugccacccccacgugaacggcgucuucuucaacggcaucauccuggggcccgacggccacgugcugauccccgagaugcagagcucccuccugcagcagcacauggagcugcucgagagcuccgugaucccgcugaugcacccccuggccgaccccagcaccgucuucaaggacggggacgaggcggaggacuucguggaggugcaccuccccgacguccacaagcaggucuccggcguggaccuggggcugccgagcuggggcaaguacgugcucauguccgccggcauccugacggcccugaugcucaugaucuuccugaugaccugcugccggcgcaccaaccgggccgagagcauccagcacucccugggggagaccggccgcaaggugagcgugacgucccagagcgggcgcgucaucagcuccugggagagcuacaaguccggcggggagaccaagcucuga

SEQ ID NO: 94987 - RNA, 1575 nt, Artificial Sequence
  derived and/or modified CDS sequence (opt1) from glycoprotein__RABV__FJ418878.1
augaucccccaggugcuccuguucgucccgcugcugguguucagcuccugcuucggcaaguuccccaucuacaccauccccgacaagcucgggcccuggagcccgaucgacauccaccaccuguccugccccaacaaccugguggucgaggacgagggcugcaccaaccucagcggguucuccuacauggagcugaaggugggcuacaucagcgccaucaaggugaacggguucacgugcaccggcgucgugaccgaggccgagaccuacacgaacuucgugggcuacgucaccaccaccuucaagcgcaagcacuuccggcccaugcccgacgcgugccgcgccgccuacaacuggaagauggccggggacccgcgguacgaggagucccugcacaaccccuaccccgacuaccacuggcuccgcacggugaagaccaccaaggagagccuggugaucaucucccccagcgucgccgaccuggacccguacgacaagucccuccacagccggguguuccccggcgggaagugcuccggcaucaccgugagcuccacgugcugcagcaccaaccacgacuacaccaucuggaugcccgagaacccccgccuggggaccuccugcgacaucuucacgaacagccggggcaagcgcgcguccaagggcgggaagaccugcggcuucgucgacgagcgggggcuguacaagagccucaagggcgccugcaagaugaagcugugcggcgugcuggggcuccgccugauggacggcaccuggguggccauccagaccagcgacgagaucaaguggugcuccccggaccagcuggucaaccuccacgacuuccacagcgacgagaucgagcaccuggugguggaggagcuggucaagaagcgggaggagugccucgacgcccuggagacgaucaugaccaccaaguccgugagcuuccgccggcugucccaccuccgcaagcuggugcccggguucggcaaggcguacaccaucuucaacaagacgcugauggaggccgacgcccacuacaagagcauccggaccuggaacgagaucauccccuccaaggggugccuccgcgucggcggccggugccacccccacgugaacggggucuucuucaacggcaucauccuggggccggacggccacgugcugauccccgagaugcagagcucccuccugcaccagcacauggagcugcucgagagcuccgugaucccccugaugcacccccuggccgacccgagcaccgucuucaaggacggggacgaggccgaggacuucguggacgugcaccuccccgacguccacaagcagaucuccggcguggaccugggccugcccaacugggggaaguacgugcucaucagcgcgggcgcccugaccgcccugaugcucaugaucuuccugaugacgugcugccgcaaggccaaccgggccgaguccauccagcacaaccccggggagaccggccgcaaggucagcgugaccucccacaacgggcgggugaucagcuccugggagagcuacaagagcggcggcgagaccaagcuguga

SEQ ID NO: 94988 - RNA, 1575 nt, Artificial Sequence
  derived and/or modified CDS sequence (opt1) from glycoprotein__RABV__FJ418879.1
augaucccccaggugcugcuguucgucccgcugcugguguucagcuccugccucggcaaguuccccaucuacaccauccccgacaagcuggggcccuggagcccgaucgacauccaccaccuguccugccccaacaaccucguggucgaggacgagggcugcaccaaccugagcggguucuccuacauggagcugaaggugggcuacaucagcgccaucaaggugaacggguucacgugcaccggcgucgugaccgaggccgagaccuacacgaacuucgugggcuacgucaccaccaccuucaagcgcaagcacuuccggcccaugcucgacgcgugccgcgccgccuacaacuggaagauggccggggacccccgguacgaggagucccugcacaacccguaccccgacuaccacuggcugcgcacggugaagaccagcaaggagucccucgugaucaucagccccuccgucgccgaccuggaccccuacgacaagagccugcacucccggguguucccgggcgggaagugcagcggcaucaccguguccagcacgugcugcuccaccaaccacgacuacaccaucuggaugcccgagaacccccgccucgggaccagcugcgacaucuucaccaacucccggggcaagcgcgcgagcaagggcgggaagacgugcggcuucgucgacgagcgggggcuguacaagagccugaagggcgccugcaaggugaagcucugcggcgugcuggggcugcgccucauggacggcaccugggucgccauccagaccuccgacgagaucaaguggugcagccccgaccagcuggugaaccugcacgacuuccacuccgacgagaucgagcaccucguggucgaggagcuggugaagaagcgggaggagugccuggacgcccucgagaccaucaugacgaccaagagcguguccuuccgccggcugagccaccuccgcaagcucgucccgggguucggcaaggcguacaccaucuucaacaagacccugauggaggccgacgcccacuacaaguccauccggacguggaacgagaucauccccagcaaggggugccugcgcgugggcggccggugccacccccacgucaacgggguguucuucaacggcaucauccucgggcccgacggccacgugcugaucccggagaugcaguccagccugcuccaccagcacauggagcugcuggaguccagcgucaucccccucaugcacccccuggccgaccccuccaccguguucaaggacggggacgaggccgaggacuucguggagguccaccucccggacgugcacaagcagaucagcggcguggaccugggccugcccaacugggggaaguacguccugaucuccgcgggcgcccucaccgccagcaugcugaugaucuuccugaugaccugcugccgcaagacgaaccgggccgaguccauccagcacagccccggggagaccggccgcaagguguccgugaccagccacaacgggcgggucaucagcuccugggagagcuacaaguccggcggcgagaccaagcucuga

SEQ ID NO: 94989 - RNA, 1575 nt, Artificial Sequence; identical to SEQ ID NO: 94986
  derived and/or modified CDS sequence (opt1) from glycoprotein__RABV__FJ418880.1

SEQ ID NO: 94990 - RNA, 1575 nt, Artificial Sequence
  derived and/or modified CDS sequence (opt1) from glycoprotein__RABV__FJ418881.1
augaucccccaggugcugcuguucgucccgcugcugguguucagcuccugcuucggcaaguuccccaucuacaccauccccgacaagcucgggcccuggagcccgaucgacauccaccaccuguccugccccaacaaccugguggucgaggacgagggcugcaccaaccucagcggguucuccuacauggagcugaaggugggcuacaucagcgccaucaaggugaacggguucacgugcaccggcgucgugaccgaggccgagaccuacacgaacuucgugggcuacgucaccaccaccuucaagcgcaagcacuuccggcccaugcccgacgcgugccgcgccgccuacaacuggaagauggccggggacccgcgguacgaggagucccugcacaaccccuaccccgacuaccacuggcuccgcacggugaagaccagcaaggagucccuggugaucaucagccccuccgucgccgaccuggacccguacgacaagagccuccacucccggguguuccccggcgggaagugcagcggcaucaccguguccagcacgugcugcuccaccaaccacgacuacaccaucuggaugcccgagaacccccgcccggggaccagcugcgacaucuucaccaacucccggggcaagcgcgcgagcaagggcgggaagacgugcggcuucgucgacgagcgggggcuguacaagagccugaagggcgccugcaaggugaugcucugcggcgugcuggggcugcgccucauggacggcaccugggucgccauccagaccuccgacgagaucaaguggugcagccccgaccagcuggugaaccugcacgacuuccacuccgacgagaucgagcaccucguggucgaggagcuggugaagaagcgggaggagugccuggacgcccucgagaccaucaugacgaccaagagcguguccuuccgccggcugagccaccuccgcaagcucguccccggguucggcaaggcguacaccaucuucaacaagacccugauggaggccgacgcccacuacaaguccauccggacguggaacgagaucauccccagcaaggggugccugcgcgugggcggccggugccacccgcacgucaacgggguguucuucaacggcaucauccucgggcccgacggccacgugcugauccccgagaugcaguccagccugcuccaccagcacauggagcugcuggaguccagcgucaucccccucaugcacccgcuggccgaccccuccaccguguucaaggacggggacgaggccgaggacuucguggagguccaccuccccgacgugcacaagcagaucagcggcguggaccugggccugcccaacugggggaaguacguccugaucuccgcgggcgcccucaccgcccugaugcugaugaucuuccucaugaccugcugccgcaagacgaaccgggccgagagcauccagcacuccccgggggagaccggccgcaaggugagcgugaccucccacaacgggcgggucaucagcagcugggaguccuacaagagcggcggcgagaccaagcuguga

SEQ ID NO: 94991 - RNA, 1575 nt, Artificial Sequence
  derived and/or modified CDS sequence (opt1) from glycoprotein__RABV__FJ418883.1
augaucccccaggugcuccuguucgucccgcugcugguguucagcuccugcuucggcaaguuccccaucuacaccauccccgacaagcucgggcccuggagcccgaucgacauccaccaccuguccugccccaacaaccugguggucgaggacgagggcugcaccaaccucagcggguucuccuacauggagcugaaggugggcuacaucagcgccaucaaggugaacggguucacgugcaccggcgucgugaccgaggccgagaccuacacgaacuucgugggcuacgucaccaccaccuucaagcgcaagcacuuccggcccaugcccgacgcgugccgcgccgccuacaacuggaagauggccggggacccgcgguacgaggagucccugcacaaccccuaccccgacuaccacuggcuccgcacggugaagaccaccaaggagagccuggugaucaucucccccagcgucgccgaccuggacccguacgacaagucccuccacagccggguguuccccggcgggaagugcuccggcaucaccgugagcuccacgugcugcagcaccaaccacgacuacaccaucuggaugcccgagaacccccgccuggggaccuccugcgacaucuucacgaacagccggggcaagcgcgcguccaagggcgggaagaccugcggcuucgucgacgagcgggggcuguacaagagccucaagggcgccugcaagaugaagcugugcggcgugcuggggcuccgccugauggacggcaccuggguggccauccagaccagcgacgagaucaaguggugcuccccggaccagcuggucaaccuccacgacuuccacagcgacgagaucgagcaccuggugguggaggagcuggucaagaagcgggaggagugccucgacgcccuggagacgaucaugaccaccaaguccgugagcuuccgccggcugucccaccuccgcaagcuggugcccggguucggcaaggcguacaccaucuucaacaagacgcugauggaggccgacgcccacuacaagagcauccggaccuggaacgagaucauccccuccaaggggugccuccgcgucggcggccggugccacccccacgugaacggggucuucuucaacggcaucauccuggggccggacggccacgugcugauccccgagaugcagagcucccuccugcaccagcacauggagcugcucgagagcuccgugaucccccugaugcacccccuggccgacccgagcaccgucuucaaggacggggacgaggccgaggacuucguggaggugcaccuccccgacguccacaagcagaucuccggcguggaccugggccugcccaacugggggaaguacgugcucaucagcgcgggcgcccugaccgcccugaugcucaagaucuuccugaugacgugcugccgcaagaccaaccgggccgaguccauccagcacagccccggggagaucggccgcaaggucuccgugaccagccacaacgggcgggugaucuccagcugggagagcuacaaguccggcagcgagaccaagcuguga

SEQ ID NO: 94992 - RNA, 1575 nt, Artificial Sequence
  derived and/or modified CDS sequence (opt1) from glycoprotein__RABV__FJ418884.1
augaucccccaggugcuccuguucgucccgcugcugguguucagcuccugcuucggcaaguuccccaucuacaccauccccgacaagcucgggcccuggagcccgaucgacauccaccaccuguccugccccaacaaccugguggucgaggacgagggcugcaccaaccucagcggguucuccuacauggagcugaaggugggcuacaucagcgccaucaaggugaacggguucacgugcaccggcgucgugaccgaggccgagaccuacacgaacuucgugggcuacgucaccaccaccuucaagcgcaagcacuuccggcccaugcccgacgcgugccgcgccgccuacaacuggaagauggccggggacccgcgguacgaggagucccugcacaaccccuaccccgacuaccacuggcuccgcacggugaagaccaccaaggagagccuggugaucaucucccccagcgucgccgaccuggacccguacgacaagucccuccacagccggguguuccccggcgggaagugcuccggcaucaccgugagcuccacgugcugcagcaccaaccacgacuacaccaucuggaugcccgagaacccccgccuggggaccuccugcgacaucuucacgaacagccggggcaagcgcgcguccaagggcgggaagaccugcggcuucgucgacgagcgggggcuguacaagagccucaagggcgccugcaagaugaagcugugcggcgugcuggggcuccgccugauggacggcaccuggguggccauccagaccagcgacgagaucaaguggugcuccccggaccagcuggucaaccuccacgacuuccacagcgacgagaucgagcaccuggugguggaggagcuggucaagaagcgggaggagugccucgacgcccuggagacgaucaugaccaccaaguccgugagcuuccgccggcugucccaccuccgcaagcuggugcccggguucggcaaggcguacaccaucuucaacaagacgcugauggaggccgacgcccacuacaagagcauccggaccuggaacgagaucauccccuccaaggggugccuccgcgucggcggccggugccacccccacgugaacggggucuucuucaacggcaucauccuggggccggacggccacgugcugauccccgagaugcagagcucccuccugcaccagcacauggagcugcucgagagcuccgugaucccccugaugcacccccuggccgacccgagcaccgucuucaaggacggggacgaggccgaggacuucguggaggugcaccuccccgacguccacaagcagaucuccggcguggaccugggccugcccaacugggggaaguacgugcucaucagcgcgggcgcccugaccgcccugaugcucacgaucuuccugaugaugugcugccgcaagaccaaccgggccgaguccauccagcacagccccggggagaucggccgcaaggucuccgugaccagccacaacgggcgggugaucuccagcugggagagcuacaaguccggcagcgagaccaagcuguga

SEQ ID NO: 94993 - RNA, 1575 nt, Artificial Sequence
  derived and/or modified CDS sequence (opt1) from glycoprotein__RABV__FJ418885.1
auggugccccagguccuccuguucgugccgcugcugguguucagcuccugcuucggcaaguuccccaucuacaccauccccgacaagcucgggcccuggagcccgaucgacauccaccaccuguccugccccaacaaccuggucguggaggacgagggcugcaccaaccucagcggguucuccuacauggagcugaaggugggcuacaucagcgccaucaaggucaacggguucacgugcaccggcguggugaccgaggccgagaccuacacgaacuucgucggcuacgugaccaccaccuucaagcgcaagcacuuccggcccaugcccgacgcgugccgcgccgccuacaacuggaagauggccggggacccgcgguacgaggagucccugcacaaccccuaccccgacuaccacuggcuccgcacggugaagaccaccaaggagagccuggucaucaucucccccagcguggccgaccuggacccguacgacaagucccuccacagccggguguuccccggcgggaagugcuccggcaucaccgucagcuccacgugcugcagcaccaaccacgacuacaccaucuggaugcccgagaacccccgccuggggaccuccugcgacaucuucacgaacagccggggcaagcgcgcguccaagggcgggaagaccugcggcuucguggacgagcgggggcuguacaagagccucaagggcgccugcaagaugaagcugugcggcgugcuggggcuccgccugauggacggcaccugggucgccauccagaccagcgacgagaucaaguggugcuccccggaccagcuggugaaccuccacgacuuccacagcgacgagaucgagcaccugguggucgaggagcuggugaagaagcgggaggagugccucgacgcccuggagacgaucaugaccaccaaguccgugagcuuccgccggcugucccaccuccgcaagcugguccccggguucggcaaggcguacaccaucuucaacaagacgcugauggaggccgacgcccacuacaagagcauccggaccuggaacgagaucauccccuccaaggggugccuccgcgugggcggccggugccacccccacgucaacgggguguucuucaacggcaucauccuggggccggacggccacgugcugauccccgagaugcagagcucccuccugcaccagcacauggagcugcucgagagcuccgucaucccccugaugcacccccuggccgacccgagcaccguguucaaggacggggacgaggccgaggacuucguggagguccaccuccccgacgugcacaagcagaucuccggcguggaccugggccugcccaacugggggaaguacguccucaucagcgcgggcgcccugaccgcccugaugcucaugaucuuccugaugacgugcugccgcaaggccaaccgggccgaguccauccagcacaaccccggggagaccggccgcaaggugagcgugaccucccacaacgggcgggucaucagcuccugggagagcuacaagagcggcggcgagaccaagcuguga

SEQ ID NO: 94994 - RNA, 1575 nt, Artificial Sequence
  derived and/or modified CDS sequence (opt1) from glycoprotein__RABV__FJ418886.1
augaucccccaggugcuccuguucgucccgcugcugguguucagcuccugcuucggcaaguuccccaucuacaccauccccgacaagcucgggcccuggagcccgaucgacauccaccaccuguccugccccaacaaccugguggucgaggacgagggcugcaccaaccucagcggguucuccuacauggagcugaaggugggcuacaucagcgccaucaaggugaacggguucacgugcaccggcgucgugaccgaggccgagaccuacacgaacuucgugggcuacgucaccaccaccuucaagcgcaagcacuuccggcccaugcccgacgcgugccgcgccgccuacaacuggaagauggccggggacccgcgguacgaggagucccugcacaaccccuaccccgacuaccacuggcuccgcacggugaagaccaccaaggagagccuggugaucaucucccccagcgucgccgaccuggacccguacgacaagucccuccacagccggguguuccccggcgggaagugcuccggcaucaccgugagcuccacgugcugcagcaccaaccacgacuacaccaucuggaugcccgagaacccccgccuggggaccuccugcgacaucuucacgaacagccggggcaagcgcgcguccaagggcgggaagaccugcggcuucgucgacgagcgggggcuguacaagagccucaagggcgccugcaagaugaagcugugcggcgugcuggggcuccgccugauggacggcaccuggguggccauccagaccagcgacgagaucaaguggugcuccccggaccagcuggucaaccuccacgacuuccacagcgacgagaucgagcaccuggugguggaggagcuggucaagaagcgggaggagugccucgacgcccuggagacgaucaugaccaccaaguccgugagcuuccgccggcugucccaccuccgcaagcuggugcccggguucggcaaggcguacaccaucuucaacaagacgcugauggaggccgacgcccacuacaagagcauccggaccuggaacgagaucauccccuccaaggggugccuccgcgucggcggccggugccacccccacgugaacggggucuucuucaacggcaucauccuggggccggacggccacgugcugauccccgagaugcagagcucccuccugcaccagcacauggagcugcucgagagcuccgugaucccccugaugcacccccuggccgacccgagcaccgucuucaaggacggggacgaggccgaggacuucguggaggugcaccuccccgacguccacaagcagaucuccggcguggaccugggccugcccaacugggggaaguacgugcucaucagcgcgggcgcccugaccgcccugaugcuccagaucuuccugaugacgugcugccgcaagaccauccgggccgaguccauccagcacagccccggggagaccggccgcaaggucuccgugaccuuccacaacgggcgggugaucagcuccugggagagcuacaagagcggcuccgagacgaagcuguga

SEQ ID NO: 94995 - RNA, 1575 nt, Artificial Sequence
  derived and/or modified CDS sequence (opt1) from glycoprotein__RABV__FJ418887.1
auggugccccagguccuccuguucgugccgcugcugguguucagcuccugcuucggcaaguuccccaucuacaccauccccgacaagcucgggcccuggagcccgaucgacauccaccaccuguccugccccaacaaccuggucguggaggacgagggcugcaccaaccucagcggguucuccuacauggagcugaaggugggcuacaucagcgccaucaaggucaacggguucacgugcaccggcguggugaccgaggccgagaccuacacgaacuucgucggcuacgugaccaccaccuucaagcgcaagcacuuccggcccaugcccgacgcgugccgcgccgccuacaacuggaagauggccggggacccgcgguacgaggagucccugcacaaccccuaccccgacuaccacuggcuccgcacggugaagaccaccaaggagagccuggucaucaucucccccagcguggccgaccuggacccguacgacaagucccuccacagccggguguuccccggcgggaagugcuccggcaucaccgucagcuccacgugcugcagcaccaaccacgacuacaccaucuggaugcccgagaacccccgccuggggaccuccugcgacaucuucacgaacagccggggcaagcgcgcguccaagggcgggaagaccugcggcuucguggacgagcgggggcuguacaagagccucaagggcgccugcaagaugaagcugugcggcgugcuggggcuccgccugauggacggcaccugggucgccauccagaccagcgacgagaucaaguggugcuccccggaccagcuggugaaccuccacgacuuccacagcgacgagaucgagcaccugguggucgaggagcuggugaagaagcgggaggagugccucgacgcccuggagacgaucaugaccaccaaguccgugagcuuccgccggcugucccaccuccgcaagcugguccccggguucggcaaggcguacaccaucuucaacaagacgcugauggaggccgacgcccacuacaagagcauccggaccuggaacgagaucauccccuccaaggggugccuccgcgugggcggccggugccacccccacgucaacgggguguucuucaacggcaucauccuggggccggacggccacgugcugauccccgagaugcagagcucccuccugcaccagcacauggagcugcucgagagcuccgucaucccccugaugcacccccuggccgacccgagcaccguguucaaggacggggacgaggccgaggacuucguggagguccaccuccccgacgugcacaagcagaucuccggcguggaccugggccugcccaacugggggaaguacguccucaucagcgcgggcgcccugaccgcccugaugcucaugaucuuccugaugacgugcugccgccgggccaaccgcgccgaguccauccagcacaaccccggggagaccggccggaaggugagcgugaccucccacaacgggcgcgucaucagcuccugggagagcuacaagagcggcggcgagaccaagcuguga

SEQ ID NO: 94996 - RNA, 1575 nt, Artificial Sequence
  derived and/or modified CDS sequence (opt1) from glycoprotein__RABV__FJ465384.1
auggugagccagucccuccuguucgucccccugcugggcuucagccucugcuucgggaaguucccgaucuacaccauccccgacaagcugggccccuggucccccaucgacauccaccaccugagcugcccgaacaaccucgugguggaggacgaggggugcaccaaccuguccggcuucagcuacauggagcugaaggucggguacaucuccgccaucaaggugaacggcuucacgugcaccggcguggucaccgaggccgagaccuacacgaacuucgugggguacgugaccaccaccuuccgccggaagcacuuccgccccacgcccgacgcgugccgggccgccuaccacuggaagauggccggcgacccccgcuacgaggagagccuccacaacccguaccccgacuaccacuggcugcggaccgucaagaccaccaaggagucccuggugaucaucagccccuccguggccgaccucgaccccuacgacaagagccugcacucccgcgucuucccgaacgggaagugcagcggccugacgguguccagcaccuacugcuccaccaaccacgacuacaccauguggaugcccgagaacccccggcucgggacgagcugcgacaucuucaccaacucccgcggcaagcgggcgagccgcggcaacaagaccugcggguucguggacgagcggggccuguacaagagccugaagggggccugcaagcucaagcugugcggcguccugggccuccgccugaucgacgggaccuggguggccaugcagacguccgacgagaccaaguggugcccgcccgaccagcuggugaaccuccacgacuuccggagcgacgagaucgagcaccuggucguggaggagcuggugaagaagcgcgaggagugccucgacgcccuggaguccaucaugaccaccaagagcgucuccuuccggcgccugagccaccuccggaagcuggugcccggcuucgggaaggcguacacgaucuucaacaagacccugauggaggccgacgcccacuacaaguccauccgcaccugggacgagaucgugcccagcaagggcugccuccgggucgggggcaagugccacccccacaucaacggcguguucuucaacgggaucauccugggcuccgacgggcacguccugaucccggagaugcagagcucccuccugcagcagcacaucgagcugcucgagagcuccguggugccccugaugcacccccuggccgaccccagcaccgucuucaaggacggcaacgaggccgaggacuucguggaggugcaccucccggacguccacaagcaggucuccgagaucgaccuggggcugcccaacuggggcaaguacauccucgugagcgcgggcgcccugaucgcccugaugcucacgauccugcugaucacgugcugccgccgggugcaccgccccgagcccaagcagcaccgccugcgggggaccgagcgcaagguggccgugaccucccagagcggcaaggccaucuccagcugggagagcuacaagaacgggggcgagacccggauguga

SEQ ID NO: 94997 - RNA, 1575 nt, Artificial Sequence
  derived and/or modified CDS sequence (opt1) from glycoprotein__RABV__FJ465385.1
auguucccccaggcccugcuguucgugccgcugcugggccucagccugugcuccgggcgcuuccccaucuacaccauccccgacaagcugggccccuggagcccgaucgacauccaccaccucuccugccccaacaaccuggucguggaggacgaggggugcaccaaccugagcggcuucuccuacauggagcucaaggugggguacaucagcuccaucaaggucagcggcuucacgugcaccggcguggugaccgaggccgagaccuacacgaacuucgucggguacgugaccaccaccuuccggcgcaagcacuuccggcccacgcccgacgcgugccgcgccgcccacaacuggaagauggccggcgacccgcgguacgaggagucccugcacaaccccuaccccgacuaccacuggcugcgcaccgugaagaccaccaaggagagccucgucaucaucucccccagcguggccgaccuggacccguacgacaagucccugcacagccggguguuccccaacgggaagugcuccggccucacggucuucagcaccuacugcuccaccaaccacgaguacaccguguggaugcccgagaacccccgccuggggacgagcugcgacaucuucaccaacucccggggcaagcgcgcgagcaagggcaacaagaccugcggguucguggacgagcggggccuguacaagagccucaagggggccugcaagcugaagcugugcggcguccucggccugcgccugauggacgggaccuggguggccaugcagacguccgacgagaccaaguggugcccgcccgaccagcucgugaaccugcacgacuuccggagcgacgagaucgagcaccuggucguggaggagcucgugaagaagcgcgaggagugccuggacgcccuggaguccaucaugaccaccaagagcgucuccuuccggcgccucagccaccuccggaagcuggugcccggcuucgggaaggcguacacgaucuucaacaagacccucauggaggccgacgcccacuacaaguccgugcgcaccuggaacgagaucauccccagcaagggcugccugcgggucgggggccgcugccacccgcacgugaacggcgucuucuucaacgggaucauccugggcuccgacgggcacgugcucauccccgagaugcagagcucccugcugcagcagcacguggagcuccuggagagcuccgucaucccccugaugcacccccucgccgacccgagcaccguguucaagggcggggacgaggccgaggacuucguggagguccaccuccccgacgugcacaagcaggucuccggcguggaccugggccugcccaacugggggaaguacauccuggugagcgcgggcgcccugaucgcccucauccugaucaucuuccugaugacgugcugccggcgcuuccgccggcccaagccggcccagcacaaccucgggggcaccgggcgcaagguguccgucaccagccaguccggcaagguggugagcagcugggaguccuacaagaacggcggggagacccggcuguga

SEQ ID NO: 94998 - RNA, 1575 nt, Artificial Sequence
  derived and/or modified CDS sequence (opt1) from glycoprotein__RABV__FJ465386.1
auguucagccgcucccugcuguucgugagccugcugggcuucccccucugcuucgggaaguucccgaucuacaccauccccgacaagcugggccccuggucccccaucgacauccaccaccugagcugcccgaacaaccucgucguggaggacgaggggugcaccaaccuguccggcuucagcuacauggagcugaaggugggguacaucuccgccaucaaggucaacggcuucacgugcaccggcguggugaccgaggccgagaccuacacgaacuucgucggguacgugaccaccaccuuccggcgcaagcaccuccggcccacgcccgacgcgugccgcagcgccuacaacuggaagauggccggcgacccccgguacgaggagucccugcacaacccguaccccgacuaccacuggcugcgcaccgugaagaccaccaaggagagccucgucaucaucucccccagcguggccgaccuggaccccuacgacaagucccugcacagccggguguucccgaacgggaagugcuccggccucacggucagcuccaccuacugcagcaccaaccacgacuacaccaucuggaugcccgagaacccccgccuggggacguccugcgacaucuucaccaacagcaagggcaagcgggccagccgcggcaacaagaccugcggguucguggacgagcggggccuguacaagucccucaagggggcgugcaagcugaagcugugcggcgugcucggccugcgccugaucgacgggaccugggucgccaugcacacgagcgacgagaccaaguggugcccgcccgaccagcucgugaaccugcacgacuuccgguccgacgagaucgagcaccugguggucgaggagcucgugaagaagcgcgaggagugccuggacgcccuggagagcaucaugaccaccaaguccgugagcuuccggcgccucucccaccuccggaagcugguccccggcuucgggaaggccuacacgaucuucaacaagacccucauggaggcggacgcccacuacaagagcauccgcaccugggacgagaucgugcccuccaagggcugccugcgggucgggggccgcugccacccccacgugaacggcguguucuucaacgggaucauccugggcagcgacgggcacguccucaucccggagaugcaguccagccugcugcagcagcacguggagcuccuggaguccagcguggucccccugaugcacccccucgccgaccccuccaccguguucaaggacggcaacgaggccgaggacuucguggagguccaccucccggacgugcacaagcaggucagcgggguggaccugggccugcccgacuggggcaaguacauccugguguccgccggggcgcugaucgcccucaugcugaucaucuuccugaugacgugcugccggcgcguguaccgccgggagagcaagcagcacucccugcgcggcaccgagcggaaggucagcgugaccagccagaacgggaaggccaucuccagcugggaguccuacaagaacggcagcgagacccgcauguga

SEQ ID NO: 94999 - RNA, 1575 nt, Artificial Sequence
  derived and/or modified CDS sequence (opt1) from glycoprotein__RABV__FJ465387.1
auguucagccgcucccugcuguucgugagccugcugggcuucccccucugcuucgggaaguucccgaucuacaccauccccgacaagcugggccccuggucccccaucgacauccaccaccugagcugcccgaacaaccucgucguggaggacgaggggugcaccaaccuguccggcuucagcuacauggagcugaaggugggguacaucuccgccaucaaggucaacggcuucacgugcaccggcguggugaccgaggccgagaccuacacgaacuucgucggguacgugaccaccaccuuccggcgcaagcaccuccggcccacgcccgacgcgugccgcagcgccuacaacuggaagauggccggcgacccccgguacgaggagucccugcacaacccguaccccgacuaccacuggcugcgcaccgugaagaccaccaaggagagccucgucaucaucucccccagcguggccgaccuggaccccuacgacaagucccugcacagccggguguucccgaacgggaagugcuccggccucacggucagcuccaccuacugcagcaccaaccacgacuacaccaucuggaugcccgagaacccccgccuggggacguccugcgacaucuucaccaacagcaagggcaagcgggccagccgcggcaacaagaccugcggguucguggacgagcggggccuguacaagucccucaagggggcgugcaagcugaagcugugcggcgugcucggccugcgccugaucgacgggaccugggucgccaugcacacgagcgacgagaccaaguggugcccgcccgaccagcucgugaaccugcacgacuuccgguccgacgagaucgagcaccugguggucgaggagcucgugaagaagcgcgaggagugccuggacgcccuggagagcaucaugaccaccaaguccgugagcuuccggcgccucucccaccuccggaagcugguccccggcuucgggaaggccuacacgaucuucaacaagacccucauggaggcggacgcccacuacaagagcauccgcaccugggacgagaucauccccuccaagggcugccugcgggucgggggccgcugccacccccacgugaacggcguguucuucaacgggaucauccugggcagcgacgggcacgugcucaucccggagaugcaguccagccugcugcagcagcacgucgagcuccuggaguccagcguggugccccugaugcacccccucgccgaccccuccaccgucuucaaggacggcaacgaggccgaggacuucguggaggugcaccucccggacguccacaagcaggucagcgggguggaccugggccugcccgacuggggcaaguacauccugguguccgccggggcgcugaucgcccucaugcugaucaucuuccugaugacgugcugccggcgcgugcaccgccgggagagcaagcagcacucccugcgcggcaccgagcggaaggugagcgucaccagccagaacgggaaggccaucuccagcugggaguccuacaagaacggcagcgagacccgcauguga

SEQ ID NO: 95000 - RNA, 1575 nt, Artificial Sequence
  derived and/or modified CDS sequence (opt1) from glycoprotein__RABV__FJ465388.1
auguucagccagucccugcuguucgugccccugcugggcuucagccucugcuucgggaaguucccgaucuacaccauccccgacaagcugggccccuggucccccaucgacauccaccaccugagcugcccgaacaaccucgucguggaggacgaggggugcaccaaccuguccggcuucagcuacauggagcugaaggugggguacaucuccgccauccgcgucagcggcuucacgugcaccggcguggugaccgaggccgagaccuacacgaacuucgucggguacgugaccaccaccuucaagcggaagcacuuccgccccacgcccgacgcgugccgggccgccuaccacuggaagauggccggcgacccccgcuacgaggagucccuccacaacccguaccccgacuaccacuggcugcggaccgugaagaccaccaaggagagccuggucaucaucucccccagcguggccgaccucgaccccuacgacaagucccugcacagccgcguguucccgaacgggaagugcuccggccugacggucagcuccaccuacugccucaccaaccacgacuacaccaucuggaugcccgagaacccccggcuggggacgagcugcgacaucuucaccaacucccgcggcaagcgggcgagccgcggcaacaagaccugcggguucguggacgagcggggccuguacaagagccucaagggggccugcaagcugaagcugugcggcgugcucggccugcgccugaucgacgggaccugggucgccaugcagacguccgacgagaccaaguggugcccgcccgaccagcucgugaaccugcacgacuuccggagcgacgagaucgagcaccugguggucgaggagcucgugaagaagcgcgaggagugccuggacgcccuggaguccaucaugaccaccaagagcguguccuuccggcgccucagccaccuccggaagcugguccccggcuucgggaaggcguacacgaucuucaacaagacccucauggaggccgacgcccacuacaaguccauccgcaccugggacgagaucgugcccagcaagggcugccugcgggucgggggccgcugccacccccacgugaacggcguguucuucaacgggaucauccugggcuccgacgggcacguccucaucccggagaugcagagcucccugcugcagcagcacguggagcuccuggagagcuccguggucccccugaugcacccccucgccgaccccagcaccguguucaaggacggcaacgaggccgaggacuucguggagguccaccucccggacgugcacaagcaggucuccgggguggaccugggccugcccaacuggggcaaguacauccuggugagcgcgggggcccugaucgcccucaugcugacgaucuuccugaugaccugcugccggcgcgugcgccggcccgagcccaagcagcaccgccugcggggcaccgagaagaaggucgccgugaccccgcaguccgggaaggccaucagcuccugggagagcuacaagaacggcgacgagacgcgcauguga

SEQ ID NO: 95001 - RNA, 1575 nt, Artificial Sequence
  derived and/or modified CDS sequence (opt1) from glycoprotein__RABV__FJ465389.1
augcugagccagucccuccugcuggugagccuccugggcuucccccugugcuucgggaaguucccgaucuacaccauccccgacaagcucggccccuggucccccaucgacauccaccaccugagcugcccgaacaaccuggucguggaggacgaggggugcaccucccucagcggcuucuccuacauggagcugaaggugggguacaucagcgccaucaaggucaacggcuucacgugcaccggcguggugaccgaggccgagaccuacacgaacuucgucggguacgugaccaccaccuuccgccggaagcaccuccgccccacgcccgacgcgugccgguccgccuacaacuggaagauggccggcgacccccgcuacgaggagagccugcacaacccguaccccgacuaccacuggcugcggaccgugaagaccaccaaggagucccuggucaucaucagccccuccguggccgaccucgaccccuacgacaagagccugcacucccgcguguucccgaacgggaagugcagcggccugacggucuccagcaccuacugcuccaccaaccacgacuacaccaucuggaugcccgagaacccccggcucgggacgagcugcgacaucuucaccaacagccgcggcaagcgggccucccgcggcaacaagaccugcggguucguggacgagcggggccuguacaagagccugaagggggcgugcaagcucaagcugugcggcgugcugggccuccgccugaucgacgggaccugggucgccaugcacacguccgacgagaccaaguggugcccgcccgaccagcuggugaaccuccacgacuuccggagcgacgagaucgagcaccugguggucgaggagcuggugaagaagcgcgaggagugccucgacgcccuggaguccaucaugaccaccaagagcguguccuuccggcgccugagccaccuccggaagcugguccccggcuucgggaaggccuacacgaucuucaacaagacccugauggaggcggacgcccacuacaaguccauccgcaccugggacgagaucgugcccagcaagggcugccuccgggucgggggccgcugccacccccacgugaacggcguguucuucaacgggaucauccugggcuccgacgggcacguccugaucccggagaugcagagcucccuccugcagcagcacguggagcugcucgagagcuccguggucccccugaugcacccccuggccgaccccagcaccguguucaaggacggcaacgaggccgaggacuucguggagguccaccucccggacgugcacaagcaggucuccgggguggaccugggccugcccgacuggggcaaguacauccucgugagcgccggggcgcugaucgcccugaugcugaucaucuuccucaugacgugcugccggcgcgugcaccgccgggaguccaagcagcacagccugcgcggcaccgagcggaaggucagcgugaucucccagaacgggaagaccaucagcuccugggagagcuacaagaacggcuccgacacccgcauguga

SEQ ID NO: 95002 - RNA, 1575 nt, Artificial Sequence
  derived and/or modified CDS sequence (opt1) from glycoprotein__RABV__FJ465390.1
auguucagccagacccugcuguucgugccccugcugggccucucccugugcuucgggaaguucccgaucuacaccauccccgacaagcugggccccuggagccccaucgacauccaccaccucuccugcccgaacaaccuggucguggaggacgaggggugcaccaaccugagcggcuucuccuacauggagcucaaggugggguacaucagcgccaucaaggucaacggcuucacgugcaccggcguggugaccgaggccgagaccuacaccaacuucgucggguacgugaccaccacguuccgccggaagcacuuccgccccacccccgacgcgugccgggccgccuacaacuggaagauggccggcgacccccgcuacgaggagucccugcacaacccguaccccgacuaccacuggcugcggaccgugaagaccacgaaggagagccucgucaucaucucccccagcguggccgaccuggaccccuacgacaagucccugcacagccgcguguuccucaacgggaagugcuccggccugaccgucagcuccaccuacugcagcaccaaccacgacuacacgaucuggaugccggaggacccccggcuggggaccuccugcgacaucuucaucaacagccgcggcaagcgggcguccaagggcagcaagaccugcggguucguggacgagcgcggccucuacaagagccugaagggggccugcaagcugaagcucugcggcgugcugggccugcggcucaucgacgggaccugggucgccaugcagacguccgaggagcccaaguggugcccgcccgaccagcuggugaaccugcacaacuuccgcagcgacgagaucgagcaccucguggucgaggagcuggugaagaagcgggaggagugccuggacgcccucgaguccaucaucaccaccaagagcguguccuuccgccggcugagccaccuccgcaagcucguccccggcuucgggaaggcguacaccaucuucaacaagacgcugauggaggccgacgcccacuacaaguccauccggaccugggacgagaucauccccagcaagggcugccugcgcgucgggggccggugccacccccacgugaacggcguguucuucaacgggaucauccucggcuccgacgggcacgugcugaucccggagaugcagagcucccugcuccagcagcacgucgagcugcuggagagcuccgugaucccccucaugcacccccuggccgaccccagcaccguguucaagggcggggacgaggccgaggacuucgucgagauccaccucccggacgugcacaagcagaucuccggcguggaccugggccugcccaacugggggaaguacauccuggucggcgcgggggcccucaucgcccugaugcugaucaucuuccugaucacgugcugccgcggcuuccaccggcccaagagcacccagcacucccucgggggcaccggccgcaaggugagcgugacgccccaguccgggaaggucaucagcagcugggaguccuacaagaagggcagcgagacccgccuguga

SEQ ID NO: 95003 - RNA, 1575 nt, Artificial Sequence
  derived and/or modified CDS sequence (opt1) from glycoprotein__RABV__FJ465391.1
augcccagccagucccuccuguucgugagccugcugggcuucucccucugcuucgggaaguucccgaucuacaccauccccgacaagcugggccccuggagccccaucgacauccaccaccuguccugcccgaacaaccucgucguggaggacgaggggugcaccaaccugagcggcuucuccuacauggagcugaaggugggguacaucagcgccaucaaggucaacggcuucacgugcaccggcguggugaccgaggccgagaccuacacgaacuucgucggguacgugaccaccaccuuccgccggaagcacuuccgccccacgcccgacgcgugccgguccgccuacaacuggaagauggccggcgacccccgcuacgaggagagccuccacaacccguaccccgacuaccacuggcugcggaccgugaagaccaccaaggagucccuggucaucaucagccccuccguggccgaccucgaccccuacgacaagagccugcacucccgcguguucccgaacgggaagugcagcggccugacggucuccagcaccuacugcuccaccaaccacgacuacaccaucuggaugcccgagaacccccggcucgggacgagcugcgacaucuucaccaacagccgcggcaagcgggccucccgcggcaacaagaccugcggguucguggacgagcggggccuguacaagagccugaagggggcgugcaagcucaagcugugcggcgugcugggccuccgccugaucgacgggaccugggucgccaugcacacguccgacgagaccaaguggugcccgcccgaccagcuggugaaccuccacgacuuccggagcgacgagaucgagcaccugguggucgaggagcuggugaagaagcgcgaggagugccucgacgcccuggaguccaucaugaccaccaagagcguguccuuccggcgccugagccaccuccggaagcugguccccggcuucgggaaggccuacacgaucuucaacaagacccugauggaggcggacgcccacuacaaguccauccgcaccugggacgagaucgugcccagcaagggcugccuccgggucgggggccgcugccacccccacgugaacggcguguucuucaacgggaucauccugggcuccgacgggcacguccugaucccggagaugcagagcucccuccugcagcagcacguggagcugcucgagagcuccguggucccccugaugcacccccuggccgaccccagcaccguguucaaggacggcaacgaggccgaggacuucguggagguccaccucccggacgugcacaagcaggucuccgggguggaccugggccugcccgacuggggccgguacauccucgugagcgccggggcgcugaucacgcugaugcucaucaucuuccugaugaccugcugccgccgcgugcaccggcgcgaguccaagcagcacagccugcggggcaccgagcgcaaggucagcgugaccucccagagcgggaaggccaucuccagcugggaguccuacaagaacggcagcgagacgcggauguga

SEQ ID NO: 95004 - RNA, 1575 nt, Artificial Sequence
  derived and/or modified CDS sequence (opt1) from glycoprotein__RABV__FJ465392.1
auguucccccagacccugcuguucgugccgcugcugggccucagccugugcuucgggaaguuccccaucuacaccauccccgacaagcugggccccugguccccgaucgacauccaccaccucagcugccccaacaaccuggucguggaggacgaggggugcacgaaccuguccggcuucagcuacauggagcucaaggugggguacaucuccgccaucaaggucaacggcuucacgugcaccggcguggugaccgaggccgagaccuacaccaacuucgucggguacgugaccaccacguuccgccggaagcacuuccgccccacccccgacgcgugccgggccgccuacaacuggaagauggccggcgacccgcgcuacgaggagagccugcacaaccccuaccccgacuaccacuggcugcggaccgugaagaccacgaaggagucccucgucaucaucagccccuccguggccgaccuggacccguacgacaagagccugcacucccgcguguuccucaacgggaagugcagcggccugaccgucuccagcaccuacugcuccaccaaccacgacuacacgaucuggaugcccgagaacccccggcuggggaccagcugcgacaucuucaucaacucccgcggcaagcgggcgagcaagggcaacaagaccugcggguucguggacgagcgcggccucuacaagucccugaagggggccugcaagcugaagcucugcggcgugcugggccugcggcucaucgacgggaccugggucgccaugcagacgagcgaggagcccaaguggugcccgcccgaccagcuggugaaccugcacaacuuccgcagcgacgagaucgagcaccucguggucgaggagcuggugaagaagcgggaggagugccuggacgcccucgaguccaucaugaccaccaagagcguguccuuccgccggcugagccaccuccgcaagcucguccccggcuucgggaaggcguacaccaucuucaacaagacgcugauggaggccgacgcccacuacaaguccauccggaccugggacgagaucauccccagcaagggcugccugcgcgucgggggccggugccacccgcacgugaacggcguguucuucaacgggaucauccucggcuccgacgggcacgugcugauccccgagaugcagagcucccugcuccagcagcacgucgagcugcuggagagcuccgugaucccccucaugcacccccuggccgacccgagcaccguguucaaggacggcgacgaggccgaggacuucgucgagauccaccuccccgacgugcacaagcagaucuccgggguggaccugggccugcccaacuggggcaaguacauccuggucagcgcgggggcccucaucacccugaugcugacgaucuuccugaucacgugcugccgcggcuuccggcgccccaaguccacccagcacagccucgggggcaccgggaugaagguguccgugaccccgcagagcggcaaggucaucuccagcugggagagcuacaagaagggcggggagacccgccuguga

SEQ ID NO: 95005 - RNA, 1575 nt, Artificial Sequence
  derived and/or modified CDS sequence (opt1) from glycoprotein__RABV__FJ465393.1
auguucagccagucccuccuguucgugccccugcugggcuucagccucugcuccgggaaguucccgaucuacaccauccccgacaagcugggccccuggagccccaucgacauccaccaccuguccugcccgaacaaccucgucguggaggacgaggggugcaccaaccugagcggcuucuccuacauggagcugaaggugggguacaucagcgccauccgcgucuccggcuucacgugcaccggcguggugaccgaggccgagaccuacacgaacuucgucggguacgugaccaccaccuucaagcggaagcacuuccgccccacgcccgacgcgugccgggccgccuaccacuggaagauggccggcgacccccgcuacgaggagagccuccacaacccguaccccgacuaccacuggcugcggaccgugaagaccaccaaggagucccugaucaucaucagccccuccgucgccgaccucgaccccuacgacaagagccugcacucccgcguguucccgaacgggaagugcagcggccugacgguguccagcaccuacugcuccaccaaccacgacuacaccaucuggaugcccgagaacccccggcucgggacgagcugcgacaucuucaccaacagccgcggcaagcgggcgucccgcggcaacaagaccugcggguucgucgacgagcggggccuguacaagagccugaagggggccugcaagcucaagcugugcggcgugcugggccuccgccugaucgacgggaccuggguggccaugcagacguccgacgagaccaaguggugcccgcccgaccagcuggucaaccuccacgacuuccggagcgacgagaucgagcaccuggugguggaggagcuggucaagaagcgcgaggagugccucgacgcccuggaguccaucaugaccaccaagagcguguccuuccggcgccugagccaccuccggaagcuggugcccggcuucgggaaggcguacacgaucuucaacaagacccugauggaggccgacgcccacuacaaguccauccgcaccugggacgagaucguccccagcaagggcugccuccgggucgggggccgcugccacccccacgugaacggcguguucuucaacgggaucauccugggcuccgacgggcacgugcugaucccggagaugcagagcucccuccugcagcagcacgucgagcugcucgagagcuccguggugccccugaugcacccccuggccgaccccagcaccgucuucaaggacggcaacgaggccgaggacuucguggaggugcaccucccggacguccacaagcaggucuccgggguggaccugggccugcccaacuggggccgguacauccucgugggggcgggcgcccugaucgcccugaugcucacgaucuuccugcugaccugcugccgccgcgugcaccagcccgagcccaagcagcaccggcugcgcgaggccgagcggaagguggccgucaccagccaguccgggaaggcgaucagcagcugggaguccuacaagaacggcggggagacccgcauguga

SEQ ID NO: 95006 - RNA, 1575 nt, Artificial Sequence
  derived and/or modified CDS sequence (opt1) from glycoprotein__RABV__FJ465394.1
auguucagccgcucccugcuguucgugagccugcugggcuucccccucugcuucgggaaguucccgaucuacaccauccccgacaagcugggccccuggucccccaucgacauccaccaccugagcugcccgaacaaccucgucguggaggacgaggggugcaccaaccuguccggcuucagcuacauggagcugaaggugggguacaucuccgccaucaaggucaacggcuucacgugcaccggcguggugaccgaggccgagaccuacacgaacuucgucggguacgugaccaccaccuuccggcgcaagcaccuccggcccacgcccgacgcgugccgcagcgccuacaacuggaagauggccggcgacccccgguacgaggagucccugcacaacccguaccccgacuaccacuggcugcgcaccgugaagaccaccaaggagagccucgucaucaucucccccagcguggccgaccuggaccccuacgacaagucccugcacagccggguguucccgaacgggaagugcuccggccucacggucagcuccaccuacugcagcaccaaccacgacuacaccaucuggaugcccgagaacccccgccuggggacguccugcgacaucuucaccaacagcaagggcaagcgggccagccgcggcaacaagaccugcggguucguggacgagcggggccuguacaagucccucaagggggcgugcaagcugaagcugugcggcgugcucggccugcgccugaucgacgggaccugggucgccaugcacacgagcgacgagaccaaguggugcccgcccgaccagcucgugaaccugcacgacuuccgguccgacgagaucgagcaccugguggucgaggagcucgugaagaagcgcgaggagugccuggacgcccuggagagcaucaugaccaccaaguccgugagcuuccggcgccucucccaccuccggaagcugguccccggcuucgggaaggccuacacgaucuucaacaagacccucauggaggcggacgcccacuacaagagcauccgcaccugggacgagaucgugcccuccaagggcugccugcgggucgggggccgcugccacccccacgugaacggcguguucuucaacgggaucauccugggcagcgacgggcacguccucaucccggagaugcaguccagccugcugcagcagcacguggagcuccuggaguccagcguggucccccugaugcacccccucgccgaccccuccaccguguucaaggacggcaacgaggccgaggacuucguggagguccaccucccggacgugcacaagcaggucagcgggguggaccugggccugcccgacuggggcaaguacauccugguguccgccggggcgcugaucgcccucaugcugaucaucuuccugaugacgugcugccggcgcgugcaccgccgggagagcaagcagcacucccugcgcggcaccgagcggaaggucagcgugaccagccagaacgggaaggccaucuccagcugggaguccuacaagaacggcagcgagacccgcauguga

SEQ ID NO: 95007 - RNA, 1575 nt, Artificial Sequence
  derived and/or modified CDS sequence (opt1) from glycoprotein__RABV__FJ465395.1
augagcucccagagccuccuguucgugucccugcugggcuucagccucugcuucgggaaguuccccaucuacaccaucccggacaagcugggccccuggucccccaucgacauccaccaccugagcugccccaacaaccucgucguggaggacgaggggugcaccaaccuguccggcuucagcuacauggagcugaaggugggguacaucuccgccaucaaggucaacggcuucacgugcaccggcguggugaccgaggccgagaccuacacgaacuucgucggguacgugaccaccaccuuccgccggaagcacuuccgcccgacgcccgacgcgugccggagcgccuacaacuggaagauggccggcgacccccgcuacgaggagucccuccacaaccccuacccggacuaccacuggcugcggaccgugaagaccaccaaggagagccuggucaucaucucccccagcguggccgaccucgaccccuacgacaagucccugcacagccgcguguuccccaacgggaagugcuccggccugacggucuucagcaccuacugcuccaccaaccacgacuacaccaucuggaugccggagaacccccggcucgggacgagcugcgacaucuucaccaacagccgcggcaagcgggccucccgcggcaacaagaccugcggguucguggacgagcggggccuguacaagagccugaagggggcgugcaagcucaagcugugcggcgugcugggccuccgccugaucgacgggaccugggucuccaugcacacgagcgacgagaccaaguggugcccgcccgaccagcuggugaaccuccacgacuuccgguccgacgagaucgagcaccugguggucgaggagcuggugaagaagcgcgaggagugccucgacgcccuggagagcaucaugaccaccaaguccgugagcuuccggcgccugucccaccuccggaagcugguccccggcuucgggaaggccuacacgaucuucaacaagacccugauggaggccgacgcgcacuacaagagcauccgcaccugggacgagaucgugcccuccaagggcugccuccgggucgggggccgcugccacccccacgugaacggcguguucuucaacgggaucauccugggcagcgacgggcacguccugauccccgagaugcaguccagccuccugcagcagcacguggagcugcucgaguccagcguggucccgcugaugcacccccuggccgaccccuccaccguguucaaggacggcaacgaggccgaggacuucguggagguccaccuccccgacgugcacaagcaggucagcgggguggaccugggccugccggacuggggccgguaccuccugguguccgccggggcccugaucacgcucaugcugaucaucuuccugaugaccugcugccgccgcgugcaccggcgcgagagcaagcagcacagccugcggggcaccgagcgcaaggucuccgugaccagccaguccgggaaggcgaucagcuccugggagagcuacaagaacggcuccgagacgcggauguga

SEQ ID NO: 95008 - RNA, 1575 nt, Artificial Sequence
  derived and/or modified CDS sequence (opt1) from glycoprotein__RABV__FJ465396.1
augcugagccagucccuccugcuggugagccuccugggcuucccccugugcuucgggaaguucccgaucuacaccauccccgacaagcucggccccuggucccccaucgacauccaccaccugagcugcccgaacaaccuggucguggaggacgaggggugcaccaaccucuccggcuucagcuacauggagcugaaggugggguacaucuccgccaucaaggucaacggcuucacgugcaccggcguggugaccgaggccgagaccuacacgaacuucgucggguacgugaccaccaccuuccgccggaagcaccuccgccccacgcccgacgcgugccggagcgccuacaacuggaagauggccggcgacccccgcuacgaggagucccugcacaacccguaccccgacuaccacuggcugcggaccgugaagaccaccaaggagagccuggucaucaucucccccagcguggccgaccucgaccccuacgacaagucccugcacagccgcguguucccgaacgggaagugcuccggccugacggucagcuccaccuacugcagcaccaaccacgacuacaccaucuggaugcccgagaacccccggcucgggacguccugcgacaucuucaccaacagccgcggcaagcgggccagccgcggcaacaagaccugcggguucguggacgagcggggccuguacaagucccugaagggggcgugcaagcucaagcugugcggcgugcugggccuccgccugaucgacgggaccugggucgccaugcacacgagcgacgagaccaaguggugcccgcccgaccagcuggugaaccuccacgacuuccgguccgacgagaucgagcaccugguggucgaggagcuggugaagaagcgcgaggagugccucgacgcccuggagagcaucaugaccaccaaguccgugagcuuccggcgccugucccaccuccggaagcugguccccggcuucgggaaggccuacacgaucuucaacaagacccugauggaggcggacgcccacuacaagagcauccgcaccugggacgagaucgugcccuccaagggcugccuccgggucgggggccgcugccacccccacgugaacggcguguucuucaacgggaucauccugggcagcgacgggcacguccugaucccggagaugcaguccagccuccugcagcagcacguggagcugcucgaguccagcguggucccccugaugcacccccuggccgaccccuccaccguguucaaggacggcaacgaggccgaggacuucguggagguccaccucccggacgugcacaagcaggucagcgggguggaccugggccugcccgacuggggcaaguacauccucguguccgccggggcgcugaucgcccugaugcugaucaucuuccucaugacgugcugccggcgcgugcaccgccgggagagcaagcagcacucccugcgcggcaccgagcggaaggucagcgugaucagccagaacgggaaggccaucuccagcugggaguccuacaagaacggcagcgacacccgcauguga

SEQ ID NO: 95009 - RNA, 1575 nt, Artificial Sequence
  derived and/or modified CDS sequence (opt1) from glycoprotein__RABV__FJ465397.1
auggugagccagucccuccuguucgucccccugcugggcuucagccucugcuucgggaaguucccgaucuacaccauccccgacaagcugggccccuggucccccaucgacauccaccaccugagcugcccgaacaaccucgugguggaggacgaggggugcaccaaccuguccggcuucagcuacauggagcugaaggucggguacaucuccgccaucaaggugaacggcuucacgugcaccggcguggucaccgaggccgagaccuacacgaacuucgugggguacgugaccaccaccuuccgccggaagcacuuccgccccauccccgacgcgugccgggccgccuaccacuggaagauggccggcgacccccgcuacgaggagagccuccacaacccguaccccgacuaccacuggcugcggacggucaagaccaccaaggagucccuggugaucaucagccccuccguggccgaccucgaccccuacgacaagagccugcacucccgcgucuucccgaacgggaagugcagcggccugaccguguccagcacguacugcuccaccaaccacgacuacaccaucuggaugcccgagaacccccggcucgggaccagcugcgacaucuucacgaacucccgcggcaagcgggcgagccgcggcaacaagaccugcggguucguggacgagcggggccuguacaagagccugaagggggccugcaagcucaagcugugcggcguccugggccuccgccugaucgacgggaccuggguggccaugcagaccuccgacgagacgaaguggugcccgcccgaccagcuggugaaccuccacgacuuccggagcgacgagaucgagcaccuggucguggaggagcuggugaagaagcgcgaggagugccucgacgcccuggaguccaucaugaccaccaagagcgucuccuuccggcgccugagccaccuccggaagcuggugcccggcuucgggaaggcguacaccaucuucaacaagacgcugauggaggccgacgcccacuacaaguccauccgcaccugggacgagaucgugcccagcaagggcugccuccgggucgggggccgcugccacccccacaucaacggcguguucuucaacgggaucauccugggcuccgacgggcacguccugaucccggagaugcagagcucccuccugcagcagcacauggagcugcucgagagcuccguggugccccugaugcacccccuggccgaccccagcaccgucuucaaggacggcaacgaggccgaggacuucguggaggugcaccucccggacguccacaagcaggucuccgagaucgaccuggggcugcccaacuggggcaaguacauccucgugagcgcgggcgcccugaucgcccugaugcucaccauccugcugaucacgugcugccggaaggugcaccgccccaagcccaagcagcaccgccugcgggggaccgagcgcaagguggccgugaccucccagagcggcaaggccaucuccagcugggagagcuacaagaacgggggcgagacccggauguga

SEQ ID NO: 95010 - RNA, 1575 nt, Artificial Sequence
  derived and/or modified CDS sequence (opt1) from glycoprotein__RABV__FJ465398.1
augagcucccagagccugcuguucgugucccugcugggcuucagccucugcuucgggaaguuccccaucuacaccaucccggacaagcugggccccuggucccccaucgacauccaccaccugagcugccccaacaaccucgucguggaggacgaggggugcaccaaccuguccggcuucagcuacauggagcugaaggugggguacaucuccgccaucaaggucaacggcuucacgugcaccggcguggugaccgaggccgagaccuacacgaacuucgucggguacgugaccaccaccuuccgccggaagcacuuccgcccgacgcccgacgcgugccggagcgccuacaacuggaagauggccggcgacccccgcuacgaggagucccuccacaaccccuacccggacuaccacuggcugcggaccgugaagaccaccaaggagagccuggucaucaucucccccagcguggccgaccucgaccccuacgacaagucccugcacagccgcguguuccccaacgggaagugcuccggccugacggucagcuccaccuacugcagcaccaaccacgacuacaccaucuggaugccggagaacccccggcucgggacgagcugcgacaucuucaccaacucccgcggcaagcgggccagccgcggcaacaagaccugcggguucguggacgagcggggccuguacaagucccugaagggggcgugcaagcucaagcugugcggcgugcugggccuccgccugaucgacgggaccugggucgccaugcacacgagcgacgagaccaaguggugcccgcccgaccagcuggugaaccuccacgacuuccgguccgacgagaucgagcaccugguggucgaggagcuggugaagaagcgcgaggagugccucgacgcccuggagagcaucaugaccaccaaguccgugagcuuccggcgccugucccaccuccggaagcugguccccggcuucgggaaggccuacacgaucuucaacaagacccugauggaggcggacgcccacuacaagagcauccgcaccugggacgagaucgugcccuccaagggcugccuccgggucgggggccgcugccacccccacgugaacggcguguucuucaacgggaucauccugggcagcgacgggcacguccugauccccgagaugcaguccagccuccugcagcagcacguggagcugcucgaguccagcguggucccgcugaugcacccccuggccgaccccuccaccguguucaaggacggcaacgaggccgaggacuucguggagguccaccuccccgacgugcacaagcaggucagcgggguggaccugggccugccggacuggggccgguacauccucguguccgccggggcgcugaucacgcugaugcucaucaucuuccugaugaccugcugccgccgcgugcaccuccgggagagcaagcgccacagccugcggggcaccgagcgcaaggucuccgugaccagccaguccgggaaggccaucagcuccugggagagcuacaagaacggcuccgagacgcggauguga

SEQ ID NO: 95011 - RNA, 1575 nt, Artificial Sequence
  derived and/or modified CDS sequence (opt1) from glycoprotein__RABV__FJ465399.1
augagcucccagagccugcuguucgugucccugcugggcuucagccucugcuucgggaaguuccccaucuacaccaucccggacaagcugggccccuggucccccaucgacauccaccaccugagcugccccaacaaccucgucguggaggacgaggggugcaccaaccuguccggcuucagcuacauggagcugaaggugggguacaucuccgccaucaaggucaacggcuucacgugcaccggcguggugaccgaggccgagaccuacacgaacuucgucggguacgugaccaccaccuuccgccggaagcacuuccgcccgacgcccgacgcgugccggagcgccuacaacuggaagauggccggcgacccccgcuacgaggagucccuccacaaccccuacccggacuaccacuggcugcggaccgugaagaccaccaaggagagccuggucaucaucucccccagcguggccgaccucgaccccuacgacaagucccugcacagccgcguguuccccaacgggaagugcuccggccugacggucuucagcaccuacugcuccaccaaccacgacuacaccaucuggaugccggagaacccccggcucgggacgagcugcgacaucuucaccaacagccgcggcaagcgggccucccgcggcaacaagaccugcggguucguggacgagcggggcugguacaagagccugaagggggcgugcaagcugaagcucugcggcgugcugggccugcgccucaucgacgggaccugggucgccaugcacacguccgacgagaccaaguggugcccgcccgaccagcuggugaaccugcacgacuuccggagcgacgagaucgagcaccucguggucgaggagcuggugaagaagcgcgaggagugccuggacgcccucgaguccaucaugaccaccaagagcguguccuuccggcgccugagccaccuccggaagcucguccccggcuucgggaaggccuacacgaucuucaacaagacccugauggaggcggacgcccacuacaaguccauccgcaccugggacgagaucgugcccagcaagggcugccugcgggucgggggccgcugccacccccacgugaacggcguguucuucaacgggaucauccucggcuccgacgggcacguccugauccccgagaugcagagcucccugcuccagcagcacguggagcugcuggagagcuccguggucccgcucaugcacccccuggccgaccccagcgccguguucaaggacggcaacgaggccgaggacuucguggagguccaccuccccgacgugcacaagcaggucuccgggguggaccugggccugccggacuggggccgguacauccuggugagcgcgggggcccucaucacccugaugcugaucaucuuccucaugacgugcugccgccgcgugcaccggcgcgaguccaagcagcacagccugcggggcaccgagcgcaaggucagcgugaccucccagagcgggaaggccaucuccagcugggaguccuacaagaacggcagcgagacccggauguga

SEQ ID NO: 95012 - RNA, 1575 nt, Artificial Sequence
  derived and/or modified CDS sequence (opt1) from glycoprotein__RABV__FJ465400.1
auguucccccagacccugcuguucgugccgcugcugggccucagccugugcuucgggaaguuccccaucuacaccauccccgacaagcugggccccugguccccgaucgacauccaccaccucagcugccccaacaaccuggucguggaggacgaggggugcacgaaccuguccggcuucagcuacauggagcucaaggugggguacaucuccgccaucaaggucaacggcuucacgugcaccggcguggugaccgaggccgagaccuacaccaacuucgucggguacgugaccaccacguuccgccggaagcacuuccgccccacccccgacgcgugccgggccgccuacaacuggaagauggccggcgacccgcgcuacgaggagagccugcacaaccccuaccccgacuaccacuggcugcggaccgugaagaccacgaaggagucccucgucaucaucagccccuccguggccgaccuggacccguacgacaagagccugcacucccgcguguuccucaacgggaagugcagcggccugaccgucuccagcaccuacugcuccaccaaccacgacuacagcaucuggaugcccgagaacccccggcuggggacguccugcgacaucuucgugaacagccgcggcaagcgggcguccaagggcaacaagaccugcggguucguggacgagcgcggccucuacaagagccugaagggggccugcaagcugaagcucugcggcguccugggccugcggcucaucgacgggaccuggguggccaugcagaccagcgaggagcccaaguggugcccgcccgaccagcuggugaaccugcacaacuuccgcuccgacgagaucgagcaccucgucguggaggagcuggugaagaagcgggaggagugccuggacgcccucgagagcaucaugacgaccaaguccgucagcuuccgccggcugucccaccuccgcaagcucgugcccggcuucgggaaggcguacaccaucuucaacaagacccugauggaggccgacgcccacuacaagagcauccggacgugggacgagaucauccccuccaagggcugccugcgcgucgggggccggugccacccgcacgugaacggcguguucuucaacgggaucauccucggcagcgacgggcacguccugauccccgagaugcaguccagccugcuccagcagcacguggagcugcuggaguccagcgugaucccccucaugcacccccuggccgacccguccaccgccuucaaggacggcgacgaggcggaggacuucgucgagauccaccuccccgacgugcacaagcagaucagcgggguggaccugggccugcccaacuggggcaaguacauccuggucuccgccggggcccucaucgcccugaugcugaccaucuuccugaucacgugcugccgcggcuuccaccagcccaagagcacccagcacucccucgggggcaccgagcggaaggugagcgugaccccgcuguccgggaaggucaucagcagcugggaguccuacaagaagggcggcgagacccgccuguga

SEQ ID NO: 95013 - RNA, 1575 nt, Artificial Sequence
  derived and/or modified CDS sequence (opt1) from glycoprotein__RABV__FJ465401.1
augagcucccagagccuccuguucgccucccugcugggcuucagccucugcuucgggaaguuccccaucuacaccaucccggacaagcugggccccuggucccccaucgacauccaccaccugagcugccccaacaaccucguggucgaggacgaggggugcaccaaccuguccggcuucagcuacauggagcugaaggugggguacaucuccgccaucaaggugaacggcuucacgugcaccggcgucgugaccgaggcggagaccuacacgaacuucgugggguacgucaccaccaccuuccgccggaagcacuuccgcccgacgcccgacgccugccggagcgccuacaacuggaagauggccggcgacccccgcuacgaggagucccuccacaaccccuacccggacuaccacuggcugcggaccgugaagaccaccaaggagagccuggugaucaucucccccagcgucgccgaccucgaccccuacgacaagucccugcacagccgcguguuccccaacgggaagugcuccggccugacggugagcuccaccuacugcagcaccaaccacgacuacaccaucuggaugccggagaacccccggcucgggacgagcugcgacaucuucaccaacucccgcggcaagcgggcgagccgcggcaacaagaccugcggguucgucgacgagcggggccuguacaagucccugaagggggccugcaagcucaagcugugcggcgugcugggccuccgccugaucgacgggaccuggguggccaugcacacgagcgacgagaccaaguggugcccgcccgaccagcuggucaaccuccacgacuuccgguccgacgagaucgagcaccuggugguggaggagcuggucaagaagcgcgaggagugccucgacgcccuggagagcaucaugaccaccaaguccgugagcuuccggcgccugucccaccuccggaagcuggugcccggcuucgggaaggcguacacgaucuucaacaagacccugauggaggccgacgcccacuacaagagcauccgcaccugggacgagaucguccccuccaagggcugccuccgggucgggggccgcugccacccccacgugaacggcguguucuucaacgggaucauccugggcagcgacgggcacgugcugauccccgagaugcaguccagccuccugcagcagcacgucgagcugcucgaguccagcguggugccgcugaugcacccccuggccgaccccuccaccgucuucaaggacggcaacgaggccgaggacuucguggaggugcaccuccccgacguccacaagcaggucagcgggguggaccugggccugccggacuggggccgguaccuccugguguccgcgggggcccugaucacgcucaugcugaucaucuuccugaugaccugcugccgccgcgugcaccggcgcgagagcaagcagcacagccugcggggcaccgagcgcaagguguccgucaccagccaguccgggaaggccaucagcuccugggagagcuacaagaacggcuccgagacgcggauguga

SEQ ID NO: 95014 - RNA, 1575 nt, Artificial Sequence
  derived and/or modified CDS sequence (opt1) from glycoprotein__RABV__FJ465402.1
auguucccccaggcccuccuguucgugccgcugcugggcuucagccucugcuucgggaaguuccccaucuacaccauccccgacaagcugggccccugguccccgaucgacauccaccaccugagcugccccaacaaccucgucguggaggacgaggggugcaccaaccuguccggcuucagcuacauggagcugaaggugggguacaucuccgccaucaaggucaacggcuucacgugcaccggcguggugaccgaggcggagaccuacacgaacuucgucggguacgugaccaccaccuuccgccggaagcacuuccgccccacgagcgacgccugccgggccgccuacaacuggaagauggccggcgacccccgcuacgaggagucccuccacaacccguaccccgacuaccacuggcugcggaccgugaagaccaccaaggagagccuggucaucaucucccccagcguggcggaccucgaccccuacgacaagucccugcacagccgcguguucccgaacgggcggugcuccggccugacggucagcuccaccuacugcagcaccaaccacgacuacaccaucuggaugcccgagaacccccgccucgggacguccugcgacaucuucaccaacagccggggcaagcgcgccuccaagggcaaccggaccugcggguucguggacgagcgcggccuguacaagagccugaagggggccugcaagcucaagcugugcggcgugcugggccuccggcugauggacgggaccugggucgccaugcagacgagcgaggagaccaaguggugcccgcccgaccagcuggugaaccuccacgacuuccgcuccgacgagaucgagcaccugguggucgaggagcuggugaagaagcgggaggagugccucgacgcgcuggagagcaucaugaccaccaaguccgugagcuuccgccggcugucccaccuccgcaagcugguccccggcuucgggaaggccuacacgaucuucaacaagacccugauggaggccgacgcccacuacaagagcauccggaccuggaacgagaucauccccuccaagggcugccuccgcgucgggggccggugccacccccacgugaacggcguguucuucaacgggaucauccugggcagcgacgggcacgugcugaucccggagaugcaguccagccuccugcagcagcacgucgagcugcucgaguccagcguggugccccugaugcacccccuggccgaccccuccaccgucuucaaggacggcggggaggcggaggacuucguggaggugcaccucccggacguccacaagcaggucagcggcguggaccugggccugcccuccugggggaaguacauccucgugggcagcggggcccugaucgcccuggugcucaucaucuuccugaugacgugcugccgccgcgugucccggcccgagagcacccagcacucccugcgcggcaccgggaugaaggucagcaucaccagccaguccggcaaggccauccccagcugggaguccuacaagagcaagaacgagacgaagauguga

SEQ ID NO: 95015 - RNA, 1575 nt, Artificial Sequence
  derived and/or modified CDS sequence (opt1) from glycoprotein__RABV__FJ465403.1
auguucccccagacccugcuguucgugccgcugcugggccucagccugugcuucgggaaguuccccaucuacaccauccccgacaagcugggccccugguccccgaucgacauccaccaccucagcugccccaacaaccuggucguggaggacgaggggugcacgaaccuguccggcuucagcuacauggagcucaaggugggguacaucuccgccaucaaggucaacggcuucacgugcaccggcguggugaccgaggccgagaccuacaccaacuucgucggguacgugaccaccacguuccgccggaagcacuuccgccccacccccgacgcgugccgggccgccuacaacuggaagguggccggcgacccgcgcuacgaggagagccugcacaaccccuaccccgacuaccacuggcugcggaccgucaagaccacgaaggagucccucgugaucaucagccccuccguggccgaccuggacccguacgacaagagccugcacucccgcgucuuccucaacgggaagugcagcggccugaccguguccagcaccuacugcuccaccaaccacgacuacacgaucuggaugcccgagaacccccggcuggggaccagcugcgacauccucuccaacagccgcggcaagcgggcguccaagggcaacaagaccugcggguucguggacgagcgcggccuguacaagagccugaagggggccugcaagcucaagcugugcggcguccugggccuccggcugaucgacgggaccuggguggccaugcagacgagcgaggagcccaaguggugcccgcccgaccagcuggugaaccuccacaacuuccgcuccgacgagaucgagcaccuggucguggaggagcuggugaagaagcgggaggagugccucgacgcccuggagagcaucaugaccaccaaguccgucagcuuccgccggcugucccaccuccgcaagcuggugcccggcuucgggaaggcguacaccaucuucaacaagacgcugauggaggccgacgcccacuacaagagcauccggaccugggacgagaucauccccuccaagggcugccuccgcgucgggggccggugccacccgcacgugaacggcguguucuucaacgggaucauccugggcagcgacgggcacguccugauccccgagaugcaguccagccuccugcagcagcacguggagcugcucgaguccagcgugaucccccugaugcacccccuggccgacccguccaccgucuucaaggacggcgacgaggccgaggacuucguggagauccaccuccccgacgugcacaagcagaucagcggggucgaccugggccugcccaacuggggcaaguacauccucauguccgcgggggcccugaucacccugaugcugacgaucuuccucaucacgugcugccgcggcuuccggcgccccaagagcacccagcacucccucgggggcaccgggaugaaggugagcgugaccccgcaguccggcaaggucaucagcagcugggaguccuacaagaagggcggggagacccgccuguga

SEQ ID NO: 95016 - RNA, 1575 nt, Artificial Sequence
  derived and/or modified CDS sequence (opt1) from glycoprotein__RABV__FJ465404.1
auguucccccaggcccuccuguucgugccgcugcugggcuucagccucugcuucgggaaguuccccaucuacaccauccccgacaagcugggccccugguccccgaucgacauccaccaccugagcugccccaacaaccucgucguggaggacgaggggugcaccaaccuguccggcuucagcuacauggagcugaaggugggguacaucuccgccaucaaggucaacggcuucacgugcaccggcguggugaccgaggcggagaccuacacgaacuucgucggguacgugaccaccaccuuccgccggaagcacuuccgccccacgagcgacgccugccgggccgccuacaacuggaagauggccggcgacccccgcuacgaggagucccuccacaacccguaccccgacuaccacuggcugcggaccgugaagaccaccaaggagagccuggucaucaucucccccagcguggcggaccucgaccccuacgacaagucccugcacagccgcguguucccgaacgggcggugcuccggccugacggucagcuccaccuucugcagcaccaaccacgacuacaccaucuggaugcccgagaacccccgccucgggacguccugcgacaucuucaccaacagccggggcaagcgcgccuccaagggcaaccggaccugcggguucguggacgagcgcggccuguacaagagccugaagggggccugcaagcucaagcugugcggcgugcugggccuccggcugauggacgggaccugggucgccaugcagacgagcgaggagaccaaguggugcccgcccgaccagcuggugaaccuccacgacuuccgcuccgacgagaucgagcaccugguggucgaggagcuggugaagaagcgggaggagugccucgacgcgcuggagagcaucaugaccaccaaguccgugagcuuccgccggcugucccaccuccgcaagcugguccccggcuucgggaaggccuacacgaucuucaacaagacccugauggaggccgacgcccacuacaagagcauccggaccuggaacgagaucauccccuccaagggcugccuccgcgucgggggccggugccacccccacgugaacggcguguucuucaacgggaucauccugggcagcgacgggcacgugcugaucccggagaugcaguccagccuccugcagcagcacgucgagcugcucgaguccagcguggugccccugaugcacccccuggccgaccccuccaccgucuucaagaacggcggggaggcggaggacuucguggaggugcaccucccggacguccacaagcaggucagcggcguggaccugggccugcccuccugggggaaguacauccucgugagcuccggcgcccugaucgcccuggugcucgugaucuuccugaugacgugcugccgcaaggucaaccgccccgagagcacccagcacucccugcgggggaccggcaugaaggugagcaucaccagccaguccgggaaggccauccccagcugggaguccuacaagagcgagaacgagacgaagauguga

SEQ ID NO: 95017 - RNA, 1575 nt, Artificial Sequence
  derived and/or modified CDS sequence (opt1) from glycoprotein__RABV__FJ465405.1
auguucagccagucccugcuccuggugagccugcucggcuucccccuguccuucgggaaguucccgaucuacaccauccccgacaagcugggccccuggagccccaucgacauccaccaccucuccugcccgaacaaccuggucguggaggacgaggggugcaccaaccugagcggcuucuccuacauggagcucaaggugggguacaucagcgccaucaaggucaacggcuucacgugcaccggcguggugaccgaggccgagaccuacacgaacuucgucggguacgugaccaccaccuuccgccggaagcaccuccgccccacgcccgacgcgugccgguccgccuacaacuggaagguggccggcgacccccgcuacgaggagagccugcacaacccguaccccgacuaccacuggcugcggaccgucaagaccaccaaggagucccuggugaucaucagccccuccguggccgaccuggaccccuacgacaagagccuccacucccgcgucuucccgaacgggaagugcagcggccugacgguguccagcaccuacugcuccaccaaccacgacuacaccaucuggaugcccgagaacccccggcuggggacgagcugcgacaucuucaccaacagccgcggcaagcgggccuccaagggcaacaagaccugcggguucguggacgagcgcggccucuacaagagccugaagggggcgugcaagcugaagcucugcggcguccugggccugcggcucaucgacgggaccuggguggccaugcacacguccgacgagaccaaguggugcccgcccgaccagcuggugaaccugcacgacuuccgcagcgacgagaucgagcaccucgucguggaggagcuggugaagaagcgggaggagugccuggacgcccucgaguccaucaugaccaccaagagcgucuccuuccgccggcugagccaccuccgcaagcuggugcccggcuucgggaaggccuacacgaucuucaacaagacccugauggaggcggacgcccacuacaaguccauccggaccugggacgagaucauccccagcaagggcugccugcgcgucgggggccggugccacccccacgugaacggcguguucuucaacgggaucauccucggcuccgacgggcacguccugaucccggagaugcagagcucccugcuccagcagcacaucgagcugcuggagagcuccguggugccccucaugcacccccuggccgaccccagcaccgucuucaaggacggcgacgaggccgaggacuucguggaggugcaccucccggacguccacaagcaggucuccgggguggaccugggccugcccgacuggggcaaguacauccuggugagcgccggggcgcucaucgcccugaugcugaucaucuuccugaugacgugcugccgccgggugcaccgccgcgaguccaagcagcacagcuuccggggcaccgagcgcaaggugagcgucaccucccagaacgggaaggccaucagcuccugggagagcuacaagaacggcuccgacacccggauguga

SEQ ID NO: 95018 - RNA, 1575 nt, Artificial Sequence
  derived and/or modified CDS sequence (opt1) from glycoprotein__RABV__FJ465406.1
auguucagccagucccugcuccuggugagccugcucggcuucccccugugcuucgggaaguucccgaucuacaccauccccgacaagcugggccccuggucccccaucgacauccaccaccucagcugcccgaacaaccuggucguggaggacgaggggugcaccaaccuguccggcuucagcuacauggagcucaaggugggguacaucuccgccaucaaggucaacggcuucacgugcaccggcguggugaccgaggccgagaccuacacgaacuucgucggguacgugaccaccaccuuccgccggaagcaccuccgccccacgcccgacgcgugccggagcgccuacaacuggaagauggccggcgacccccgcuacgaggagucccugcacaacccguaccccgacuaccacuggcugcggaccgugaagaccaccaaggagagccuggucaucaucucccccagcguggccgaccuggaccccuacgacaagucccuccacagccgcguguucccgaacgggaagugcuccggccugacggucagcuccaccuacugcagcaccaaccacgacuacaccaucuggaugcccgagaacccccggcuggggacguccugcgacaucuucaccaacagccgcggcaagcgggccagccgcggcaacaagaccugcggguucguggacgagcggggccucuacaagucccugaagggggcgugcaagcugaagcucugcggcgugcugggccugcgccucaucgacgggaccugggucgccaugcacacgagcgacgagaccaaguggugcccgcccgaccagcuggugaaccugcacgacuuccgguccgacgagaucgagcaccucguggucgaggagcuggugaagaagcgcgaggagugccuggacgcccucgagagcaucaugaccaccaaguccgugagcuuccggcgccugucccaccuccggaagcugguccccggcuucgggaaggccuacacgaucuucaacaagacccugauggaggcggacgcccacuacaagagcauccgcaccugggacgagaucgugcccuccaagggcugccugcgggucgggggccgcugccacccccacgugaacggcguguucuucaacgggaucauccucggcagcgacgggcacguccugaucccggagaugcaguccagccugcuccagcagcacguggagcugcuggaguccagcguggucccccucaugcacccccuggccgaccccuccaccguguucaaggagggcaacgaggccgaggacuucguggagguccaccucccggacgugcacaagcaggucagcgggguggaccugggccugcccgacuggggcaaguacauccugguguccgccggggcgcucaucgcccugaugcugaucauccugcucaugacgugcugccggcgcgugcaccgccgggagagcaagcagcacucccugcgcggcaccgagcggaaggucagcgugaccagccagaacgggaaggccaucuccagcugggaguccuacaagaaccgcagcgacacccggauguga

SEQ ID NO: 95019 - RNA, 1575 nt, Artificial Sequence
  derived and/or modified CDS sequence (opt1) from glycoprotein__RABV__FJ465407.1
auguucccccaggcccuccuguucgugccgcugcugggcuucagccucugcuucgggaaguuccccaucuacaccauccccgacaagcugggccccugguccccgaucgacauccaccaccugagcugccccaacaaccucgucguggaggacgaggggugcaccaaccuguccggcuucagcuacauggagcugaaggugggguacaucuccgccaucaaggucaacggcuucacgugcaccggcguggugaccgaggcggagaccuacacgaacuucgucggguacgugaccaccaccuuccgccggaagcacuuccgccccacgagcgacgccugccgggccgccuacaacuggaagauggccggcgacccccgcuacgaggagucccuccacaacccguaccccgacuaccacuggcugcggaccgugaagaccaccaaggagagccuggucaucaucucccccagcguggcggaccucgaccccuacgacaagucccugcacagccgcguguucccgaacgggcggugcuccggccugacggucagcuccaccuucugcagcaccaaccacgacuacaccaucuggaugcccgagaacccccgccucgggacguccugcgacaucuucaccaacagccggggcaagcgcgccuccaagggcaaccggaccugcggguucguggacgagcgcggccuguacaagagccugaagggggccugcaagcucaagcugugcggcgugcugggccuccggcugauggacgggaccugggucgccaugcagacgagcgaggagaccaaguggugcccgcccgaccagcuggugaaccuccacgacuuccgcuccgacgagaucgagcaccugguggucgaggagcuggugaagaagcgggaggagugccucgacgcgcuggagagcaucaugaccaccaaguccgugagcuuccgccggcugucccaccuccgcaagcugguccccggcuucgggaaggccuacacgaucuucaacaagacccugauggaggccgacgcccacuacaagagcauccggaccuggaacgagaucauccccuccaagggcugccuccgcgucgggggccggugccacccccacgugaacggcguguucuucaacgggaucauccugggcagcgacgggcacgugcugaucccggagaugcaguccagccuccugcagcagcacgucgagcugcucgaguccagcguggugccccugaugcacccccuggccgaccccuccaccgucuucaaggacggcggggaggcggaggacuucguggaggugcaccucccggacguccacaagcaggucagcggcguggaccugggccugcccuccugggggaaguacauccucgugggcagcggggcccugaucgcccuggugcucgugaucuuccugaugacgugcugccgcaaggucaaccgccccgaguccacccagcacagccugcggggcaccgggaugaagguguccaucaccagccagagcggcaaggccauccccuccugggagagcuacaaguccgagaacgagacgaagauguga

SEQ ID NO: 95020 - RNA, 1575 nt, Artificial Sequence
  derived and/or modified CDS sequence (opt1) from glycoprotein__RABV__FJ465409.1
auguucccccagacccugcuguucgugccgcugcugggccucagccugugcuucgggaaguuccccaucuacaccauccccgacaagcugggccccugguccccgaucgacauccaccaccucagcugccccaacaaccuggucguggaggacgaggggugcacgaaccuguccggcuucagcuacauggagcucaaggugggguacaucuccgccaucaaggucaacggcuucacgugcaccggcguggugaccgaggccgagaccuacaccaacuucgucggguacgugaccaccacguuccgccggaagcacuuccgccccacccccgacgcgugccgggccgccuacaacuggaagauggccggcgacccgcgcuacgaggagagccugcacaaccccuaccccgacuaccacuggcugcggaccgugaagaccacgaaggagucccucgucaucaucagccccuccguggccgaccuggacccguacgacaagagccugcacucccgcguguuccucaacgggaagugcagcggccugaccgucuccagcaccuacugcuccaccaaccacgacuacagcaucuggaugcccgagaacccccggcuggggacguccugcgacaucuucgugaccagccgcggcaagcgggcguccaagggcagcaagaccugcggguucguggacgagcgcggccucuacaagagccugaagggggccugcaagcugaagcucugcggcguccugggccugcggcucaucgacgggaccuggguggccaugcagacguccgaggagcccaaguggugcccgcccgaccagcuggugaaccugcacaacuuccgcagcgacgagaucgagcaccucgucguggaggagcuggugaagaagcgggaggagugccuggacgcccucgaguccaucaugaccaccaagagcgucuccuuccgccggcugagccaccuccgcaagcucgugcccggcuucgggaaggcguacaccaucuucaacaagacgcugauggaggccgacgcccacuacaaguccauccggaccugggacgagaucauccccagcaagggcugccugcgcgucgggggccggugccacccgcacgugaacggcguguucuucaacgggaucauccucggcuccgacgggcacguccugauccccgagaugcagagcucccugcuccagcagcacguggagcugcuggagagcuccgugaucccccucaugcacccccuggccgacccgagcaccgccuucaaggacggcgacgaggcggaggacuucgucgagauccaccuccccgacgugcacaagcagaucuccgggguggaccugggccugcccaacuggggcaaguacauccuggucagcgccggggcccucaucgcccugaugcugaccaucuuccugaucacgugcugccgcggcuuccaccagcccaaguccacccagcacagccucgggggcaccgggcggaagguguccgugaccccgcugagcggcaaggucaucagcuccugggagagcuacaagaagggcggggagacgcgccuguga

SEQ ID NO: 95021 - RNA, 1575 nt, Artificial Sequence
  derived and/or modified CDS sequence (opt1) from glycoprotein__RABV__FJ602447.1
augaucccccagguguuccuguucgucccgcuccugguguucagcuccugcuucggcaaguuccccaucuacaccauccccgacaagcuggggcccuggagcccgaucgacauccaccaccucuccugccccaacaaccugguggucgaggacgagggcugcaccaaccugagcggguucuccuacauggagcucaaggugggcuacaucagcgccaucaaggugaacggguucacgugcaccggcgucgugaccgaggccgagaccuacacgaacuucgugggcuacgucaccaccaccuucaagcgcaagcacuuccggcccaugcccgacgcgugccgcgccgccuacaacuggaagauggccggggacccgcgguacgaggagucccugcacaaccccuaccccgacuaccacuggcugcgcacggugaagaccaccaaggagagccucgugaucaucucccccagcgucgccgaccuggacccguacgacaagucccugcacagccggguguuccccggcgggaagugcuccggcaucaccgugagcuccacgugcugcagcaccaaccacgacuacaccaucuggaugcccgagaacccccgccucgggaccuccugcgacaucuucacgaacagccggggcaagcgcgcguccaagggcgggaagaccugcggcuucgucgacgagcgggggcuguacaagagccugaagggcgccugcaagcucaagcugugcggcgugcuggggcuccgccugauggacggcaccuggguggccauccagaccagcgacgagaucaaguggugcuccccggaccagcuggucaaccuccacgacuuccacagcgacgagaucgagcaccuggugguggaggagcuggucaagaagcgggaggagugccucgacgcccuggagacgaucaugaccaccaaguccgugagcuuccgccggcugucccaccuccgcaagcuggugcccggguucggcaaggcguacaccaucuucaacaagacgcugauggaggccgacgcccacuacaagagcauccggaccuggaacgagaucauccccuccaaggggugccuccgcgucggcggccggugccacccccacgugaacggggucuucuucaacggcaucauccuggggccggacggccacgugcugauccccgagaugcagagcucccuccugcaccagcacauggagcugcucgagagcuccgugaucccccugaugcacccccuggccgacccgagcaccgucuucaaggacggggacgaggccgaggacuucguggaggugcaccuccccgacguccacaagcagaucuccggcguggaccugggccugcccaacugggggaaguacgugcucaucagcgcgggcgcccugaccgcccugaugcucacgaucuuccugaugaccugcugccgcaagaccaaccgggccgaguccauccagcacagccccggggagaccggccgcaaggucuccgugacgagccacaacgggcgggugaucuccagcugggagagcuacaaguccggcagcgagaccaagcuguga

SEQ ID NO: 95022 - RNA, 1575 nt, Artificial Sequence; identical to SEQ ID NO: 94869
  derived and/or modified CDS sequence (opt1) from glycoprotein__RABV__FJ602448.1

SEQ ID NO: 95023 - RNA, 1575 nt, Artificial Sequence
  derived and/or modified CDS sequence (opt1) from glycoprotein__RABV__FJ602449.1
augaucccccaggugcugcuguucgucccgcugcugguguucagcuccugcuucggcaaguuccccaucuacaccauccccgacaagcucgggcccuggagcccgaucgacauccaccaccuguccugccccaacaaccugguggucgaggacgagggcugcaccaaccucagcggguucuccuacauggagcugaaggugggcuacaucagcgccaucaaggugaacggguucacgugcaccggcgucgugaccgaggccgagaccuacacgaacuucgugggcuacgucaccaccaccuucaagcgcaagcacuuccggcccaugcccgacgcgugccgcgccgccuacaacuggaagauggccggggacccgcgguacgaggagucccugcacaaccccuaccccgacuaccacuggcuccgcacggugaagaccaccaaggagagccuggugaucaucucccccagcgucgccgaccuggacccguacgacaagucccuccacagccggguguuccccggcgggaagugcuccggcaucaccgugagcuccacgugcugcagcaccaaccacgacuacaccaucuggaugcccgagaacccccgccuggggaccuccugcgacaucuucacgaacagccggggcaagcgcgcguccaagggcgggaagaccugcggcuucgucgacgagcgggggcuguacaagagccucaagggcgccugcaagcugaagcugugcggcgugcucgggcugcgccugauggacggcaccuggguggccauccagaccagcgacgagaucaaguggugcuccccggaccagcucgucaaccugcacgacuuccacagcgacgagaucgagcaccuggugguggaggagcucgucaagaagcgggaggagugccuggacgcccuggagacgaucaugaccaccaaguccgugagcuuccgccggcucucccaccuccgcaagcuggugcccggguucggcaaggcguacaccaucuucaacaagacgcucauggaggccgacgcccacuacaagagcauccggaccuggaacgagaucauccccuccaaggggugccugcgcgucggcggccggugccacccccacgugaacggggucuucuucaacggcaucauccuggggccggacggccacgugcucauccccgagaugcagagcucccugcugcaccagcacauggagcuccuggagagcuccgugaucccccugaugcacccccucgccgacccgagcaccgucuucaaggacggggacgacgccgaggacuucguggaggugcaccuccccgacguccacaagcagaucuccggcguggaccugggccugcccaacugggggaaguacgugaugaucagcgcgggcgcccugaccgcccugaugcucaugaucuuccugaugacgugcugccgcaagaccaaccgggccgaguccauccagcacagccccggggagaccggccgcaaggucuccgugaccagccacaacgggcgggugaucuccagcugggagagcuacaaguccggcggcgagacgaagcuguga

SEQ ID NO: 95024 - RNA, 1575 nt, Artificial Sequence
  derived and/or modified CDS sequence (opt1) from glycoprotein__RABV__FJ602450.1
augaucccccaggugcugcuguucgucccgcugcugaucuucagcuccugccucggcaaguuccccaucuacaccauccccgacaagcuggggcccuggagcccgaucgacauccaccaccuguccugccccaacaaccucgugguggaggacgagggcugcaccaaccugagcggguucuccuacauggagcugaaggucggcuacaucagcgccaucaaggugaacggguucacgugcaccggcguggucaccgaggccgagaccuacacgaacuucgugggcuacgugaccaccaccuucaagcgcaagcacuuccggcccaugcccgacgcgugccgcgccgccuacaacuggaagauggccggggacccgcgguacgaggagucccuccacaaccccuaccccgacuaccacuggcugcgcacggucaagaccagcaaggagucccuggugaucaucagccccuccguggccgaccucgacccguacgacaagagccugcacucccgggucuuccccggcgggaagugcagcggcaucaccguguccagcacgugcugcuccaccaaccacgacuacaccaucuggaugcccgagaacccccgccuggggaccagcugcgacaucuucaccaacucccggggcaagcgcgcgagcaagggcgggaagacgugcggcuucguggacgagcgggggcucuacaagagccugaagggcgccugcaagcugaagcucugcggcguccuggggcugcgccucauggacggcaccuggguggccauccagaccuccgacgagaucaaguggugcagcccggaccagcuggugaaccugcacgacuuccacuccgacgagaucgagcaccucgucguggaggagcuggugaagaagcgggaggagugccuggacgcccucgagaccaucaugacgaccaagagcgucuccuuccgccggcugagccaccuccgcaagcucgugcccggguucggcaaggcguacaccaucuucaacaagacccugauggaggccgacgcccacuacaaguccauccggacguggaacgagaucauccccagcaaggggugccugcgcgugggcggccggugccacccccacgucaacgggguguucuucaacggcaucauccucgggccggacggccacguccugauccccgagaugcaguccagccugcuccaccagcacauggagcugcuggaguccagcgugaucccccucaugcacccccuggccgacccguccaccguguucaaggacggggacgaggccgaggacuucgucgaggugcaccuccccgacgugcacaagcagaucagcggcgucgaccugggccugcccaacugggggaaguacgugcugaucuccgcgggcgcccucaccgccagcaugcugaugaucuuccugaugaccugcugccgcaagacgaaccgggccgaguccauccagcacagccccggggagaccggccgcaagguguccgucaccagccacaacgggcgggugaucagcuccugggagagcuacaaguccggcggcgagaccaagcucuga

SEQ ID NO: 95025 - RNA, 1575 nt, Artificial Sequence; identical to SEQ ID NO: 94867
  derived and/or modified CDS sequence (opt1) from glycoprotein__RABV__FJ602451.1

SEQ ID NO: 95026 - RNA, 1575 nt, Artificial Sequence; identical to SEQ ID NO: 94551
  derived and/or modified CDS sequence (opt1) from glycoprotein__RABV__FJ602452.1

SEQ ID NO: 95027 - RNA, 1575 nt, Artificial Sequence; identical to SEQ ID NO: 94851
  derived and/or modified CDS sequence (opt1) from glycoprotein__RABV__FJ602453.1

SEQ ID NO: 95028 - RNA, 1575 nt, Artificial Sequence; identical to SEQ ID NO: 94867
  derived and/or modified CDS sequence (opt1) from glycoprotein__RABV__FJ602454.1

SEQ ID NO: 95029 - RNA, 1575 nt, Artificial Sequence; identical to SEQ ID NO: 94867
  derived and/or modified CDS sequence (opt1) from glycoprotein__RABV__FJ602455.1

SEQ ID NO: 95030 - RNA, 1575 nt, Artificial Sequence; identical to SEQ ID NO: 94867
  derived and/or modified CDS sequence (opt1) from glycoprotein__RABV__FJ602456.1

SEQ ID NO: 95031 - RNA, 1575 nt, Artificial Sequence; identical to SEQ ID NO: 94869
  derived and/or modified CDS sequence (opt1) from glycoprotein__RABV__FJ602457.1

SEQ ID NO: 95032 - RNA, 1575 nt, Artificial Sequence; identical to SEQ ID NO: 94869
  derived and/or modified CDS sequence (opt1) from glycoprotein__RABV__FJ602458.1

SEQ ID NO: 95033 - RNA, 1575 nt, Artificial Sequence
  derived and/or modified CDS sequence (opt1) from glycoprotein__RABV__FJ602459.1
augaucccccaggugcuccuguucgucccgcugcugguguucagcuccugccucggcaaguuccccaucuacaccauccccgacaagcuggggcccuggagcccgaucgacauccaccaccuguccugccccaacaaccucguggucgaggacgagggcugcaccaaccugagcggguucuccuacauggagcugaaggugggcuacaucagcgccaucaaggugaacggguucacgugcaccggcgucgugaccgaggccgagaccuacacgaacuucgugggcuacgucaccaccaccuucaagcgcaagcacuuccggcccaugcucgacgcgugccgcgccgccuacaacuggaagauggccggggacccccgguacgaggagucccugcacaacccguaccccgacuaccacuggcugcgcacggugaagaccagcaaggagucccucgugaucaucagccccuccgucgccgaccuggaccccuacgacaagagccugcacucccggguguucccgggcgggaagugcagcggcaucaccguguccagcacgugcugcuccaccaaccacgacuacaccaucuggaugcccgagaacccccgccucgggaccagcugcgacaucuucaccaacucccggggcaagcgcgcgagcaagggcgggaagacgugcggcuucgucgacgagcgggggcuguacaagagccugaagggcgccugcaagcucaagcugugcggcgugcuggggcuccgccugauggacggcaccuggguggccauccagaccuccgacgagaucaaguggugcagccccgaccagcuggucaaccuccacgacuuccacuccgacgagaucgagcaccuggugguggaggagcuggucaagaagcgggaggagugccucgacgcccuggagaccaucaugacgaccaagagcguguccuuccgccggcugagccaccuccgcaagcuggugccgggguucggcaaggcguacaccaucuucaacaagacccugauggaggccgacgcccacuacaaguccauccggacguggaacgagaucauccccagcaaggggugccuccgcgucggcggccggugccacccccacgugaacggggucuucuucaacggcaucauccuggggcccgacggccacgugcugaucccggagaugcaguccagccuccugcaccagcacauggagcugcucgaguccagcgugaucccccugaugcacccccuggccgaccccuccaccgucuucaaggacggggacgaggccgaggacuucguggaggugcaccucccggacguccacaagcagaucagcggcguggaccugggccugcccaacugggggaaguacgugcucaucuccgcgggcgcccugaccgccagcaugcugaugaucuuccucaugaccugcugccgcaagacgaaccgggccgaguccauccagcacagccccggggagaccggccgcaaggucuccgugaccagccacaacgggcgggugaucagcuccugggagagcuacaaguccggcggcgagaccaagcuguga

SEQ ID NO: 95034 - RNA, 1575 nt, Artificial Sequence
  derived and/or modified CDS sequence (opt1) from glycoprotein__RABV__FJ712193.1
augaucccccaggugcugcuguucgucccgcugcugguguucagcuccugcuucggcaaguuccccaucuacaccauccccgacaagcucgggcccuggagcccgaucgacauccaccaccuguccugccccaacaaccugguggucgaggacgagggcugcaccaaccucagcggguucuccuacauggagcugaaggugggcuacaucagcgccaucaaggugaacggguucacgugcaccggcgucgugaccgaggccgagaccuacacgaacuucgugggcuacgucaccaccaccuucaagcgcaagcacuuccggcccaugcccgacgcgugccgcgccgccuacaacuggaagauggccggggacccgcgguacgaggagucccugcacaaccccuaccccgacuaccacuggcuccgcacggugaagaccaccaaggagagccuggugaucaucucccccagcgucgccgaccuggacccguacgacaagucccuccacagccggguguuccccggcgggaagugcuccggcaucaccgugagcuccacgugcugcagcaccaaccacgacuacaccaucuggaugcccgagaacccccgccuggggaccuccugcgacaucuucacgaacagccggggcaagcgcgcguccaagggcgggaagaccugcggcuucgucgacgagcgggggcuguacaagagccucaagggcgccugcaagcugaagcugugcggcgugcucgggcugcgccugauggacggcaccuggguggccauccagaccagcgacgagaucaaguggugcuccccggaccagcucgucaaccugcacgacuuccacagcgacgagaucgagcaccuggugguggaggagcucgucaagaagcgggaggagugccuggacgcccuggagacgaucaugaccaccaaguccgugagcuuccgccggcucucccaccuccgcaagcuggugcccggguucggcaaggcguacaccaucuucaacaagacgcucauggaggccgacgcccacuacaagagcauccggaccuggaacgagaucauccccuccaaggggugccugcgcgucggcggccggugccacccccacgugaacggggucuucuucaacggcaucauccuggggccggacggccacgugcucauccccgagaugcagagcucccugcugcaccagcacauggagcuccuggagagcuccgugaucccccugaugcacccccucgccgacccgagcaccgucuucaaggacggggacgaggccgaggacuucguggaggugcaccuccccgacguccacaagcagaucuccggcaucgaccugggccugcccaacugggggaaguacgugcugaucagcgcgggcgcccugaccgcccucaugcugacgaucuuccugaugaccugcugccgcaagaccaaccgggccgaguccauccagcacagccccggggagaccggccgcaagguguccgucacgagccacaacgggcgggugaucuccagcugggagagcuacaaguccggcagcgagaccaagcucuga

SEQ ID NO: 95035 - RNA, 1575 nt, Artificial Sequence; identical to SEQ ID NO: 94869
  derived and/or modified CDS sequence (opt1) from glycoprotein__RABV__FJ712194.1

SEQ ID NO: 95036 - RNA, 1575 nt, Artificial Sequence
  derived and/or modified CDS sequence (opt1) from glycoprotein__RABV__FJ712195.1
augaucccccaggcccugcuguucgugccgcugcuggucgugccccucugcuucggcaaguuccccaucuacaccauccccgacaagcuggggccguggagccccaucgacauccaccaccuguccugccccaacaaccucguggucgaggacgagggcugcaccaaccugagcggguucuccuacauggagcugaaggugggcuacaucagcgccaucaaggugaacggguucacgugcaccggcgucgugaccgaggcggagaccuacacgaacuucgugggcuacgucaccaccaccuucaagcgcaagcacuuccggcccacgccggacgccugccgcuccgccuacaacuggaagauggccggggacccccgguacgaggagagccuccacaaccccuaccccgacuaccacuggcugcgcaccgugaagaccaccaaggaguccuucgugaucaucagcccguccgucgccgaccuggaccccuacgacaagagccuccacucccggguguucccccgcggcaagugcagcgggaucacgguguccagcaccuacugcuccaccaaccacgacuacaccaucuggaugcccgagaacccgcggcugggcacgagcugcgacaucuucaccaacucccgcgggaagcgggcguucaagggcagcaagaccugcggcuucgucgacgagcgcgggcuguacaagucccucaagggcgccugcaagcugaagcugugcggggugcucggccugcggcugauggacggcaccuggguggccauccagacgagcgacgagaccaaguggugcccgcccgaccagcucgucaaccugcacgacuuccacagcgacgagaucgagcaccuggugguggaggagcucgucaagaagcgcgaggagugccuggacgcccuggaguccaucaugaccaccaagagcguguccuuccggcgccucagccaccuccggaagcuggugcccggguucggcaaggcguacacgaucuucaacaagacccucauggaggccgacgcccacuacaaguccguccgcaccuggaacgagaucauccccagcaaggggugccugcgggugggcgggcgcugccacccccacgucaacggcguguucuucaacggcaucauccuggggcccgacggccacgugcucauccccgagaugcaguccagccugcugcagcagcacauggagcuccuggaguccagcgucaucccgcugaugcacccccucgccgaccccuccaccguguucaagaacggggacgaggccgaggacuucguggagguccaccuccccgacgugcacaagcaggucagcggcguggaccuggggcugccguccuggggcaaguacgugcugaugagcgcgggcauccugacggcccucaugcugaugaucuuccugaugaccugcugccggcgcaccaaccggcccgaguccauccagcacagccucggggagaccggccgcaagguguccgucacgagccaguccgggcgcgugaucagcagcugggaguccuacaagagcggcggggagaccaagcuguga

SEQ ID NO: 95037 - RNA, 1575 nt, Artificial Sequence
  derived and/or modified CDS sequence (opt1) from glycoprotein__RABV__FJ712196.1
augaucccccaggcccugcuguucgugccgcugcuggucgugccccucugcuucggcaaguuccccaucuacaccauccccgacaagcuggggccguggagccccaucgacauccaccaccuguccugccccaacaaccucguggucgaggacgagggcugcaccaaccugagcggguucuccuacauggagcugaaggugggcuacaucagcgccaucaaggugaacggguucacgugcaccggcgucgugaccgaggcggagaccuacacgaacuucgugggcuacgucaccaccaccuucaagcgcaagcacuuccggcccacgccggacgccugccgcuccgccuacaacuggaagauggccggggacccccgguacgaggagagccuccacaaccccuaccccgacuaccacuggcugcgcaccgugaagaccaccaaggaguccuucgugaucaucagcccguccgucgccgaccuggaccccuacgacaagagccuccacucccggguguucccccgcggcaagugcagcgggaucacgguguccagcaccuacugcuccaccaaccacgacuacaccaucuggaugcccgagaacccgcggcugggcacgagcugcgacaucuucaccaacucccgcgggaagcgggcguucaagggcagcaagaccugcggcuucgucgacgagcgcgggcuguacaagucccucaagggcgccugcaagcugaagcugugcggggugcucggccugcggcugauggacggcaccuggguggccauccagacgagccgcgagaccaaguggcggccgcccgaccagcucgucaaccugcacgacuuccacagcgacgagaucgagcaccuggugguggaggagcucgucaagaagcgcgaggagugccuggacgcccuggaguccaucaugaccaccaagagcguguccuuccggcgccucagccaccuccggaagcuggugcccggguucggcaaggcguacacgaucuucaacaagacccucauggaggccgacgcccacuacaaguccguccgcaccuggaacgagaucauccccagcaaggggugccugcgggugggcgggcgcugccacccccacgucaacggcguguucuucaacggcaucauccuggggcccgacggccacgugcucauccccgagaugcaguccagccugcugcagcagcacauggagcuccuggaguccagcgucaucccgcugaugcacccccucgccgaccccuccaccguguucaagaacggggacgaggccgaggacuucguggagguccaccuccccgacgugcacaagcaggucagcggcguggaccuggggcugccguccuggggcaaguacgugcugaugagcgcgggcauccugacggcccucaugcugaugaucuuccugaugaccugcugccggcgcaccaaccgccccgaguccauccagcacagccucggggagaccggccggaagguguccgucacgagccaguccgggcgcgugaucagcagcugggaguccuacaagagcggcggggagaccaagcuguga

SEQ ID NO: 95038 - RNA, 1575 nt, Artificial Sequence
  derived and/or modified CDS sequence (opt1) from glycoprotein__RABV__FJ719749.1
augaucccccaggcccugcuguucgugccgcugcuggucgugccccucugcuucggcaaguuccccaucuacaccauccccgacaagcuggggccguggagcuccaucgacauccaccaccugagcugccccaacaaccucguggucgaggacgagggcugcaccaaccuguccggguucagcuacauggagcugaaggugggcuacaucuccgccaucaaggugaacggguucacgugcaccggcgucgugaccgaggcggagaccuacacgaacuucgugggcuacgucaccaccaccuucaagcgcaagcacuuccggcccacgcccgacgccugccgcagcgccuacaacuggaagauggccggggacccgcgguacgaggagucccuccacaaccccuaccccgacuaccacuggcugcgcaccgugaagaccaccaaggagagcuucgugaucaucucccccagcgucgccgaccuggacccguacgacaagucccuccacagccggguguucccccgcggcaagugcuccgggaucacggugagcuccaccuacugccccaccaaccacgacuacaccaucuggaugcccgagaacccgcggcugggcacgagcugcgacaucuucaccaacucccgcgggaagcgggcgcugaagggcagcaagaccugcggcuucgucgacgagcgcgggcucuacaagucccugaagggcgccugcaagcugaagcucugcggggugcccggccugcggcugauggacggcaccuggguggccauccagacgagcgacgagaccaaguggugcccgcccgaccagcucgucaaccugcacgacuuccacagcgacgagaucgagcaccuggugguggaggagcucgucaagaagcgcgaggagugccuggacgcccuggaguccaucaugaccaccaagagcguguccuuccggcgccucagccaccuccggaagcuggugcccggguucggcaaggcguacacgaucuucaacaagacccucauggaggccgacgcccacuacaaguccguccgcaccuggaacgagaucauccccagcaaggggugccugcgggugggcgggcgcugccacccccacgucaacggcguguucuucaacggcaucauccuggggcccgacggccacgugcucaucccggagaugcaguccagccugcugcagcagcacauggagcuccuggaguccagcgucaucccccugaugcacccccucgccgaccccuccaccguguucaagaacggggacgagguggaggacuucgucgaggugcaccucccggacgugcacaagcaggucagcggcguggacuucgggcugcccuccuggggcaaguacgugcugaugagcgccggcauccugacggcgcugaugcucgucaucuuccugaugaccugcugccggcgcaccaaccgguccgagagcauccagcacucccugggggagaccggccgcaaggugagcgugacgucccagagcgggcgcgucaucagcuccugggagagcuacaaguccggcggggagaccaagcucuga

SEQ ID NO: 95039 - RNA, 1575 nt, Artificial Sequence
  derived and/or modified CDS sequence (opt1) from glycoprotein__RABV__FJ719752.1
augaucccccaggcccugcuguucgugccgcugcuggucgugccccucugcuucggcaaguuccccaucuacaccauccccgacaagcuggggccguggagccccaucgacauccaccaccuguccugccccaacaaccucguggucgaggacgagggcugcaccaaccugagcggguucuccuacauggagcugaaggugggcuacaucagcgccaucaaggugaacggguucacgugcaccggcgucgugaccgaggcggagaccuacacgaacuucgugggcuacgucaccaccaccuucaagcgcaagcacuuccggcccacgccggacgccugccgcuccgccuacaacuggaagauggccggggacccccgguacgaggagagccuccacaaccccuaccccgacuaccacuggcugcgcaccgugaagaccaccaaggaguccuucgugaucaucagcccguccgucgccgaccuggaccccuacgacaagagccuccacucccggguguucccccgcggcaagugcagcgggaucacgguguccagcaccuacugccccaccaaccacgacuacaccaucuggaugccggagaacccccggcugggcacguccugcgacaucuucaccaacagccgcgggaagcgggcguucaagggcuccaagaccugcggcuucgucgacgagcgcgggcuguacaagagccucaagggcgccugcaagcugaagcugugcggggugcucggccugcggcugauggacggcaccuggguggccauccagacguccgacgagaccaaguggugcccgcccgaccagcucgucaaccugcacgacuuccacagcgacgagaucgagcaccuggugguggaggagcucgucaagaagcgcgaggagugccuggacgcccuggagagcaucaugaccaccaaguccgugagcuuccggcgccucucccaccuccggaagcuggugcccggguucggcaaggcguacacgaucuucaacaagacccucauggaggccgacgcccacuacaagagcguccgcaccuggaacgagaucauccccuccaaggggugccugcgggugggcgggcgcugccacccccacgucaacggcguguucuucaacggcaucauccuggggcccgacggccacgugcucaucccggagaugcagagcucccugcugcagcagcacauggagcuccuggagagcuccgucaucccccugaugcacccccucgccgaccccagcaccguguucaagaacggggacgaggccgaggacuucguggagguccaccucccggacgugcacaagcaggucuccggcguggaccuggggcugcccagcuggggcaaguacgugcugauguccgcgggcauccugacggcccucaugcugaugaucuuccugaugaccugcugccggcgcaccaaccggcccgagagcauccagcacucccucggggagaccggccgcaaggugagcgucacgucccagagcgggcgcgugaucuccagcugggagagcuacaaguccggcggggagaccaagcuguga

SEQ ID NO: 95040 - RNA, 1575 nt, Artificial Sequence; identical to SEQ ID NO: 95036
  derived and/or modified CDS sequence (opt1) from glycoprotein__RABV__FJ719756.1

SEQ ID NO: 95041 - RNA, 1575 nt, Artificial Sequence
  derived and/or modified CDS sequence (opt1) from glycoprotein__RABV__FJ825129.1
augaucccccaggugcugcuguucgucccgcugcugguguucagcuccugcuucggcaaguuccccaucuacaccauccccgacaagcucgggcccuggagcccgaucgacauccaccaccuguccugccccaacaaccugguggucgaggacgagggcugcaccaaccucagcggguucuccuacauggagcugaaggugggcuacaucagcgccaucaaggugaacggguucacgugcaccggcgucgugaccgaggccgagaccuacacgaacuucgugggcuacgucaccaccaccuucaagcgcaagcacuuccggcccaugcccgacgcgugccgcgccgccuacaacuggaagauggccggggacccgcgguacgaggagucccugcacaaccccuaccccgacuaccacuggcuccgcacggugaagaccaccaaggagagccuggugaucaucucccccagcgucgccgaccuggacccguacgacaagucccuccacagccggguguuccccggcgggaagugcucccgcaucaccgugagcuccacgugcugcagcaccaaccacgacuacaccaucuggaugcccgagaacccccggcugcgcaccuccugcgacaucuucacgaacagccggggcaagcgcgcguccaagcgggggaagaccugcggcuucgucgacgagcgcggccuguacaagagccucaagggggccugcaagcugaagcugugcggcgugcucgggcugcggcugauggacggcaccuggguggccauccagaccagcgacgagaucaaguggugcuccccggaccagcucgucaaccugcacgacuuccacagcgacgagaucgagcaccuggugguggaggagcucgucaagaagcgcgaggagugccuggacgcccuggagacgaucaugaccaccaaguccgugagcuuccggcgccucucccaccuccggaagcuggugcccggcuucgggaaggcguacaccaucuucaacaagacgcucauggaggccgacgcccacuacaagagcauccgcaccuggaacgagaucauccccuccaagggcugccugcgggucgggggccgcugccacccccacgugaacggggucuucuucaacggcaucauccugggcccggacgggcacgugcucauccccgagaugcagagcucccugcugcaccagcacauggagcuccuggagagcuccgugaucccccugaugcacccccucgccgacccgagcaccgucuucaaggacggcgacgaggccgaggacuucguggaggugcaccuccccgacguccacaagcagaucuccgggaucgaccugggccugcccaacugggggaaguacgugcugaucagcgcgggcgcccugaccgcccucaugcugacgaucuuccugaugaccugcugccggaagaccaaccgcgccgaguccauccagcacagccccggcgagaccgggcgcaagguguccgucacgagccacaacggccgggugaucuccagcugggagagcuacaaguccgggagcgagaccaagcucuga

SEQ ID NO: 95042 - RNA, 1575 nt, Artificial Sequence; identical to SEQ ID NO: 94869
  derived and/or modified CDS sequence (opt1) from glycoprotein__RABV__FJ825130.1

SEQ ID NO: 95043 - RNA, 1575 nt, Artificial Sequence
  derived and/or modified CDS sequence (opt1) from glycoprotein__RABV__FJ825131.1
augaucccccaggugcugcuguucgucccgcugcugguguucagcuccugcuucggcaaguuccccaucuacaccauccccgacaagcucgggcccuggagcccgaucgacauccaccaccuguccugccccaacaaccugguggucgaggacgagggcugcaccaaccucagcggguucuccuacauggagcugaaggugggcuacaucagcgccaucaaggugaacggguucacgugcaccggcgucgugaccgaggccgagaccuacacgaacuucgugggcuacgucaccaccaccuucaagcgcaagcacuuccggcccaugcccgacgcgugccgcgccgccuacaacuggaagauggccggggacccgcgguacgaggagucccugcacaaccccuaccccgacuaccacuggcuccgcacggugaagaccaccaaggagagccuggugaucaucucccccagcgucgccgaccuggacccguacgacaagucccuccacagccggguguuccccggcgggaagugcuccggcaucaccgugagcuccacgugcugcagcaccaaccacgacuacaccaucuggaugcccgagaacccccgccuggggaccuccugcgacaucuucacgaacagccggggcaagcgcgcguccaagggcgggaagaccugcggcuucguccacgagcgggggcuguacaagagccucaagggcgccugcaagcugaagcugugcggcgugcucgggcugcgccugauggacggcaccuggguggccauccagaccagcgacgagaucaaguggugcuccccggaccagcucgucaaccugcacgacuuccacagcgacgagaucgagcaccuggugguggaggagcucgucaagaagcgggaggagugccuggacgcccuggagacgaucaugaccaccaaguccgugagcuuccgccggcucucccaccuccgcaagcuggugcccggguucggcaaggcguacaccaucuucaacaagacgcucauggaggccgacgcccacuacaagagcauccggaccuggaacgagaucauccccuccaaggggugccugcgcgucggcggccggugccacccccacgugaacggggucuucuucaacggcaucauccuggggccggacggccacgugcucauccccgagaugcagagcucccugcugcaccagcacauggagcuccuggagagcuccgugaucccccugaugcacccccucgccgacccgagcaccgucuucaaggacggggacgaggccgaggacuucguggaggugcaccuccccgacguccacaagcagaucuccggcguggaccugggccugcccaacugggggaaguacgugcugaucagcgcgggcgcccugaccgcccucaugcugacgaucuuccugaugaccugcugccgcaagaccaaccgggccgaguccauccagcacagccccggggagaccggccgcaaggucuccgugacgagccacaacgggcgggugaucuccagcugggagagcuacaaguccggcagcgagaccaagcucuga

SEQ ID NO: 95044 - RNA, 1575 nt, Artificial Sequence
  derived and/or modified CDS sequence (opt1) from glycoprotein__RABV__FJ825132.1
augaucccccaggugcugcuguucgucccgcugcugguguucagcuccugcuucggcaaguuccccaucuacaccauccccgacaagcucgggcccuggagcccgaucgacauccaccaccuguccugccccaacaaccugguggucgaggacgagggcugcaccaaccucagcggguucuccuacauggagcugaaggugggcuacaucagcgccaucaaggugaacggguucacgugcaccggcgucgugaccgaggccgagaccuacacgaacuucgugggcuacgucaccaccaccuucaagcgcaagcacuuccggcccaugcccgacgcgugccgcgccgccuacaacuggaagauggccggggacccgcgguacgaggagucccugcacaaccccuaccccgacuaccacuggcuccgcacggugaagaccaccaaggagagccuggugaucaucucccccagcgucgccgaccuggacccguacgacaagucccuccacagccggguguuccccggcgggaagugcuccggcaucaccgugagcuccacgugcugcagcaccaaccacgacuacaccaucuggaugcccgagaacccccgccuggggaccuccugcgacaucuucacgaacagccggggcaagcgcgcguccaagggcgggaagaccugcggcuucgucgacgagcgggggcuguacaagagccuccgcggcgccugcaagcugaagcugugcggcgugcucgggcugcggcugauggacggcaccuggguggccauccagaccagcgacgagaucaaguggugcuccccggaccagcucgucaaccugcacgacuuccacagcgacgagaucgagcaccuggugguggaggagcucgucaagaagcgcgaggagugccuggacgcccuggagacgaucaugaccaccaaguccgugagcuuccggcgccucucccaccuccggaagcuggugcccggguucggcaaggcguacaccaucuucaacaagacgcucauggaggccgacgcccacuacaagagcauccgcaccuggaacgagaucauccccuccaaggggugccugcgggucggcggccgcugccacccccacgugaacggggucuucuucaacggcaucauccuggggccggacggccacgugcucauccccgagaugcagagcucccugcugcaccagcacauggagcuccuggagagcuccgugaucccccugaugcacccccucgccgacccgagcaccgucuucaaggacggggacgaggccgaggacuucguggaggugcaccuccccgacguccacaagcagaucuccggcguggaccugggccugcccaacugggggaaguacgugcugaucagcgcgggcgcccugaccgcccucaugcugaugaucuuccugaugacgugcugccggaagaccaaccgcgccgaguccauccagcacagccccggggagaccggcuggaaggucuccgugaccagccacaacgggcgggugaucuccagcugggagagcuacaaguccggcagcgagacgaagcucuga

SEQ ID NO: 95045 - RNA, 1575 nt, Artificial Sequence
  derived and/or modified CDS sequence (opt1) from glycoprotein__RABV__FJ825133.1
augaucccccaggugcugcuguucgucccgcugcugguguucagcuccugcuucggcaaguuccccaucuacaccauccccgacaagcucgggcccuggagcccgaucgacauccaccaccuguccugccccaacaaccugguggucgaggacgagggcugcaccaaccucagcggguucuccuacauggagcugaaggugggcuacaucagcgccaucaaggugaacggguucacgugcaccggcgucgugaccgaggccgagaccuacacgaacuucgugggcuacgucaccaccaccuucaagcgcaagcacuuccggcccaugcccgacgcgugccgcgccgccuacaacuggaagauggccggggacccgcgguacgaggagucccugcacaaccccuaccccgacuaccacuggcuccgcacggugaagaccaccaaggagagccuggugaucaucucccccagcgucgccgaccuggacccguacgacaagucccuccacagccggguguuccccggcgggaagugcucccgcaucaccgugagcuccacgugcugcagcaccaaccacgacuacaccaucuggaugcccgagaacccccggcugggcaccuccugcgacaucuucacgaacagccgcgggaagcgggcguccaagggcggcaagaccugcggguucgucgacgagcgcggccuguacaagagccuccgcggggccugcaagcugaagcugugcggcgugcucggccugcggcugauggacgggaccuggguggccauccagaccagcgacgagaucaaguggugcuccccggaccagcucgucaaccugcacgacuuccacagcgacgagaucgagcaccuggugguggaggagcucgucaagaagcgggaggagugccuggacgcccuggagacgaucaugaccaccaaguccgugagcuuccgccggcucucccaccuccgcaagcuggugcccggcuucgggaaggcguacaccaucuucaacaagacgcucauggaggccgacgcccacuacaagagcauccggaccuggaacgagaucauccccuccaagggcugccugcgcgucgggggccggugccacccccacgugaacggcgucuucuucaacgggaucauccugggcccggacgggcacgugcucauccccgagaugcagagcucccugcugcaccagcacauggagcuccuggagagcuccgugaucccccugaugcacccccucgccgacccgagcaccgucuucaaggacggcgacgaggccgaggacuucguggaggugcaccuccccgacguccacaagcagaucuccgggguggaccugggccugcccaacuggggcaaguacgugcugaucagcgcgggggcccugaccgcccucaugcugaugaucuuccugaugacgugcugccgcaagaccaaccgggccgaguccauccagcacagccccggcgagaccgggcgcaaggucuccgugaccagccacaacggccgcgugaucuccagcugggagagcuacaaguccgggagcgagacgaagcucuga

SEQ ID NO: 95046 - RNA, 1575 nt, Artificial Sequence; identical to SEQ ID NO: 95036
  derived and/or modified CDS sequence (opt1) from glycoprotein__RABV__FJ825134.1

SEQ ID NO: 95047 - RNA, 1575 nt, Artificial Sequence
  derived and/or modified CDS sequence (opt1) from glycoprotein__RABV__FJ866832.1
augaucccccaggugcugcuguucgucccgcugcugguguucagcuccugcuucggcaaguuccccaucuacaccauccccgacaagcucgggcccuggagcccgaucgacauccaccaccuguccugccccaacaaccugguggucgaggacgagggcugcaccaaccucagcggguucuccuacauggagcugaaggugggcuacaucagcgccaucaaggugaacggguucacgugcaccggcgucgugaccgaggccgagaccuacacgaacuucgugggcuacgucaccaccaccuucaagcgcaagcacuuccggcccaugcccgacgcgugccgcgccgccuacaacuggaagauggccggggacccgcgguacgaggagucccugcacaaccccuaccccgacuaccacuggcuccgcacggugaagaccaccaaggagagccuggugaucaucucccccagcgucgccgaccuggacccguacgacaagucccuccacagccggguguuccccggcgggaagugcuccggcaucaccgugagcuccacgugcugcagcaccaaccacgacuacaccaucuggaugcccgagaacccccgccuggggaccuccugcgacaucuucgcgaacagccggggcaagcgcgccuccaagggcgggaagacgugcggcuucgucgacgagcgggggcuguacaagagccucaagggcgccugcaagcugaagcugugcggcgugcucgggcugcgccugauggacggcaccuggguggccauccagaccagcgacgagaucaaguggugcuccccggaccagcucgucaaccugcacgacuuccacagcgacgagaucgagcaccuggugguggaggagcucgucaagaagcgggaggagugccuggacgcgcuggagaccaucaugacgaccaaguccgugagcuuccgccggcucucccaccuccgcaagcuggugcccggguucggcaaggccuacaccaucuucaacaagacccucauggaggccgacgcccacuacaagagcauccggacguggaacgagaucauccccuccaaggggugccugcgcgucggcggccggugccacccccacgugaacggggucuucuucaacggcaucauccuggggccggacggccacgugcucauccccgagaugcagagcucccugcugcaccagcacauggagcuccuggagagcuccgugaucccccugaugcacccccucgccgacccgagcaccgucuucaaggacggggacgaggcggaggacuucguggaggugcaccuccccgacguccacaagcagaucuccggcguggaccugggccugcccaacugggggaaguacgugcugaucagcgccggcgcccugaccgcccucaugcugaccaucuuccugaugacgugcugccgcaagaccaaccgggccgaguccauccagcacagccccggggagaccggccgcaaggucuccgugaccagccacaacgggcgggugaucuccagcugggagagcuacaaguccggcagcgagacgaagcucuga

SEQ ID NO: 95048 - RNA, 1575 nt, Artificial Sequence
  derived and/or modified CDS sequence (opt1) from glycoprotein__RABV__FJ866834.1
augaucccccaggugcugcuguucgucccgcugcugguguucagcuccugcuucggcaaguuccccaucuacaccauccccgacaagcucgggcccuggagcccgaucgacauccaccaccuguccugccccaacaaccugguggucgaggacgagggcugcaccaaccucagcggguucuccuacauggagcugaaggugggcuacaucagcgccaucaaggugaacggguucacgugcaccggcgucgugaccgaggccgagaccuacacgaacuucgugggcuacgucgcgaccaccuucaagcgcaagcacuuccggcccaugcccgacgccugccgcgccgccuacaacuggaagauggccggggacccgcgguacgaggagucccugcacaaccccuaccccgacuaccacuggcuccgcaccgugaagacgaccaaggagagccuggugaucaucucccccagcgucgcggaccuggacccguacgacaagucccuccacagccggguguuccccggcgggaagugcuccggcaucaccgugagcuccacgugcugcagcaccaaccacgacuacaccaucuggaugcccgagaacccccgccuggggaccuccugcgacaucuucaccaacagccggggcaagcgcgccuccaagggcgggaagacgugcggcuucgucgacgagcgggggcuguacaagagccucaagggcgccugcaagcugaagcugugcggcgugcucgggcugcgccugauggacggcaccuggguggccauccagaccagcgacgagaucaaguggugcuccccggaccagcucgucaaccugcacgacuuccacagcgacgagaucgagcaccuggugguggaggagcucgucaagaagcgggaggagugccuggacgcgcuggagaccaucaugacgaccaaguccgugagcuuccgccggcucucccaccuccgcaagcuggugcccggguucggcaaggccugcaccaucuucaacaagacccucauggaggccgacgcccacuacaagagcauccggacguggaacgagaucauccccuccaaggggugccugcgcgucggcggccggugccacccccacgugaacggggucuucuucaacggcaucauccuggggccggacggccacgugcucauccccgagaugcagagcucccugcugcaccagcacauggagcuccuggagagcuccgugaucccccugaugcacccccucgccgacccgagcaccgucuucaaggacggggacgaggcggaggacuucguggaggugcaccuccccgacguccacaagcagaucuccggcguggaccugggccugcccaacugggggaaguacgugcugaucagcgccggcgcccugaccgcccucaugcugaccaucuuccugaugacgugcugccgcaagaccaaccgggccgaguccauccagcacagccccggggagaccggccgcaaggucuccgugaccagccacaacgggcgggugaucuccagcugggagagcuacaaguccggcagcgagacgaagcucuga

SEQ ID NO: 95049 - RNA, 1575 nt, Artificial Sequence
  derived and/or modified CDS sequence (opt1) from glycoprotein__RABV__FJ866835.1
augaucccccaggugcugcuguucgucccgcugcugguguucagcuccugcuucggcaaguuccccaucuacaccauccccgacaagcucgggcccuggagcccgaucgacauccaccaccuguccugccccaacaaccugguggucgaggacgagggcugcaccaaccucagcggguucuccuacauggagcugaaggugggcuacaucagcgccaucaaggugaacggguucacgugcaccggcgucgugaccgaggccgagaccuacacgaacuucgugggcuacgucaccaccaccuucaagcgcaagcacuuccggcccaugcccgacgcgugccgcgccgccuacaacuggaagauggccggggacccgcgguacgaggagucccugcacaaccccuaccccgacuaccacuggcuccgcacggugaagaccaccaaggagagccuggugaucaucucccccagcgucgccgaccuggacccguacgacaagucccuccacagccggguguuccccggcgggaagugcuccggcaucaccgugagcuccacgugcugcagcaccaaccacgacuacaccaucuggaugcccgagaacccccgccuggggaccuccugcgacaucuucacgaacagccggggcaagggcgcguccaagggcgggaagaccugcggguucgucgacgagcgcggccuguacaagagccucaagggcgccugcaagcugaagcugugcggggugcucggccugcggcugauggacgggaccuggguggccauccagaccagcgccgagaucaaguggugcuccccggaccagcucgucaaccugcacgacuuccacagcgacgagaucgagcaccuggugguggaggagcucgucaagaagcgcgaggagugccuggacgcgcuggagacgaucaugaccaccaaguccgugagcuuccggcgccucucccaccuccggaagcuggugcccggcuucgggaaggccuacaccaucuucaacaagacgcucauggaggccgacgcccacuacaagagcauccgcaccuggaacgagaucauccccuccaagggcugccugcgggucggcgggcgcugccacccccacgugaacggcgucuucuucaacgggaucauccugggcccggacgggcacgugcucauccccgagaugcagagcucccugcugcaccagcacauggagcuccuggagagcuccgugaucccccugaugcacccccucgccgacccgagcaccgucuucaaggacggcgacgaggcggaggacuucguggaggugcaccuccccgacguccacaagcagaucuccggcguggaccuggggcugcccaacuggggcaaguacgugcugaucagcgccggggcccugaccgcccucaugcugacgaucuuccugaugaccugcugccggaagaccaaccgcgccgaguccauccagcacagccccggcgagaccgggcggaaggucuccgugacgagccacaacggccgcgugaucuccagcugggagagcuacaaguccggcagcgagaccaagcucuga

SEQ ID NO: 95050 - RNA, 1575 nt, Artificial Sequence
  derived and/or modified CDS sequence (opt1) from glycoprotein__RABV__FJ959397.1
augaucccccaggcccugcuguucgugccgcugcuggucuucccccucugcuucggcaaguuccccaucuacaccauccccgacaagcuggggccguggagccccaucgacauccaccaccuguccugccccaacaaccucgugguggaggacgagggcugcaccaaccugagcggguucuccuacauggagcugaaggucggcuacaucagcgccaucaaggugaacggguucacgugcaccggcguggucaccgaggcggagaccuacacgaacuucgugggcuacgugaccaccaccuucaagcgcaagcacuuccggcccacgccggacgccugccgcuccgccuacaacuggaagauggccggggacccccgguacgaggagagccuccacaaccccuaccccgacuaccacuggcugcgcaccgucaagaccaccaaggaguccguggugaucaucagcccguccgucgccgaccuggaccccuacgacaagagccuccacucccggguguucccccgcggcaagugcagcgggaucacgguguccagcgcguacugcuccaccaaccacgacuacaccaucuggaugcccgagaacccgcggcugggcaccagcugcgacaucuucacgaacucccgcgggaagcgggccagcaagggcuccaagaccugcggcuucgucgacgagcgcgggcuguacaagagccucaagggcgccugcaagcugaagcugugcggggugcucggccugcggcugauggacggcaccuggguggccauccagaccagcaacgagacgaaguggugcccgcccgaccagcucgucaaccugcacgacuuccacuccgacgagaucgagcaccuggugguggaggagcucgucaagaagcgcgaggagugccuggacgcgcuggagagcaucaugaccaccaaguccgugagcuuccggcgccucucccaccuccggaagcuggugcccggguucggcaaggccuacaccaucuucaacaagacgcucauggaggccgacgcccacuacaagagcguccgcaccuggaacgagaucauccccuccaaggggugccugcgggugggcgggcgcugccacccccacgucaacggcguguucuucaacggcaucauccuggggcccgacggccacgugcucauccccgagaugcagagcucccugcugcagcagcacauggagcuccuggagagcuccgucaucccgcugaugcacccccucgccgaccccagcaccguguucaaggacggggacgagguggaggacuucgucgaggugcaccuccccgacgugcacaagcaggucuccggcguggaccuggggcugccgaacuggggcaaggacgugcugaugggcgcggggguccugaccgcccucaugcugaugaucuuccugaugacgugcugccggcgcaccaaccgggccgagagcauccagcacucccucggcgagaccgggcgcaaggugagcgugaccucccagagcggccgcgucaucuccagcugggagagcuacaaguccgggggcgagacgaagcuguga

SEQ ID NO: 95051 - RNA, 1575 nt, Artificial Sequence
  derived and/or modified CDS sequence (opt1) from glycoprotein__RABV__FJ979833.1
auggugccccaggcccuccuguucgucccgcugcugggcuucagccucugcuucgggaaguuccccaucuacaccauccccgacgagcugggccccugguccccgaucgacauccaccaccugagcugccccaacaaccucgugguggaggacgaggggugcaccaaccuguccgaguucagcuacauggagcugaaggucggcuacaucuccgccaucaaggugaacggguucacgugcaccggcguggucaccgaggcggaggccuacaccaacuucgugggcuacgugacgaccaccuucaagcgcaagcacuuccggcccacccccgacgccugccgcgccgccuacaacuggaagauggcgggggacccgcgguacgaggagagccuccacaaccccuaccccgacuaccacuggcugcgcacgguccggaccaccaaggagucccugaucaucaucagccccuccgugaccgaccucgacccguacgacaagagccugcacucccgcguguuccccggcgggaagugcagcggcaucacggucuccagcaccuacugcuccaccaaccacgacuacaccaucuggaugcccgaggacccccggccgcgcacgcccugcgacaucuucaccaacagccgggggaagcgcgccuccaagggcaacaagaccugcggcuucguggacgagcgggggcuguacaagagccucaagggcgccugccgccugaagcugugcggggugcucggccugcggcugauggacggcaccugggucgccaugcagacguccgacgagaccaaguggugcccgcccgaccagcucgugaaccugcacgacuuccagagcgacgagaucgagcaccugguggucgaggagcucgugaagaagcgcgaggggugccuggacgcgcuggagagcaucaugaccaccaaguccgugagcuuccggcgcuucucccaccuccggaagcugguccccggcuucgggaaggccuacacgaucuucaacaagacccugauggaggccgacgcccacuacaagagcgugcgcaccuggaacgagaucauccccuccaagggcugccucaaggucgggggccggugccacccccacgugaacggcguguucuucaacgggaucauccugggccccgacgggcacguccugaucccggagaugcagagcucccuccugcagcagcacauggagcugcucaagagcuccgugaucccccugaugcacccccuggccgaccccagcaccguguucaaggagggcgacgaggcggaggacuucgucgaggugcaccucccggacguguacaagcgcaucuccggggucgaccugggccugcccaacuggggcaaguacgugcucaugacggccggggccaugaucggccuggugcugaucuucagccucaugaccuggugccggcgcgccaaccgccccgaguccaagcagcggagcuucgggggcaccgggcgcaacgucuccgugaccagccaguccggcaaggugaucccgagcugggaguccuacaagagcggcggggagacgggccuguga

SEQ ID NO: 95052 - RNA, 1575 nt, Artificial Sequence
  derived and/or modified CDS sequence (opt1) from glycoprotein__RABV__GQ303557.1
augaucccccaggcccuccuguucgugccgcugcuggucuucagcuccugcuucggcaaguuccccaucuacaccauccccgacaagcucgggcccuggagcccgaucgacauccaccaccuguccugccccaacaaccuggugguggaggacgagggcugcaccaaccucagcggguucuccuacauggagcugaaggucggcuacaucagcgccaucaaggugaacggguucacgugcaccggcguggucaccgaggcggagaccuacacgaacuucgugggcuacgugaccaccaccuucaagcgcaagcacuuccggcccacgcccgacgccugccgcgccgccuacaacuggaagauggccggggacccgcgguacgaggagucccugcacaaccccuaccccgacuaccacuggcuccgcaccgucaagaccaccaaggagagccuggugaucaucucccccagcguguccgaccuggacccguacgacaagagccuccacucccgggucuuccccagcggcaagugcuccgggaucacggugagcuccaccuacugccccaccaaccacgacuacaccaucuggaugcccgagaacccgcgccugggcacgagcugcgacaucuucaccaacucccgggggaagcgcgcgagcaagggcggcaagaccugcggguucguggacgagcggggccuguacaagagccucaagggggccugcaagcugaagcugugcggcguccucggccugcgccugauggacgggaccuggguggccauccagacguccgacgaggccaaguggugcccgcccgaccagcucgugaacauccacgacuuccggagcgacgagaucgagcaccuggucguggaggagcuggugaagaagcgcgaggagugccucgacgcgcuggaguccaucaugaccaccaagagcgucuccuuccggcgccugagccaccuccggaagcuggugcccggcuucgggaaggccuacaccaucuucaacaagacgcugauggaggccgacgcccacuacaaguccgugcgcaccuggaacgagaucauccccagcaagggcugccuccgggucgggggccgcugccacccccacgugaacggcgucuucuucaacgggaucauccugggccccgacgggcacgugcugauccccgagaugcaguccagccuccugcagcagcacauggagcugcucgaguccagcgugaucccgcugaugcacccccuggccgaccccuccaccgucuucaaggacggcgacgaggcggaggacuucguggaggugcaccuccccgacguccacaagcaggucagcgggguggaccugggccugccguccuggggcaaguacgugcucaugagcgugggggccaugaucgcccugaugcugaugaucuuccucaugaccugcugccggaaggccaacggcgccgagacgauccagcaccgccugggggagaccggccggaagguguccgucaccagccaguccgggcgcgugaucagcagcugggaguccuacaagagcggcggcgagaccaagcuguga

SEQ ID NO: 95053 - RNA, 1575 nt, Artificial Sequence; identical to SEQ ID NO: 94881
  derived and/or modified CDS sequence (opt1) from glycoprotein__RABV__GQ406342.1

SEQ ID NO: 95054 - RNA, 1575 nt, Artificial Sequence
  derived and/or modified CDS sequence (opt1) from glycoprotein__RABV__GQ412744.1
auggugccccaggcccugcuccuggucccgcugcucggcuucagccugugcuucgggaaguuccccaucuacaccauccccgacacccugggccccugguccccgaucgacauccaccaccucagcugccccaacaaccuggugguggaggacgaggggugcacgaaccuguccggcuucagcuacauggagcucaaggucgggcacaucuccgccaucaaggugaacggcuucacgugcaccggcguggucaccgaggcggagaccuacaccaacuucgugggguacgugaccaccacguucaagcgcaagcacuuccggcccacccccgacgccugccgcgccgccuacaacuggaagauggccggcgacccgcgguacgaggagagccugcacucccccuaccccgacuaccacuggcugcgcaccgucaagaccacgaaggagagccucgugaucaucucccccagcguggcgaaccuggacccguacgacaacucccugcacagccgggucuuccccuccgggaagugcagcggcaucaccgugcccuccguguacugcagcaccaaccacgacuacaccgucuggaugcccgagauccuccgccuggggacguccugcgacaucuucaccaacagccggggcaagcgcgccuccaagggcagcaagaccugcggguucguggacgagcggggccuguacaagagccucaagggggccugcaagcugaagcugugcggcgugccgggccuccgccugauggacgggaccugggucgccaugcagacguccaacgagaccaaguggugcccgcccggccagcuggugaaccuccacgaccugcacagcgacgagaucgagcaccugguggucgaggagcucgugaagaagcgggaggagugccuggacgcgcuggaguccaucaucaccaccaagagcguguccuuccgccggcucagccaccuccgcaagcugguccccggguucggcaaggccuacacgaucuucaacaagacccugauggaggccgaggcccacuacaaguccgugcggaccuggaacgagaucauccccagcaaggggugccugcgcgucggcggccggugccacccccacgugaacgggguguucuucaacggcaucauccuggggcccgacggccacguccucauccccgagaugcaguccagccugcugcagcagcacaucgagcuccuggaguccagcgugaucccgcugaugcacccccucgccgaccccuucaccguguucaaggacggggacgagaucgaggacuucgucgaggugcaccuccccgacgugcacgagcaggucuccggcguggaccugggccugccgaacuggggcgaguacgugcugcugagcgcggggacgcucaucgcccugaugcugaucaucuuccugaucacgugcugcaagcgcgucgaccggcccgaguccacccagcgcagccuccgggggaccggccgcaacguguccgugaccagccaguccgggaaguucauccccagcugggagagcuacaaguccggcggcgagaccgggcuguga

SEQ ID NO: 95055 - RNA, 1575 nt, Artificial Sequence
  derived and/or modified CDS sequence (opt1) from glycoprotein__RABV__GQ472535.1
auggugccccaggcccugcuguucgucccgcugcuggccgugccccucugcuucggcaaguuccccaucuacaccauccccgacaagcuggggccguggagccccaucgacauccaccaccuguccugccccaacaaccucguggucgaggacgagggcugcaccaaccugagcggguucuccuacauggagcugaaggugggcuacaucagcgcgaucaaggugaacggguucacgugcaccggcgucgugaccgaggccgagaccuacacgaacuucgugggcuacgucaccaccaccuucaagcgcaagcacuuccggcccacgccggacgccugccgcuccaccuacaacuggaagauggccggggacccccggcacgaggagagccuccacaaccccuaccccgacuaccacuggcugcgcaccgugaagaccacgaaggaguccuucgugaucaucagcccguccgucgccgaccuggaccccuacgacaagagccuccacucccggguguucccccgcggcaagugcagcgggaucaccguguccagcaccuacugcuccaccaaccacgacuacacgaucuggaugcccgagaacccgcggcugggcaccagcugcgacaucuucaccaacucccgcgggaagcgggcgagcaagggcuccaagaccugcggcuucgucgacgagcgcgggcuguacaagagccucaagggcgccugcaagcugaagcugugcggggugcucggccugcggcugauggacggcacguggguggccauccagaccagcgacgagaccaaguggugcccgcccgaccagcucgucaaccugcacgacuuccacuccgacgagaucgagcaccuggugguggaggagcucgucaagaagcgcgaggagugccuggacgcccuggagagcaucaugaccacgaaguccgugagcuuccggcgccucucccaccuccggaagcuggugcccggguucggcaaggcguacaccaucuucaacaagacccucauggaggccgacgcccacuacaagagcguccgcaccuggaacgagaucauccccuccaaggggugccugcgggugggcgggcgcugccacccccacgucaacggcguguucuucaacggcaucauccuggggcccgacggccacgugcucauccccgagaugcagagcucccugcugcagcagcacauggagcuccuggagagcuccgucaucccgcugaugcacccccucgccgaccccagcacgguguucaaggacggggacgaggccgaggacuucguggagguccaccuccccgacgugcacaagcaggucuccggcguggaccuggggcugccgagcuggggcaaguacgcgcugauguccgccggcauccugaccgcccucaugcugaugaucuuccugaugaccugcugccggcgcaccaaccgggccgagagcauccagcacucccucggggagacgggccgcaaggugagcgugaccucccagaacgggcgcgucaucagcagcugggaguccuacaagagcggcggggagaccaagcuguga

SEQ ID NO: 95056 - RNA, 1575 nt, Artificial Sequence
  derived and/or modified CDS sequence (opt1) from glycoprotein__RABV__GQ472536.1
auggugccccaggcccugcuguucgucccgcugcuggccaucccccucugcuucggcaaguuccccaucuacaccauccccgacaagcuggggccguggagccccaucgacauccaccaccuguccugccccaacaaccucgugguggaggacgagggcugcaccaaccugagcggguucuccuacauggagcugaaggucggcuacaucagcgcgaucaaggugaacggguucacgugcaccggcguggucaccgaggccgagaccuacacgaacuucgugggcuacgugaccaccaccuucaagcgcaagcacuuccggcccacgccggacgccugccgcuccgccuacaacuggaagauggccggggacccccgguacgaggagagccuccacaaccccuaccccgacuaccacuggcugcgcaccgucaagaccaccaaggaguccuucgugaucaucagcccguccguggcggaccuggaccccuacgacaagagccuccugucccgggucuucccccgcggcaagugcagcgggaucacgguguccagcaccuacugcuccaccaaccacgacuacaccaucuggaugcccgagaacccgcggcugggcacgagcugcgacaucuucaccaacucccgcgggaagcgggccagcaagggcuccaagaccugcggcuucguggacgagcgcgggcucuacaagagccugaagggcgccugcaagcugaagcucugcgggguccugggccugcggcucauggacggcaccuggguggccauccagacgagcgacgagaccaaguggugcccgcccgaccagcuggugaaccugcacgacuuccacuccgacgagaucgagcaccucgucguggaggagcuggugaagaagcgcgaggagugccuggacgcgcucgagagcaucaugaccaccaaguccgucagcuuccggcgccugucccaccuccggaagcucgugcccggguucggcaaggccuacacgaucuucaacaagacccugauggaggccgacgcccacuacaagagcgugcgcaccuggaacgagaucauccccuccaaggggugccugcgggucggcgggcgcugccacccccacgugaacggcgucuucuucaacggcaucauccucgggcccgacggccacgugcugauccccgagaugcagagcucccugcuccagcagcacauggagcugcuggagagcuccgugaucccgcucaugcacccccuggccgaccccagcaccgucuucaaggacggggacgaggcggaggacuucguggaggugcaccuccccgacguccacaagcaggucuccggcguggaccuggggcugccgagcuggggcaaguacgugcugauguccgccggcauccucacggcccugaugcugaugaucuuccucaugaccugcugccggcgcaccaaccgggccgagagcauccagcacucccugggggagaccggccgcaaggugagcgugacgucccagagcgggcgcgucaucagcuccugggagagcuacaaguccggcggggagaccaagcuguga

SEQ ID NO: 95057 - RNA, 1575 nt, Artificial Sequence; identical to SEQ ID NO: 94551
  derived and/or modified CDS sequence (opt1) from glycoprotein__RABV__GQ472537.1

SEQ ID NO: 95058 - RNA, 1575 nt, Artificial Sequence
  derived and/or modified CDS sequence (opt1) from glycoprotein__RABV__GQ472539.1
augaucccccaggugcugcuguucgucccgcugcugguguucagcuccugcuucggcaaguuccccaucuacaccauccccgacaagcucgggcccuggagcccgaucgacauccaccaccuguccugccccaacaaccugguggucgaggacgagggcugcaccaaccucagcggguucuccuacauggagcugaaggugggcuacaucagcgccaucaaggugaacggguucacgugcaccggcgucgugaccgaggccgagaccuacacgaacuucgugggcuacgucaccaccaccuucaagcgcaagcacuuccggcccaugcccgacgcgugccgcgccgccuacaacuggaagauggccggggacccgcgguacgaggagucccugcacaaccccuaccccgacuaccacuggcuccgcacggugaagaccaccaaggagagccuggugaucaucucccccagcgucgccgaccuggacccguacgacaagucccuccacagccggguguuccccggcgggaagugcuccggcaucaccgugagcuccacgugcugcagcaccaaccacgacuacaccaucuggaugcccgagaacccccgccuggggaccuccugcgacaucuucacgaacagccggggcaagcgcgcguccaagggcgggaagaccugcggcuucgucgacgagcgggggcuguacaagagccucaagggcgccugcaagcugaagcugugcggcgugcucgggcugcgccugauggacggcaccuggguggccauccagaccagcgacgagaucaaguggugcuccccggaccagcucgucaaccugcacgacuuccacagcgacgagaucgagcaccuggugguggaggagcucgucaagaagcgggaggagugccuggacgcccuggagacgaucaugaccaccaaguccgugagcuuccgccggcucucccaccuccgcaagcuggugcccggguucggcaaggcguacaccaucuucaacaagacgcucauggaggccgacgcccacuacaagagcauccggaccuggaacgagaucauccccuccaaggggugccugcgcgucggcggccggugccacccccacgugaacggggucuucuucaacggcaucauccuggggcucgacggccacgugcugaucccggagaugcagagcucccugcuccaccagcacauggagcugcuggagagcuccgugaucccccucaugcacccccuggccgaccccagcaccgucuucaaggacggggacgaggccgaggacuucguggaggugcaccucccggacguccacaagcagaucuccggcguggaccugggccugcccaacugggggaaguacgugcugaccagcgcgggcgcccucacggcccugaugcugaugaucuuccucaugaccugcugccgcaagaccaaccgggccgaguccauccagcgcagccccggggagaccgagcggaaggucuccgugacgagccacaacggccgcgugaucuccagcugggagagcuacaaguccgggggcgagaccaagcuguga

SEQ ID NO: 95059 - RNA, 1575 nt, Artificial Sequence
  derived and/or modified CDS sequence (opt1) from glycoprotein__RABV__GQ472540.1
auggugccccaggcccugcuguucgucccgcugcuggccgugccccucugcuucggcaaguuccccaucuacaccauccccgacaagcuggggccguggagccccaucgacauccaccaccuguccugccccaacaaccucguggucgaggacgagggcugcaccaaccugagcggguucuccuacauggagcugaaggugggcuacaucagcgcgaucaaggugaacggguucacgugcaccggcgucgugaccgaggccgagaccuacacgaacuucgugggcuacgucaccaccaccuucaagcgcaagcacuuccggcccacgccggacgccugccgcuccgccuacaacuggaagauggccggggacccccgguacgaggagagccuccacaaccccuaccccgacuaccacuggcugcgcaccgugaagaccaccaaggaguccuucgugaucaucagcccguccgucgcggaccuggaccccuacgacaagagccuccacucccggguguucccccgcggcaagugcagcgggaucacgguguccagcaccuacugcuccaccaaccacgacuacaccaucuggaugcccgagaacccgcggcugggcacgagcugcgacaucuucaccaacucccgcgggaagcgggccagcaagggcuccaagaccugcggcuucgucgacgagggcgggcuguacaagagccucaagggggccugcaagcugaagcugugcggcgugcucggccugcgccugauggacgggaccuggguggccauccagacgagcgacgagaccaaguggugcccgcccgaccagcucgucaaccugcacgacuuccacuccgacgagaucgagcaccuggugguggaggagcucgucaagaagcgggaggagugccuggacgcgcuggagagcaucaugaccaccaaguccgugagcuuccgccggcucucccaccuccgcaagcuggugcccggcuucgggaaggccuacacgaucuucaacaagacccucauggaggccgacgcccacuacaagagcguccggaccuggaacgagaucauccccuccaagggcugccugcgcgucgggggccggugccacccccacgugaacggcguguucuucaacgggaucauccugggccccgacgggcacgugcucauccccgagaugcagagcucccugcugcagcagcacauggagcuccuggagagcuccgucaucccgcugaugcacccccucgccgaccccagcaccguguucaaggacggcgacgaggcggaggacuucguggagguccaccuccccgacgugcacaagcaggucuccgggguggaccugggccugccgagcuggggcaaguacgugcugauguccgccgggauccugacggcccucaugcugaccaucuuccugaugaccugcugccgccggaccaaccgcgccgagagcauccagcacucccucggcgagacggggcggaaggugagcgucaccucccagagcggccgcgugaucagcuccugggagagcuacaaguccgggggcgagaccaagcuguga

SEQ ID NO: 95060 - RNA, 1575 nt, Artificial Sequence
  derived and/or modified CDS sequence (opt1) from glycoprotein__RABV__GQ472541.1
auggugccccaggcccugcuguucgucccgcugcuggccaucccccucugcuucggcaaguuccccaucuacaccauccccgacaagcuggggccguggagccccaucgacauccaccaccuguccugccccaacaaccucgugguggaggacgagggcugcaccaaccugagcggguucuccuacauggagcugaaggucggcuacaucagcgcgaucaaggugaacggguucacgugcaccggcguggucaccgaggccgagaccuacacgaacuucgugggcuacgugaccaccaccuucaagcgcaagcacuuccggcccacgccggacgccugccgcuccgccuacaacuggaagauggccggggacccccgguacgaggagagccuccacaaccccuaccccgacuaccacuggcugcgcaccgucaagaccaccaaggaguccuucgugaucaucagcccguccguggcggaccuggaccccuacgacaagagccuccacucccgggucuucccccgcggcaagugcagcgggaucacgguguccagcaccuacugcuccaccaaccacgacuacaccaucuggaugcccgagaacccgcggcugggcacgagcugcgacaucuucaccaacucccgcgggaagcgggccagcaagggcuccaagaccugcggcuucguggacgagcgcgggcuguacaagagccucaagggcgccugcaagcugaagcugugcgggguccucggccugcggcugauggacggcaccuggguggccauccagacgagcgacgagaccaaguggugcccgcccgaccagcucgugaaccugcacgacuuccacuccgacgagaucgagcaccuggucguggaggagcucgugaagaagcgcgaggagugccuggacgcgcuggagagcaucaugaccaccaaguccgucagcuuccggcgccucucccaccuccggaagcuggugcccggguucggcaaggccuacacgaucuucaacaagacccucauggaggccgacgcccacuacaagagcgugcgcaccuggaacgagaucauccccuccaaggggugccugcgggucggcgggcgcugccacccccacgugaacggcgucuucuucaacggcaucauccuggggcccgacggccacgugcucauccccgagaugcagagcucccugcugcagcagcacauggagcuccuggagagcuccgugaucccgcugaugcacccccucgccgaccccagcaccgucuucaaggacggggacgaggcggaggacuucgacgaggugcaccuccccgacgugcacaagcaggucuccggcguggaccuggggcugccgagcuggggcaaguacgugcugauguccgccggcauccugacggcccucaugcugaugaucuuccugaugaccugcugccggcgcaccaaccgggccgagagcauccagcacucccucggggagaccggccgcaaggucagcgugacgucccagagcgggcgcgugaucagcuccugggagagcuacaaguccggcggggagaccaagcuguga

SEQ ID NO: 95061 - RNA, 1575 nt, Artificial Sequence
  derived and/or modified CDS sequence (opt1) from glycoprotein__RABV__GQ472542.1
augaucccccaggugcugcuguucgucccgcugcugguguucagcuccugcuucggcaaguuccccaucuacaccauccccgacaagcucgggcccuggagcccgaucgacauccaccaccuguccugccccaacaaccugguggucgaggacgagggcugcaccaaccucagcggguucuccuacauggagcugaaggugggcuacaucagcgccaucaaggugaacggguucacgugcaccggcgucgugaccgaggccgagaccuacacgaacuucgugggcuacgucaccaccaccuucaagcgcaagcacuuccggcccaugcccgacgcgugccgcgccgccuacaacuggaagauggccggggacccgcgguacgaggagucccugcacaaccccuaccccgacuaccacuggcuccgcacggugaagaccaccaaggagagccuggugaucaucucccccagcgucgccgaccuggacccguacgacaagucccuccacagccggguguuccccggcgggaagugcuccggcaucaccgugagcuccacgugcugcagcaccaaccacgacuacaccaucuggaugcccgagaacccccgccuggggaccuccugcgacaucuucacgaacagccggggcaagcgcgcguccaagggcgggaagaccugcggcuucgucgacgagcgggggcuguacaagagccucaagggcgccugcaagcugaagcugugcggcgugcucgggcugcgccugauggacggcaccuggguggccauccagaccagcgacgagaucaaguggugcuccccggaccagcucgucaaccugcacgacuuccacagcgacgagaucgagcaccuggugguggaggagcucgucaagaagggggaggagugccuggacgcccuggagacgaucaugaccaccaaguccgugagcuuccggcgccucucccaccuccggaagcuggugcccggcuucgggaaggcguacaccaucuucaacaagacgcucauggaggccgacgcccacuacaagagcauccgcaccuggaacgagaucauccccuccaagggcugccugcgggucggcgggcgcugccacccccacgugaacggcgucuucuucaacgggaucauccugggcccggacgggcacgugcucauccccgagaugcagagcucccugcugcaccagcacauggagcuccuggagagcuccgugaucccccugaugcacccccucgccgacccgagcaccgucuucaaggacggcgacgaggccgaggacuucguggaggugcaccuccccgacguccacaagcagaucuccggcguggaccuggggcugcccaacuggggcaaguacgugcugaucagcgcgggggcccugaccgccuccaugcucaugaucuuccugaugacgugcugccggaaggccaaccgcgccgagagcauccagcacaaccccggcgagaccgggcggaaggucuccgugaccagccacaacggccgcgugaucuccagcugggagagcuacaaguccggcggggagaccaagcuguga

SEQ ID NO: 95062 - RNA, 1575 nt, Artificial Sequence; identical to SEQ ID NO: 94551
  derived and/or modified CDS sequence (opt1) from glycoprotein__RABV__GQ472543.1

SEQ ID NO: 95063 - RNA, 1575 nt, Artificial Sequence
  derived and/or modified CDS sequence (opt1) from glycoprotein__RABV__GQ472544.1
augaucccccaggugcugcuguucgucccgcugcugguguucagcuccugcuucggcaaguuccccaucuacaccauccccgacaagcucgggcccuggagcccgaucgacauccaccaccuguccugccccaacaaccugguggucgaggacgagggcugcaccaaccucagcggguucuccuacauggagcugaaggugggcuacaucagcgccaucaaggugaacggguucacgugcaccggcgucgugaccgaggccgagaccuacacgaacuucgugggcuacgucaccaccaccuucaagcgcaagcacuuccggcccaugcccgacgcgugccgcgccgccuacaacuggaagauggccggggacccgcgguacgaggagucccugcacaaccccuaccccgacuaccacuggcuccgcacggugaagaccaccaaggagagccuggugaucaucucccccagcgucgccgaccuggacccguacgacaagucccuccacagccggguguuccccggcgggaagugcuccggcaucaccgugagcuccacgugcugcagcaccaaccacgacuacaccaucuggaugcccgagaacccccgccuggggaccuccugcgacaucuucacgaacagccggggcaagcgcgcguccaagggcgggaagaccugcggcuucgucgacgagcgggggcuguacaagagccucaagggcgccugcaagcugaagcugugcggcgugcucgggcugcgccugauggacggcaccuggguggccauccagaccagcgacgagaucaaguggugcuccccggaccagcucgucaaccugcacgacuuccacagcgacgagaucgagcaccuggugguggaggagcucgucaagaagcgggaggagugccuggacgcccuggagacgaucaugaccaccaaguccgugagcuuccgccggcucucccaccuccgcaagcuggugcccggguucggcaaggcguacaccaucuucaacaagacgcucauggaggccgacgcccacuacaagagcauccggaccuggaacgagaucauccccuccaaggggugccugcgcgucggcggccggugccacccccacgugaacggggucuucuucaacggcaucauccuggggccggacggccacgugcucauccccgagaugcagagcucccugcugcaccagcacauggagcuccuggggagcuccgugaucccccugaugcacccccucgccgacccgagcaccgucuucaaggacggcgacgaggccgaggacuucguggaggugcaccuccccgacguccacaagcagaucuccggcguggaccuggggcugcccaacuggggcaaguacgugcugaucagcgcgggggcccugaccgccuccaugcucaugaucuuccugaugacgugcugccgcaaggccaaccgggccgagagcauccagcacaaccccggcgagaccgggcgcaaggucuccgugaccagccacaacggccgggugaucuccagcugggagagcuacaaguccggcggggagaccaagcuguga

SEQ ID NO: 95064 - RNA, 1575 nt, Artificial Sequence
  derived and/or modified CDS sequence (opt1) from glycoprotein__RABV__GQ472545.1
auggugccccagguccuccuguucgugccgcugcugguguucagcuccugcuucggcaaguuccccaucuacaccauccccgacaagcucgggcccuggagcccgaucgacauccaccaccuguccugccccaacaaccuggucguggaggacgagggcugcaccaaccucagcggguucuccuacauggagcugaaggugggcuacaucagcgccaucaaggucaacggguucacgugcaccggcguggugaccgaggccgagaccuacacgaacuucgucggcuacgugaccaccaccuucaagcgcaagcacuuccggcccaugcccgacgcgugccgcgccgccuacaacuggaagauggccggggacccgcgguacgaggagucccugcacaaccccuaccccgacuaccacuggcuccgcacggugaagaccaccaaggagagccuggucaucaucucccccagcguggccgaccuggacccguacgacaagucccuccacagccggguguuccccggcgggaagugcuccggcaucaccgucagcuccacgugcugcagcaccaaccacgacuacaccaucuggaugcccgagaacccccgccuggggaccuccugcgacaucuucacgaacagccggggcaagcgcgcguccaagggcgggaagaccugcggcuucguggacgagcgggggcuguacaagagccucaagggcgccugcaagcugaagcugugcggcgugcucgggcugcgccugauggacggcaccugggucgccauccagaccagcgacgagaucaaguggugcuccccggaccagcucgugaaccugcacgacuuccacagcgacgagaucgagcacuucguggucgaggagcuggugaagaagcgggaggagugccucgacgcccuggagacgaucaugaccaccaaguccgugagcuuccgccggcugucccaccuccgcaagcugguccccggguucggcaaggcguacaccaucuucaacaagacgcugauggaggccgacgcccacuacaagagcauccggaccuggaacgagaucauccccuccaaggggugccuccgcgugggcggccggugccacccccacgucaacgggguguucuucaacggcaucauccuggggccggacggccacgugcugauccccgagaugcagagcucccuccugcaccagcacauggagcugcucgagagcuccgucaucccccugaugcacccccuggccgacccgagcaccguguucaaggacggggacgaggccgaggacuucguggagguccaccuccccgacgugcacaagcagaucuccggcguggaccugggccugcccaacugggggaaguacguccucaucagcgcgggcgcccugaccgcccugaugcucaugaucuuccugaugacgugcugccgcaaggccaaccgggccgaguccauccagcacaaccccggggagaccggccgcaaggugagcgugaccucccacaacgggcgggucaucagcuccugggagagcuacaagagcggcggcgagaccaagcuguga

SEQ ID NO: 95065 - RNA, 1575 nt, Artificial Sequence; identical to SEQ ID NO: 94551
  derived and/or modified CDS sequence (opt1) from glycoprotein__RABV__GQ472546.1

SEQ ID NO: 95066 - RNA, 1575 nt, Artificial Sequence
  derived and/or modified CDS sequence (opt1) from glycoprotein__RABV__GQ472547.1
auggugccccaggcccugcuguucgucccgcugcuggccaucccccucugcuucggcaaguuccccaucuacaccauccccgacaagcuggggccguggagccccaucgacauccaccaccuguccugccccaacaaccucgugguggaggacgagggcugcaccaaccugagcggguucuccuacauggagcugaaggucggcuacaucagcgcgaucaaggugaacggguucacgugcaccggcguggucaccgaggccgagaccuacacgaacuucgugggcuacgugaccaccaccuucaagcgcaagcacuuccggcccacgccggacgccugccgcuccgccuacaacuggaagauggccggggacccccgguacgaggagagccuccacaaccccuaccccgacuaccacuggcugcgcaccgucaagaccaccaaggaguccuucgugaucaucagcccguccguggcggaccuggaccccuacgacaagagccuccacucccgggucuucccccgcggcaagugcagcgggaucacgguguccagcaccuacugcuccaccaaccacgacuacaccaucuggaugcccgagaacccgcggcugggcacgagcugcgacaucuucaccaacucccgcgggaagcgggccagcaagggcuccaagaccugcggcuucguggacgagcgcgggcuguacaagagccucaagggcgccugcaagcugaagcugugcgggguccucggccugcggcugauggacggcaccuggguggccauccagacgagcgacgagaccaaguggugcccgcccgaccagcucgugaaccugcacgacuuccacuccgacgagaucgagcaccuggucguggaggagcucgugaagaagcgcgaggagugccuggacgcgcuggagagcaucaugaccaccaaguccgucagcuuccggcgccucucccaccuccggaagcuggugcccggguucggcaaggccuacacgaucuucaacaagacccucauggaggccgacgcccacuacaagagcgugcgcaccuggaacgagaucauccccuccaaggggugccugcgggucggcgggcgcugccacccccacgugaacggcgucuucuucaacggcaucauccuggggcccgacggccacgugcucauccccgagaugcagagcucccugcugcagcagcacauggagcuccuggagagcuccgugaucccgcugaugcacccccucgccgaccccagcaccgucuucaaggacggggacgaggcggaggacuucguggaggugcaccuccccgacguccacaagcaggucuccggcguggaccuggggcugccgagcuggggcaaguacgugcugauguccgccggcauccugacggcccucaugcugaugaucuuccugaugaccugcugccggcgcaccaaccgggccgagagcauccagcacucccucggggagaccggccgcaaggugagcgugacgucccagagcgggcgcgucaucagcuccugggagagcuacaaguccgagggcgagaccaagcuguga

SEQ ID NO: 95067 - RNA, 1575 nt, Artificial Sequence
  derived and/or modified CDS sequence (opt1) from glycoprotein__RABV__GQ472548.1
augaucccccaggugcugcuguucgucccgcugcugguguucagcuccugcuucggcaaguuccccaucuacaccauccccgacaagcucgggcccuggagcccgaucgacauccaccaccuguccugccccaacaaccugguggucgaggacgagggcugcaccaaccucagcggguucuccuacauggagcugaaggugggcuacaucagcgccaucaaggugaacggguucacgugcaccggcgucgugaccgaggccgagaccuacacgaacuucgugggcuacgucaccaccaccuucaagcgcaagcacuuccggcccaugcccgacgcgugccgcgccgccuacaacuggaagauggccggggacccgcgguacgaggagucccugcacaaccccuaccccgacuaccacuggcuccgcacggugaagaccaccaaggagagccuggugaucaucucccccagcgucgccgaccuggacccguacgacaagucccuccacagccggguguuccccggcgggaagugcuccggcaucaccgugagcuccacgugcugcagcaccaaccacgacuacaccaucuggaugcccgagaacccccgccuggggaccuccugcgacaucuucacgaacagccggggcaagcgcgcguccaagggcgggaagaccugcggcuucgucgacgagcgggggcuguacaagagccucaagggcgccugcaagcugaagcugugcggcgugcucgggcugcgccugauggacggcaccuggguggccauccagaccagcgacgagaucaaguggugcuccccggaccagcucgucaaccugcacgacuuccacagcgacgagaucgagcaccuggugguggaggagcucgucaagaagcgggaggagugccuggacgcccuggagacgaucaugaccaccaaguccgugagcuuccgccggcucucccaccuccgcaagcuggugcccggguucggcaaggcguacaccaucuucaacaagacgcucauggaggccgacgcccacuacaagagcauccggaccuggaacgagaucauccccuccaaggggugccugcgcgucggcggccggugccacccccacgugaacggggucuucuucaacggcaucauccuggggccggacggccacgugcucauccccgagaugcagagcucccugcugcaccagcacauggagcuccuggagagcuccgugaucccccugaugcacccccucgccgacccgagcaccgucuucaaggacggggacgaggccgaggacuucguggaggugcaccuccccgacguccacaagcagaucuccggcguggaccugggccugcccaacugggggaaguacgugcugaccagcgcgggcgcccugacggcccucaugcugaugaucuuccugaugaccugcugccgcgagaccaaccgggccgaguccauccagcgcagccccggggagaccgagcggaaggucuccgugacgagccacaacggccgcgugaucuccagcugggagagcuacaaguccgggggcgagaccaagcucuga

SEQ ID NO: 95068 - RNA, 1575 nt, Artificial Sequence
  derived and/or modified CDS sequence (opt1) from glycoprotein__RABV__GQ472549.1
auggugccccaggcccugcuguucgucccgcugcuggccgugccccucugccugggcaaguuccccaucuacaccauccccgacaagcuggggccguggagccccaucgacauccaccaccucuccugccccaacaaccugguggucgaggacgagggcugcaccaaccugagcggguucuccuacauggagcucaaggugggcuacaucagcgcgaucaaggugaacggguucacgugcaccggcgucgugaccgaggccgagaccuacacgaacuucgugggcuacgucaccaccaccuucaagcgcaagcacuuccggcccacgccggacgccugccgcuccgccuacaacuggaagauggccggggacccccgguacgaggagagccugcacaaccccuaccccgacuaccacuggcugcgcaccgugaagaccaccaaggaguccuucgugaucaucagcccguccgucgcggaccucgaccccuacgacaagagccugcacucccggguguucccccgcggcaagugcagcgggaucacgguguccagcaccuacugcuccaccaaccacgacuacaccaucuggaugcccgagaacccgcggcugggcacgagcugcgacaucuucaccaacucccgcgggaagcgggccagcaagggcuccaagaccugcggcuucgucgacgagcgcgggcucuacaagagccugaagggcgccugcaagcugaagcucugcggggugcugggccugcggcucauggacggcaccuggguggccauccagacgagcgacgagaccaaguggugcccgcccgaccagcuggucaaccugcacgacuuccacuccgacgagaucgagcaccucgugguggaggagcuggucaagaagcgcgaggagugccuggacgcgcucgagagcaucaugaccaccaaguccgugagcuuccggcgccugucccaccuccggaagcucgugcccggguucggcaaggccuacacgaucuucaacaagacccugauggaggccgacgcccacuacaagagcguccgcaccuggaacgagaucauccccuccaaggggugccugcgggugggcgggcgcugccacccccacgucaacggcguguucuucaacggcaucauccucgggcccgacggccacgugcugauccccgagaugcagagcucccugcuccagcagcacauggagcugcuggagagcuccgucaucccgcucaugcacccccuggccgaccccagcaccguguucaaggacggggacgaggcggaggacuucguggagguccaccuccccgacgugcacaagcacguguccggcgucgaccuggggcugccgagcuggggcaaguacgugcugguguccgccggcauccucacggcccugaugcugaccaucuuccucaugaccugcugccggcgcaccaaccgggccgagagcauccagcacucccugggggagacgggccgcaaggucagcgugaccucccagagcgggcgcgugaucagcuccugggagagcuacaaguccggcggggagaccaagcuguga

SEQ ID NO: 95069 - RNA, 1575 nt, Artificial Sequence
  derived and/or modified CDS sequence (opt1) from glycoprotein__RABV__GQ472550.1
auggugccccaggcccugcuguucgucccgcugcuggccaucccccucugcuucggcaaguuccccaucuacaccauccccgacaagcuggggccguggagccccaucgacauccaccaccuguccugccccaacaaccucgugguggaggacgagggcugcaccaaccugagcggguucuccuacauggagcugaaggucggcuacaucagcgcgaucaaggugaacggguucacgugcaccggcguggucaccgaggccgagaccuacacgaacuucgugggcuacgugaccaccaccuucaagcgcaagcacuuccggcccacgccggacgccugccgcuccgccuacaacuggaagauggccggggacccccgguacgaggagagccuccacaaccccuaccccgacuaccacuggcugcgcaccgucaagaccaccaaggaguccuucgugaucaucagcccguccguggcggaccuggaccccuacgacaagagccuccacucccgggucuucccccgcggcaagugcagcgggaucacgguguccagcaccuacugcuccaccaaccacgacuacaccaucuggaugcccgagaacccgcggcugggcacgagcugcgacaucuucaccaacucccgcgggaagcgggccagcaagggcuccaagaccugcggcuucguggacgagcgcgggcuguacaagagccucaagggcgccugcaagcugaagcugugcgggguccucggccugcggcugauggacggcaccuggguggccauccagacgagcgacgagaccaaguggugcccgcccgaccagcucgugaaccugcacgacuuccacuccgacgagaucgagcaccuggucguggaggagcucgugaagaagcgcggggagugccuggacgcgcuggagagcaucaugaccaccaaguccgucagcuuccggcgccucucccaccuccggaagcuggugcccggcuucgggaaggccuacacgaucuucaacaagacccucauggaggccgacgcccacuacaagagcgugcgcaccuggaacgagaucauccccuccaagggcugccugcgggucgggggccgcugccacccccacgugaacggcgucuucuucaacgggaucauccugggccccgacgggcacgugcucauccccgagaugcagagcucccugcugcagcagcacauggagcuccuggagagcuccgugaucccgcugaugcacccccucgccgaccccagcaccgucuucaaggacggcgacgaggcggaggacuucguggaggugcaccuccccgacguccacaagcaggucuccgggguggaccugggccugccgagcuggggcaaguacgugcugauguccgccgggauccugacggcccucaugcugaugaucuuccugaugaccugcugccggcgcaccaaccgggccgagagcauccagcacucccucggcgagaccgggcgcaaggugagcgugacgucccagagcggccgcgucaucagcuccugggagagcuacaaguccgggggcgagaccaagcuguga

SEQ ID NO: 95070 - RNA, 1575 nt, Artificial Sequence
  derived and/or modified CDS sequence (opt1) from glycoprotein__RABV__GQ472551.1
auggugccccagguccugcuguucgugccgcugcugguguucagcuccugcuucggcaaguuccccaucuacaccauccccgacaagcucgggcccuggagcccgaucgacauccaccaccuguccugccccaacaaccuggucguggaggacgagggcugcaccaaccucagcggguucuccuacauggagcugaaggugggcuacaucagcgccaucaaggucaacggguucacgugcaccggcguggugaccgaggccgagaccuacacgaacuucgucggcuacgugaccaccaccuucaagcgcaagcacuuccggcccaugcccgacgcgugccgcgccgccuacaacuggaagauggccggggacccgcgguacgaggagucccugcacaaccccuaccccgacuaccacuggcuccgcacggugaagaccaccaaggagagccuggucaucaucucccccagcguggccgaccuggacccguacgacaagucccuccacagccggguguuccccggcgggaagugcuccggcaucaccgucagcuccacgugcugcagcaccaaccacgacuacaccaucuggaugcccgagaacccccgccuggggaccuccugcgacaucuucacgaacagccggggcaagcgcgcguccaagggcgggaagaccugcggcuucguggacgagcgggggcuguacaagagccucaagggcgccugcaagcugaagcugugcggcgugcucgggcugcgccugauggacggcaccugggucgccauccagaccagcgacgagaucaaguggugcuccccggaccagcucgugaaccugcacgacuuccacagcgacgagaucgagcaccugguggucgaggagcucgugaagaagcgggaggagugccuggacgcccuggagacgaucaugaccaccaaguccgugagcuuccgccggcucucccaccuccgcaagcugguccccggguucggcaaggcguacaccaucuucaacaagacgcucauggaggccgacgcccacuacaagagcauccggaccuggaacgagaucauccccuccaaggggugccugcgcgugggcggccggugccacccccacgucaacgggguguucuucaacggcaucauccuggggccggacggccacgugcucauccccgagaugcagagcucccugcugcaccagcacauggagcuccuggagagcuccgucaucccccugaugcacccccucgccgacccgagcaccguguucaaggacggggacgaggccgaggacuucguggagguccaccuccccgacgugcacaagcagaucuccggcguggaccugggccugcccaacugggggaaguacguccugaucagcgcgggcgcccugaccgcccucaugcugaugaucuuccugaugacgugcugccgcaaggccaaccgggccgaguccaugcagcacaaccccggggagaccggccgcaaggugagcgugaccucccacaacgggcgggucaucagcuccugggagagcuacaagagcggcggcgagaccaagcucuga

SEQ ID NO: 95071 - RNA, 1575 nt, Artificial Sequence
  derived and/or modified CDS sequence (opt1) from glycoprotein__RABV__GQ472552.1
augaucccccaggcccugcuguucgugccgcugcuggucuucagccucugcuucggcaaguuccccaucuacaccauccccgacaagcuggggcccugguccccgaucgacauccaccaccugagcugccccaacaaccucgugguggaggacgagggcugcaccaaccuguccggguucagcuacauggagcugaaggucggcuacaucuccgccaucaaggugaacggguucacgugcaccggcguggucaccgaggcggagaccuacacgaacuucgugggcuacgugaccaccaccuucaagcgcaagcacuuccggcccacgcccgacgccugccgcgccgccuacaacuggaagauggccggggacccgcgguacgaggagagccuccacaaccccuaccccgacuaccacuggcugcgcaccgucaagaccaccaaggagucccuggugaucaucagccccuccgugagcgaccucgacccguacgacaagucccugcacagccgggucuuccccuccggcaagugcagcgggaucacgguguccagcaccuacugccccaccaaccacgacuacaccaucuggaugcccgagaacccgcgccugggcacguccugcgacaucuucaccaacagccgggggaagcgcgcguccaagggcagcaagaccugcggcuucguggacgagcgggggcucuacaagagccugaagggcgccugcaagcugaagcucugcgggguccugggccugcgccucauggacggcaccugggccgccauccaggcguccgacgaggccaaguggugcccgcccgaccagcuggugaacauccacgacuuccggagcgacgagaucgagcaccugguggucgaggagcucgugaagaagcgcgaggagugccuggacgcccuggaguccaucaugacgaccaagagcguguccuuccggcgccucagccaccuccggaagcugguccccggguucggcaaggccuacaccaucuucaacaagacccucauggaggccgacgcgcacuacaaguccgugcgcacguggaacgagaucauccccagcaaggggugccugcgggugggcgggcgcugccacccccacgucaacggcguguucuucaacggcaucauccuggggcccgacggccacguccucauccccgagaugcaguccagccugcugcagcagcacauggagcuccuggaguccagcgugaucccgcugaugcacccccucgccgaccccuccaccguguucaaggacggggacgaggccgaggacuucgucgaggugcaccuccccgacgugcacaagcaggucagcggcguggaccuggggcugccguccuggggcaaguacgugcugaugagcgucggcgccaugaucgcccugaugcucaugaucuuccugacgaccugcugccggaaggcgaacggggccgaguccauccagcaccgccugggcgagaccgggcggaaggugagcgugaccucccagagcggccgcgucaucagcuccugggagagcuacaaguccgggggcgagaccaagcucuga

SEQ ID NO: 95072 - RNA, 1575 nt, Artificial Sequence; identical to SEQ ID NO: 95067
  derived and/or modified CDS sequence (opt1) from glycoprotein__RABV__GQ472553.1

SEQ ID NO: 95073 - RNA, 1575 nt, Artificial Sequence; identical to SEQ ID NO: 94551
  derived and/or modified CDS sequence (opt1) from glycoprotein__RABV__GQ472554.1

SEQ ID NO: 95074 - RNA, 1575 nt, Artificial Sequence
  derived and/or modified CDS sequence (opt1) from glycoprotein__RABV__GQ472555.1
auggugccccagguccugcuguucgugccgcugcugguguucagcuccugcuucggcaaguuccccaucuacaccauccccgacaagcucgggcccuggagcccgaucgacauccaccaccuguccugccccaacaaccuggucguggaggacgagggcugcaccaaccucagcggguucuccuacauggagcugaaggugggcuacaucagcgccaucaaggucaacggguucacgugcaccggcguggugaccgaggccgagaccuacacgaacuucgucggcuacgugaccaccaccuucaagcgcaagcacuuccggcccaugcccgacgcgugccgcgccgccuacaacuggaagauggccggggacccgcgguacgaggagucccugcacaaccccuaccccgacuaccacuggcuccgcacggugaagaccaccaaggagagccuggucaucaucucccccagcguggccgaccuggacccguacgacaagucccuccacagccggguguuccccggcgggaagugcuccggcaucaccgucagcuccacgugcugcagcaccaaccacgacuacacccuguggaugcccgagaacccccgccuggggaccuccugcgacaucuucacgaacagccggggcaagcgcgcguccaagggcgggaagaccugcggcuucguggacgagcgggggcucuacaagagccugaagggcgccugcaagcugaagcucugcggcgugcuggggcugcgccucauggacggcaccugggucgccauccagaccagcgacgagaucaaguggugcccgcccgaccagcuggugaaccugcacgacuuccacuccgacgagaucgagcaccucguggucgaggagcuggugaagaagcgggaggagugccuggacgcccucgagacgaucaugaccaccaagagcguguccuuccgccggcugagccaccuccgcaagcucguccccggguucggcaaggcguacaccaucuucaacaagacgcugauggaggccgacgcccacuacaaguccauccggaccuggaacgagaucauccccagcaaggggugccugcgcgugggcggccggugccacccgcacgucaacgggguguucuucaacggcaucauccucgggcccgacggccacgugcugauccccgagaugcaguccagccugcuccaccagcacauggagcugcuggaguccagcgucaucccccucaugcacccgcuggccgaccccuccaccguguucaaggacggggacgaggccgaggacuucguggagguccaccuccccgacgagcacaagcagaucagcggcguggaccugggccugcccaacuggcgcaaguacgugcugaucuccgcgggggcccucaccgcccugaugcugaugaucuuccucaugacgugcugccggaaggccaaccgcgccgagagcauccagcacaacccgggcgagaccgggcggaaggucuccgugaccagccccaacggccgcgugaucuccagcugggaguccuacaagagcgggggcgagaccaagcuguga

SEQ ID NO: 95075 - RNA, 1575 nt, Artificial Sequence
  derived and/or modified CDS sequence (opt1) from glycoprotein__RABV__GQ472556.1
auggugccccagguccuccuguucgugccgcugcugguguucagcuccugcuucggcaaguuccccaucuacaccauccccgacaagcucgggcccuggagcccgaucgacauccaccaccuguccugccccaacaaccuggucguggaggacgagggcugcaccaaccucagcggguucuccuacauggagcugaaggugggcuacaucagcgccaucaaggucaacggguucacgugcaccggcguggugaccgaggccgagaccuacacgaacuucgucggcuacgugaccaccaccuucaagcgcaagcacuuccggcccaugcccgacgcgugccgcacggccuacaacuggaagauggccggggacccgcgguacgaggagucccugcacaaccccuaccccgacuaccacuggcuccgcaccgugaagaccaccaaggagagccuggucaucaucucccccagcguggccgaccuggacccguacgacaagucccuccacagccggguguuccccggcgggaagugcuccggcaucacggucagcuccacgugcugcagcaccaaccacgacuacaccaucuggaugcccgagaacccccgccuggggaccuccugcgacaucuucaccaacagccggggcaagcgcgccuccaagggcgggaagaccugcggcuucguggacgagcgggggagcuacaagagccugaagggcgcgugcaagcucaagcugugcggcgugcuggggcuccgccugauggacggcaccugggucgccauccagacguccgacgagaucaaguggugcagcccggaccagcuggugaaccuccacgacuuccacuccgacgagaucgagcaccugguggucgaggagcuggugaagaagcgggaggagugccucgacgcccuggagaccaucaugaccaccaagagcguguccuuccgccggcugagccaccuccgcaagcugguccccggguucggcaaggccuacacgaucuucaacaagacccugauggaggcggacgcccacuacaaguccauccggaccuggaacgagaucauccccagcaaggggugccuccgcgugggcggccggugccacccccacgucaacgggguguucuucaacggcaucauccuggggccggacggccacgugcugauccccgagaugcaguccagccuccugcaccagcacauggagcugcucgaguccagcgucaucccccugaugcacccccuggccgacccguccaccguguucaaggacggggacgaggccgaggacuucguggagguccaccuccccgacgugcacaagcagaucagcggcguggaccugggccugcccaacugggggaagcacguccucaucuccgccggcgcgcugacggcccugaugcucaugaucuuccugaugaccugcugccgcaaggccaaccgggccgagagcauccagcacaaccccggggagaccggccgcaagguguccgugaccagccacaacgggcgggucaucuccagcugggagagcuacaaguccggcggcgagacgaagcuguga

SEQ ID NO: 95076 - RNA, 1575 nt, Artificial Sequence; identical to SEQ ID NO: 94551
  derived and/or modified CDS sequence (opt1) from glycoprotein__RABV__GQ472557.1

SEQ ID NO: 95077 - RNA, 1575 nt, Artificial Sequence
  derived and/or modified CDS sequence (opt1) from glycoprotein__RABV__GQ472558.1
auggcgccccaggcccugcuguucgugccgcugcuggccgucccccucugccugggcaaguuccccaucuacaccauccccgacaagcuggggccguggagccccaucgacauccaccaccucuccugccccaacaaccuggugguggaggacgagggcugcaccaaccugagcggguucuccuacauggagcucaaggucggcuacaucagcgccaucaaggugaacggguucacgugcaccggcguggucaccgaggccgagaccuacacgaacuucgugggcuacgugaccaccaccuucaagcgcaagcacuuccggcccacgccggacgccugccgcuccgccuacaacuggaagauggcgggggacccccgguacgaggagagccugcacaaccccuaccccgacuaccacuggcugcgcaccgucaagaccaccaaggaguccuucgugaucaucagcccguccguggccgaccucgaccccuacgacaagagccugcacucccgggucuucccccgcggcaagugcagcgggaucacgguguccagcaccuacugcuccaccaaccacgacuacaccaucuggaugcccgagaacccgcggcugggcacgagcugcgacaucuucaccaacucccgcgggaagcgggccagcaagggcuccaagaccugcggcuucguggacgagcgcgggcucuacaagagccugaagggcgccugcaagcugaagcucugcgggguccugggccugcggcucauggacggcaccuggguggcgauccagacgagcgacgagaccaaguggugcccgcccgaccagcuggugaaccugcacgacuuccacuccgacgagaucgagcaccucgucguggaggagcuggugaagaagcgcgaggagugccuggacgcccucgagagcaucaugaccaccaaguccgucagcuuccggcgccugucccaccuccggaagcucgugcccggguucggcaaggccuacacgaucuucaacaagacccugauggaggccgacgcccacuacaagagcgugcgcaccuggaacgagaucauccccuccaaggggugccugcgggucggcgggcgcugccacccccacgugaacggcgucuucuucaacggcaucauccucgggcccgacggccacgugcugauccccgagaugcagagcucccugcuccagcagcacauggagcugcuggagagcuccgugaucccgcucaugcacccccuggcggaccccagcaccgucuucaaggacggggacgaggccgaggacuucguggaggugcaccuccccgacguccacaagcaggucuccggcguggaccuggggcugccgagcuggggcaaguacgugcugauguccgccggcauccucacggcccugaugcugaccaucuuccucaugaccugcugccggcgcaccaaccgggccgagagcauccagcacucccugggggagacgggccgcaaggugagcgugaccucccagagcgggcgcgucaucagcuccugggagagcuacaaguccggcggggagaccaagcuguga

SEQ ID NO: 95078 - RNA, 1575 nt, Artificial Sequence
  derived and/or modified CDS sequence (opt1) from glycoprotein__RABV__GQ472559.1
auggccagccaggcccugcuguucgugccccugcuggcgaucccgcucugcuucggcaaguuccccaucuacaccauccccgacaagcuggggcccugguccccgaucgacauccaccaccugagcugccccaacaaccucgucguggaggacgagggcugcaccaaccuguccggguucagcuacauggagcugaaggugggcuacaucuccgccaucaaggucaacggguucacgugcaccggcguggugaccgaggccgagaccuacacgaacuucgucggcuacgugaccaccaccuucaagcgcaagcacuuccggcccacgcccgacgccugccgcagcgccuacaacuggaagauggcgggggacccgcgguacgaggagucccuccacaaccccuaccccgacuaccacuggcugcgcaccgugaagaccaccaaggagagccuggucaucaucucccccagcguggccgaccucgacccguacgacaagucccugcacagccggguguucccccgcggcaagugcuccgggaucacggucagcuccaccuacugcagcaccaaccacgacuacaccaucuggaugcccgagaacccccggcugggcacguccugcgacaucuucaccaacagccgcgggaagcgggccuccaagggcagcaagaccugcggcuucguggacgagcgcgggcucuacaagagccugaagggcgccugcaagcugaagcucugcggggugcugggccugcggcucauggacggcaccugggucgcgauccagacguccgacgagaccaaguggugcccgcccgaccagcuggugaaccugcacgacuuccacagcgacgagaucgagcaccucguggucgaggagcuggugaagaagcgcgaggagugccuggacgcccucgaguccaucaugaccaccaagagcguguccuuccggcgccugagccaccuccggaagcucguccccggguucggcaaggccuacacgaucuucaacaagacccugauggaggccgacgcccacuacaaguccgugcgcaccuggaacgagaucauccccagcaaggggugccugcgggugggcgggcgcugccacccgcacgucaacggcguguucuucaacggcaucauccucgggcccgacggccacguccugauccccgagaugcaguccagccugcuccagcagcacauggagcugcuggaguccagcgugaucccccucaugcacccgcuggcggaccccuccaccguguucaaggacggggacgaggccgaggacuucgucgaggugcaccuccccgacgugcacaagcaggucagcggcguggaccuggggcugcccuccuggggcaaguacgugcugaugagcgccggcauccucacggcccugaugcugaugaucuuccucaugaccugcugccggcgcaccaaccgggccgaguccauccagcacagccugggggagaccggccgcaaggucuccgugacgagccagagcgggcgcgugaucuccagcugggaguccuacaagagcggcggggagaccaagcuguga

SEQ ID NO: 95079 - RNA, 1575 nt, Artificial Sequence
  derived and/or modified CDS sequence (opt1) from glycoprotein__RABV__GQ472560.1
auggugccccagguccugcuguucgugccgcugcugguguucagcuccugcuucggcaaguuccccaucuacaccauccccgacaagcucgggcccuggagcccgaucgacauccaccaccuguccugccccaacaaccuggucguggaggacgagggcugcaccaaccucagcggguucuccuacauggagcugaaggugggcuacaucagcgccaucaaggucaacggguucacgugcaccggcguggugaccgaggccgagaccuacacgaacuucgucggcuacgugaccaccaccuucaagcgcaagcacuuccggcccacgcccgacgcgugccgcgccgccuacaacuggaagauggccggggacccgcgguacgaggagucccugcacaaccccuaccccgacuaccacuggcuccgcaccgugaagaccaccaaggagagccuggucaucaucucccccagcguggccgaccuggacccguacgacaagucccuccacagcggcguguuccccgggggcaagugcuccgggaucacggucagcuccacgugcugcagcaccaaccacgacuacaccaucuggaugcccgagaacccccggcugggcaccuccugcgacaucuucaccaacagccgcggcaagcgggcguccaagggcgggaagaccugcggguucguggacgagcgcggccuguacaagagccucaagggcgccugcaagcugaagcugugcggggugcucggccugcggcugauggacgggaccugggucgccauccagacgagcgacgagaucaaguggugcuccccggaccagcucgugaaccugcacgacuuccacagcgacgagaucgagcaccugguggucgaggagcucgugaagaagcgcaaggagugccuggacgcccuggagaccaucaugaccaccaaguccgugagcuuccggcgccucucccaccuccggaagcugguccccggcuucgggaaggcguacacgaucuucaacaagacccucauggaggccgacgcccacuacaagagcauccgcaccuggaacgagaucauccccuccaagggcugccugcgggugggcgggcgcugccacccccacgucaacggcguguucuucaacgggaucauccugggcccggacgggcacgugcucauccccgagaugcagagcucccugcugcaccagcacauggagcuccuggagagcuccgucaucccccugaugcacccccucgccgacccgagcaccguguucaaggacggcgacgaggccgaggacuucguggagguccaccuccccgacgugcacaagcagaucuccggcguggaccuggggcugcccaacuggggcaaguacguccugaucagcgcgggggcccugacggcccucaugcugaugaucuuccugaugaccuucugccggaaggccaaccgcgccgaguccauccagcacaaccccggcgagaccgggcggaaggugagcgugaccucccacaacggccgcgucaucagcuccugggagagcuacaagagcggcggggagacgaagcucuga

SEQ ID NO: 95080 - RNA, 1575 nt, Artificial Sequence; identical to SEQ ID NO: 94851
  derived and/or modified CDS sequence (opt1) from glycoprotein__RABV__GQ857450.1

SEQ ID NO: 95081 - RNA, 1575 nt, Artificial Sequence
  derived and/or modified CDS sequence (opt1) from glycoprotein__RABV__GQ857451.1
augaucccccaggugcugcuguucgucccgcugcugguguucagcuccugcuucggcaaguuccccaucuacaccauccccgacaagcucgggcccuggagcccgaucgacauccaccaccuguccugccccaacaaccugguggucgaggacgagggcugcaccaaccucagcggguucuccuacauggagcugaaggugggcuacaucagcgccaucaaggugaacggguucacgugcaccggcgucgugaccgaggccgagaccuacacgaacuucgugggcuacgucaccaccaccuucaagcgcaagcacuuccggcccacgcccgacgcgugccgcgccgccuacaacuggaagauggccggggacccgcgguacgaggagucccugcacaaccccuaccccgacuaccacuggcuccgcaccgugaagaccagcaaggagucccuggugaucaucagccccuccgucgccgaccuggacccguacgacaagagccuccacucccggguguuccccggcgggaagugcagcggcaucaccguguccagcacgugcugcuccaccaaccacgacuacaccaucuggaugcccgagaacccccgccugcggaccagcugcgacaucuucacgaacucccgcgggaagcgggcgagcaagggcggcaagaccugcggguucgucgacgagcgcggccuguacaagagccucaagggggccugcaagcugaagcugugcggcgugcucggccugcggcugauggacgggaccuggguggccauccagaccuccgacgagaucaaguggugcagcccggaccagcucgucaaccugcacgacuuccacuccgacgagaucgagcaccuggugguggaggagcucgucaagaagcgcgaggagugccuggacgcccuggagacgaucaugaccaccaagagcguguccuuccggcgccucagccaccuccggaagcuggugcccggcuucgggaaggcguacaccaucuucaacaagacgcucauggaggccgacgcccacuacaaguccauccgcaccuggaacgagaucauccccagcaagggcugccugcgggucgggggccgcugccacccccacgugaacggcgucuucuucaacgggaucauccugggcccggacgggcacgugcucauccccgagaugcaguccagccugcugcaccagcacauggagcuccuggaguccagcgugaucccccugaugcacccccucgccgacccguccaccgucuucaaggacggcgacgaggccgaggacuucguggaggugcaccuccccgacguccacaagcagaucagcgggguggaccugggccugcccaacuggggcaaguacgugcuggucuccgcgggggcccugaccgcccucaugcugaugaucuuccugaugacgugcugccggaagaccaaccgcgccgagagcauccagcacucccccggcgagaccgggcggaaggugagcgugaccucccacaacggccgcgucaucagcagcugggaguccuacaagagccgcggggagacgaagcucuga

SEQ ID NO: 95082 - RNA, 1575 nt, Artificial Sequence; identical to SEQ ID NO: 94851
  derived and/or modified CDS sequence (opt1) from glycoprotein__RABV__GQ857452.1

SEQ ID NO: 95083 - RNA, 1575 nt, Artificial Sequence
  derived and/or modified CDS sequence (opt1) from glycoprotein__RABV__GQ857453.1
augaucccccaggugcugcuguucgucccgcugcugguguucagcuccugcuucggcaaguuccccaucuacaccauccccgacaagcucgggcccuggagcccgaucgacauccaccaccuguccugccccaacaaccugguggucgaggacgagggcugcaccaaccucagcggguucuccuacauggagcugaaggugggcuacaucagcgccaucaaggugaacggguucacgugcaccggcgucgugaccgaggccgagaccuacacgaacuucgugggcuacgucaccaccaccuucaagcgcaagcacuuccggcccacgcccgacgcgugccgcgccgccuacaacuggaagauggccggggacccgcgguacgaggagucccugcacaaccccuaccccgacuaccacuggcuccgcaccgugaagaccagcaaggagucccuggugaucaucagccccuccgucgccgaccuggacccguacgacaagagccuccacucccggguguuccccggcgggaagugcagcggcaucaccguguccagcacgugcugcuccaccaaccacgacuacaccaucuggaugcccgagaacccccgccuggggaccagcugcgacaucuucacgaacucccggggcaagcgcgcgagcaagggcgggaagaccugcggcuucgucgacgagcgggggcuguacaagagccucaagggcgccugcaagcugaagcugugcggcgugcucgggcugcgccugauggacggcaccuggguggccauccagaccuccgacgagaucaaguggugcagcccggaccagcucgucaaccugcacgacuuccacuccgacgagaucgagcaccuggugguggaggagcucgucaagaagcgggaggagugccuggacgcccuggagacgaucaugaccaccaagagcguguccuuccgccggcucagccaccuccgcaagcuggugcccggguucggcaaggcguacaccaucuucaacaagacgcucauggaggccgacgcccacuacaaguccauccggaccuggaacgagaucauccccagcaaggggugccugcgcgucggcggccggugccacccccacgugaacggggucuucuucaacggcaucauccuggggccggacggccacgugcucauccccgagaugcaguccagccugcugcaccagcacauggagcuccuggaguccagcgugaucccccugaugcacccccucgccgacccguccaccgucuucaaggacggggacgaggccgaggacuucguggaggugcaccuccccgacguccacaagcagaucagcggcguggaccugggccugcccaacugggggaaguacgugcuggucuccgcgggcgcccugaccgcccucaugcugaugaucuuccugaugacgugcugccgcaagaccaaccggguggagagcauccagcacucccccggggagaccggccgcaaggugagcgucaccucccacaacgggcgggugaucagcagcugggaguccuacaagagcggcggcgagacgaagcucuga

SEQ ID NO: 95084 - RNA, 1575 nt, Artificial Sequence; identical to SEQ ID NO: 94851
  derived and/or modified CDS sequence (opt1) from glycoprotein__RABV__GQ857454.1

SEQ ID NO: 95085 - RNA, 1575 nt, Artificial Sequence
  derived and/or modified CDS sequence (opt1) from glycoprotein__RABV__GQ857455.1
augaucccccaggugcugcuguucgucccgcugcugguguucagcuccugcuucggcaaguuccccaucuacaccauccccgacaagcucgggcccuggagcccgaucgacauccaccaccuguccugccccaacaaccugguggucgaggacgagggcugcaccaaccucagcggguucuccuacauggagcugaaggugggcuacaucagcgccaucaaggugaacggguucacgugcaccggcgucgugaccgaggccgagaccuacacgaacuucgugggcuacgucaccaccaccuucaagcgcaagcacuuccggcccacgcccgacgcgugccgcgccgccuacaacuggaagauggccggggacccgcgguacgaggagucccugcacaaccccuaccccgacuaccacuggcuccgcaccgugaagaccagcaaggagucccuggugaucaucagccccuccgucgccgaccuggacccguacgacaagagccuccacucccggguguuccccggcgggaagugcagcggcaucaccguguccagcacgugcugcuccaccaaccacgacuacaccaucuggaugcccgagaacccccgccuggggaccagcugcgacaucuucacgaacucccggggcaagcgcgcgagcaagggcgggaagaccugcggcuucgucgacgagcgggggcuguacaagagccucaagggcgccugcaagcugaagcugugcggcgugcucgggcugcgccugauggacggcaccuggguggccauccagaccuccgacgagaucaaguggugcagcccggaccagcucgucaaccugcacgacuuccacuccgacgagaucgagcaccuggugguggaggagcucgucaagaagcgggaggagugccuggacgcccuggagacgaucaugaccaccaagagcguguccuuccgccggcucagccaccuccgcaagcuggugcccggguucggcaaggcguacaccaucuucaacaagacgcucauggaggccgacgcccacuacaaguccauccggaccuggaacgagaucauccccagcaaggggugccugcgcgucggcggccggugccacccccacgugaacggggucuucuucaacggcaucauccuggggccggacggccacgugcucauccccgagaugcaguccagccugcugcaccagcacauggagcuccuggaguccagcgugaucccccugaugcacccccucgccgacccguccaccgucuucaaggacggggacgaggccgaggacuucguggaggugcaccuccccgacguccacaagcagaucagcggcguggaccugggccugcccaacugggggaaguacgugcuggucuccgcgggcgcccugaccgcccucgugcugaugaucuuccugaugacgugcugccgcaagaccaaccgggccgagagcauccagcacucccccggggagaccggccgcaaggugagcgucaccucccacaacgggcgggugaucagcagcugggaguccuacaagagcggcggcgagacgaagcucuga

SEQ ID NO: 95086 - RNA, 1575 nt, Artificial Sequence; identical to SEQ ID NO: 94851
  derived and/or modified CDS sequence (opt1) from glycoprotein__RABV__GQ857459.1

SEQ ID NO: 95087 - RNA, 1575 nt, Artificial Sequence; identical to SEQ ID NO: 94851
  derived and/or modified CDS sequence (opt1) from glycoprotein__RABV__GQ857460.1

SEQ ID NO: 95088 - RNA, 1575 nt, Artificial Sequence
  derived and/or modified CDS sequence (opt1) from glycoprotein__RABV__GQ857461.1
augaucccccaggugcugcuguucgucccgcugcugguguucagcuccugcuucggcaaguuccccaucuacaccauccccgacaagcucgggcccuggagcccgaucgacauccaccaccuguccugccccaacaaccugguggucgaggacgagggcugcaccaaccucagcggguucuccuacauggagcugaaggugggcuacaucagcgccaucaaggugaacggguucacgugcaccggcgucgugaccgaggccgagaccuacacgaacuucgugggcuacgucaccaccaccuucaagcgcaagcacuuccggcccacgcccgacgcgugccgcgccgccuacaacuggaagauggccggggacccgcgguacgaggagucccugcacaaccccuaccccgacuaccacuggcuccgcaccgugaagaccagcaaggagucccuggugaucaucagccccuccgucgccgaccuggacccguacgacaagagccuccacucccggguguuccccggcgggaagugcagcggcaucaccguguccagcacgugcugcuccaccaaccacgacuacaccaucuggaugcccgagaacccccgccuggggaccagcugcgacaucuucacgaacucccggggcaagcgcgcgagcaagggcgggaagaccugcggcuucgucgacgagcgggggcuguacaagagccucaagggcgccugcaagcugaagcugugcggcgugcucgggcugcgccugauggacggcaccuggguggccauccagaccuccgacgagaucaaguggugcagcccggaccagcucgucaaccugcacgacuuccacuccgacgagaucgagcaccuggugguggaggagcucgucaagaagcgggaggagugccuggacgcccuggaggcgaucaugacgaccaagagcguguccuuccgccggcucagccaccuccgcaagcuggugcccggguucggcaaggccuacaccaucuucaacaagacccucauggaggccgacgcccacuacaaguccauccggacguggaacgagaucauccccagcaaggggugccugcgcgucggcggccggugccacccccacgugaacggggucuucuucaacggcaucauccuggggccggacggccacgugcucauccccgagaugcaguccagccugcugcaccagcacauggagcuccuggaguccagcgugaucccccugaugcacccccucgccgacccguccaccgucuucaaggacggggacgaggcggaggacuucguggaggugcaccuccccgacguccacaagcagaucagcggcguggaccugggccugcccaacugggggaaguacgugcuggucuccgccggcgcccugaccgcccucaugcugaugaucuuccugaugaccugcugccgcaagacgaaccgggccgagagcauccagcacucccccggggagaccggccgcaaggugagcgugaccucccacaacgggcgggucaucagcagcugggaguccuacaagagcggcggcgagaccaagcucuga

SEQ ID NO: 95089 - RNA, 1575 nt, Artificial Sequence; identical to SEQ ID NO: 94851
  derived and/or modified CDS sequence (opt1) from glycoprotein__RABV__GQ857463.1

SEQ ID NO: 95090 - RNA, 1575 nt, Artificial Sequence; identical to SEQ ID NO: 94851
  derived and/or modified CDS sequence (opt1) from glycoprotein__RABV__GQ857464.1

SEQ ID NO: 95091 - RNA, 1575 nt, Artificial Sequence
  derived and/or modified CDS sequence (opt1) from glycoprotein__RABV__GQ857465.1
augaucccccaggugcugcuguucgucccgcugcugguguucagcuccugcuucggcaaguuccccaucuacaccauccccgacaagcucgggcccuggagcccgaucgacauccaccaccuguccugccccaacaaccugguggucgaggacgagggcugcaccaaccucagcggguucuccuacauggagcugaaggugggcuacaucagcgccaucaaggugaacggguucacgugcaccggcgucgugaccgaggccgagaccuacacgaacuucgugggcuacgucaccaccaccuucaagcgcaagcacuuccggcccaugcccgacgcgugccgcgccgccuacaacuggaagauggccggggacccgcgguacgaggagucccugcacaaccccuaccccgacuaccacuggcuccgcacggugaagaccaccaaggagagccuggugaucaucucccccagcgucgccgaccuggacccguacgacaagucccuccacagccggguguuccccggcgggaagugcuccggcaucaccgugagcuccacgugcugcagcaccaaccacgacuacaccaucuggaugcccgagaacccccgccuggggaccuccugcgacaucuucacgaacagccggggcaagcgcgcguccaagggcgggaagaccugcggcuucgucgacgagcgggggcuguacaagagccuccgcggcgccugcaagcugaagcugugcggcgugcucgggcugcggcugauggacggcaccuggguggccauccagaccagcgacgagaucaaguggugcuccccggaccagcucgucaaccugcacgacuuccacagcgacgagaucgagcaccuggugguggaggagcucgucaagaagcgcgaggagugccuggacgcccuggagacgaucaugaccaccaaguccgugagcuuccggcgccucucccaccuccggaagcuggugcccggguucggcaaggcguacaccaucuucaacaagacgcucauggaggccgacgcccacuacaagagcauccgcaccuggaacgagaucauccccuccaaggggugccugcgggucggcggccgcugccacccccacgugaacggggucuucuucaacggcaucauccuggggccggacggccacgugcucauccccgagaugcagagcucccugcugcaccagcacauggagcuccuggagagcuccgugaucccccugaugcacccccucgccgacccgagcaccgucuucaaggacggggacgaggccgaggacuucguggaggugcaccuccccgacguccacaagcagaucuccggcguggaccugggccugcccaacugggggaaguacgugcugaucagcgcgggcgcccugaccgcccucaugcugacgaucuuccugaugaccugcugccggaagaccaaccgcgccgaguccauccagcacagccccggggagaccggccggaaggucuccgugacgagccacaacgggcgcgugaucuccagcugggagagcuacaaguccggcagcgagaccaagcucuga

SEQ ID NO: 95092 - RNA, 1575 nt, Artificial Sequence
  derived and/or modified CDS sequence (opt1) from glycoprotein__RABV__GQ857466.1
augaucccccaggugcugcuguucgucccgcugcugguguucagcuccugcuucggcaaguuccccaucuacaccauccccgacaagcucgggcccuggagcccgaucgacauccaccaccuguccugccccaacaaccugguggucgaggacgagggcugcaccaaccucagcggguucuccuacauggagcugaaggugggcuacaucagcgccaucaaggugaacggguucacgugcaccggcgucgugaccgaggccgagaccuacacgaacuucgugggcuacgucaccaccaccuucaagcgcaagcacuuccggcccaugcccgacgcgugccgcgccgccuacaacuggaagauggccggggacccgcgguacgaggagucccugcacaaccccuaccccgacuaccacuggcuccgcacggugaagaccaccaaggagagccuggugaucaucucccccagcgucgccgaccuggacccguacgacaagucccuccacagccggguguuccccggcgggaagugcuccggcaucaccgugagcuccacgugcugcagcaccaaccacgacuacaccaucuggaugcccgagaacccccgccuggggaccuccugcgacaucuucacgaacagccggggcaagcgcgcguccaacggcgggaagaccugcggcuucgucgacgagcgggggcuguacaagagccucaagggcgccugcaagcugaagcugugcggcgugcucgggcugcgccugauggacggcaccuggguggccauccagaccagcgacgagaucaaguggugcuccccggaccagcucgucaaccugcacgacuuccacagcgacgagaucgagcaccuggugguggaggagcucgucaagaagcgggaggagugccuggacgcccuggagacgaucaugaccaccaaguccgugagcuuccgccggcucucccaccuccgcaagcuggugcccggguucggcaaggcguacaccaucuucaacaagacgcucauggaggccgacgcccacuacaagagcauccggaccuggaacgagaucauccccuccaaggggugccugcgcgucggcggccggugccacccccacgugaacggggucuucuucaacggcaucauccuggggccggacggccacgugcucauccccgagaugcagagcucccugcugcaccagcacauggagcuccuggagagcuccgugaucccccugaugcacccccucgccgacccgagcaccgucuucaaggacggggacgaggccgaggacuucguggaggugcaccuccccgacguccacaagcagaucuccggcaucgaccugggccugcccaacugggggaaguacgugcugaucagcgcgggcgcccugaccgcccucaugcugacgaucuuccugaugaccugcugccgcaagaccaaccgggccgaguccauccagcacagccccggggagaccggccgcaagguguccgucacgagccacaacgggcgggugaucuccagcugggagagcuacaaguccggcagcgagaccaagcucuga

SEQ ID NO: 95093 - RNA, 1575 nt, Artificial Sequence
  derived and/or modified CDS sequence (opt1) from glycoprotein__RABV__GQ857467.1
augaucccccaggugcugcuguucgucccgcugcugguguucagcuccugcuucggcaaguuccccaucuacaccauccccgacaagcucgggcccuggagcccgaucgacauccaccaccuguccugccccaacaaccugguggucgaggacgagggcugcaccaaccucagcggguucuccuacauggagcugaaggugggcuacaucagcgccaucaaggugaacggguucacgugcaccggcgucgugaccgaggccgagaccuacacgaacuucgugggcuacgucaccaccaccuucaagcgcaagcacuuccggcccaugcccgacgcgugccgcgccgccuacaacuggaagauggccggggacccgcgguacgaggagucccugcacaaccccuaccccgacuaccacuggcuccgcacggugaagaccaccaaggagagccuggugaucaucucccccagcgucgccgaccuggacccguacgacaagucccuccacagccggguguuccccggcgggaagugcuccggcaucaccgugagcuccacgugcugcagcaccaaccacgacuacaccaucuggaugcccgagaacccccgccuggggaccuccugcgacaucuucacgaacagccggggcaagcgcgcguccaaguggggcaagaccugcggguucgucgacgagcggggccuguacaagagccucaagggggccugcaagcugaagcugugcggcgugcucggccugcgccugauggacgggaccuggguggccauccagaccagcgacgagaucaaguggugcuccccggaccagcucgucaaccugcacgacuuccacagcgacgagaucgagcaccuggugguggaggagcucgucaagaagcgggaggagugccuggacgcccuggagacgaucaugaccaccaaguccgugagcuuccgccggcucucccaccuccgcaagcuggugcccggcuucgggaaggcguacaccaucuucaacaagacgcucauggaggccgacgcccacuacaagagcauccggaccuggaacgagaucauccccuccaagggcugccugcgcgucgggggccggugccacccccacgugaacggcgucuucuucaacgggaucauccugggcccggacgggcacgugcucauccccgagaugcagagcucccugcugcaccagcacauggagcuccuggagagcuccgugaucccccugaugcacccccucgccgacccgagcaccgucuucaaggacggcgacgaggccgaggacuucguggaggugcaccuccccgacguccacaagcagaucuccgggguggaccugggccugcccaacuggggcaaguacgugcugaucagcgcgggggcccugaccgcccucaugcugacgaucuuccugaugaccugcugccgcaagaccaaccgggccgaguccauccagcacagccccggcgagaccgggcgcaaggucuccgugacgagccacaacggccgggugaucuccagcugggagagcuacaaguccgggagcgagaccaagcucuga

SEQ ID NO: 95094 - RNA, 1575 nt, Artificial Sequence
  derived and/or modified CDS sequence (opt1) from glycoprotein__RABV__GQ857470.1
augaucccccaggugcuccuguucgucccgcugcugguguucagcuccugcuucggcaaguuccccaucuacaccauccccgacaagcucgggcccuggagcccgaucgacauccaccaccuguccugccccaacaaccugguggucgaggacgagggcugcaccaaccucagcggguucuccuacauggagcugaaggugggcuacaucagcgccaucaaggugaacggguucacgugcaccggcgucgugaccgaggccgagaccuacacgaacuucgugggcuacgucaccaccaccuucaagcgcaagcacuuccggcccaugcccgacgcgugccgcgccgccuacaacuggaagauggccggggacccgcgguacgaggagucccugcacaaccccuaccccgacuaccacuggcuccgcacggugaagaccaccaaggagagccuggugaucaucucccccagcgucgccgaccuggacccguacgacaagucccuccacagccggguguuccccggcgggaagugcuccggcaucaccgugagcuccacgugcugcagcaccaaccacgacuacaccaucuggaugcccgagaacccccgccuggggaccuccugcgacaucuucacgaacagccggggcaagcgcgcguccaagggcgggaagaccugcggcuucgucgacgagcgggggcuguacaagagccucaagggcgccugcaagaugaagcugugcggcgugcuggggcuccgccugauggacggcaccuggguggccauccagaccagcgacgagaucaaguggugcuccccggaccagcuggucaaccuccacgacuuccacagcgacgagaucgagcaccuggugguggaggagcuggucaagaagcgggaggagugccucgacgcccuggagacgaucaugaccaccaaguccgugagcuuccgccggcugucccaccuccgcaagcuggugcccggguucggcaaggcguacaccaucuucaacaagacgcugauggaggccgacgcccacuacaagagcauccggaccuggaacgagaucauccccuccaaggggugccuccgcgucggcggccggugccacccccacgugaacggggucuucuucaacggcaucauccuggggccggacggccacgugcugauccccgagaugcagagcucccuccugcaccagcacauggagcugcucgagagcuccgugaucccccugaugcacccccuggccgacccgagcaccgucuucaaggacggggacgaggccgaggacuucguggaggugcaccuccccgacguccacaagcagaucuccggcguggaccugggccugcccaacugggggaaguacgugcucaucagcgcgggcgcccugaccgcccugaugcucacgaucuuccugaugaccugcugccgcaagaccaacaaggccgaguccauccagcacagccccggggagaccggccggaaggucuccgugacgagccacaacgggcgcgugaucuccagcugggagagcuacaaguccggcagcgagaccaagcuguga

SEQ ID NO: 95095 - RNA, 1575 nt, Artificial Sequence
  derived and/or modified CDS sequence (opt1) from glycoprotein__RABV__GQ857471.1
augaucccccaggugcugcuguucgucccgcugcugguguucagcuccugcuucggcaaguuccccaucuacaccauccccgacaagcucgggcccuggagcccgaucgacauccaccaccuguccugccccaacaaccugguggucgaggacgagggcugcaccaaccucagcggguucuccuacauggagcugaaggugggcuacaucagcgccaucaaggugaacggguucacgugcaccggcgucgugaccgaggccgagaccuacacgaacuucgugggcuacgucaccaccaccuucaagcgcaagcacuuccggcccaugcccgacgcgugccgcgccgccuacaacuggaagauggccggggacccgcgguacgaggagucccugcacaaccccuaccccgacuaccacuggcuccgcacggugaagaccagcaaggagucccuggugaucaucagccccuccgucgccgaccuggacccguacgacaagagccuccacucccggguguuccccggcgggaagugcagcggcaucaccguguccagcacgugcugcuccaccaaccacgacuacaccaucuggaugcccgagaacccccgccuggggaccagcugcgacaucuucaccaacucccggggcaagcgcgcgagcaagggcgggaagacgugcggcuucgucgacgagcgggggcuguacaagagccucaagggcgccugcaagcugaagcugugcggcgugcucgggcugcgccugauggacggcaccuggguggccauccagaccuccgacgagaucaaguggugcagcccggaccagcucgucaaccugcacgacuuccacuccgacgagaucgagcaccuggugguggaggagcucgucaagaagcgggaggagugccuggacgcccuggagaccaucaugacgaccaagagcguguccuuccgccggcucagccaccuccgcaagcuggugcccggguucggcaaggcguacaccaucuucaacaagacccucauggaggccgacgcccacuacaaguccauccggacguggaacgagaucauccccagcaaggggugccugcgcgucggcggccggugccacccccacgugaacggggucuucuucaacggcaucauccuggggccggacggccacgugcucauccccgagaugcaguccagccugcugcaccagcacauggagcuccuggaguccagcgugaucccccugaugcacccccucgccgacccguccaccgucuucaaggacggggacgaggccgaggacuucguggaggugcaccuccccgacguccacaagcagaucagcggcguggaccugggccugcccaacugggggaaguacgugcugaucuccgcgggcgcccugaccgcccucaugcugaugaucuuccugaugaccugcugccgcaagacgaaccgggccgagagcauccagcacucccccggggagaccggccgcaaggucagcgugaccucccacagcgggcgggugaucagcuccugggagagcuacaaguccggcggcgagaccaagcucuga

SEQ ID NO: 95096 - RNA, 1575 nt, Artificial Sequence
  derived and/or modified CDS sequence (opt1) from glycoprotein__RABV__GQ857472.1
augaucccccaggugcuccuguucgucccgcugcugguguucagcuccugcuucggcaaguuccccaucuacaccauccccgacaagcucgggcccuggagcccgaucgacauccaccaccuguccugccccaacaaccugguggucgaggacgagggcugcaccaaccucagcggguucuccuacauggagcugaaggugggcuacaucagcgccaucaaggugaacggguucacgugcaccggcgucgugaccgaggccgagaccuacacgaacuucgugggcuacgucaccaccaccuucaagcgcaagcacuuccggcccaugcccgacgcgugccgcgccgccuacaacuggaagauggccggggacccgcgguacgaggagucccugcacaaccccuaccccgacuaccacuggcuccgcacggugaagaccagcaaggagucccuggugaucaucagccccuccgucgccgaccuggacccguacgacaagagccuccacucccggguguuccccggcgggaagugcagcggcaucaccguguccagcacgugcugcuccaccaaccacgacuacaccaucuggaugcccgagaacccccgccuggggaccagcugcgacaucuucaccaacucccggggcaagcgcgcgagcaagggcgggaagacgugcggcuucgucgacgagcgggggcuguacaagagccucaagggcgccugcaagaugaagcugugcggcgugcuggggcuccgccugauggacggcaccuggguggccauccagaccuccgacgagaucaaguggugcagcccggaccagcuggucaaccuccacgacuuccacuccgacgagaucgagcaccuggugguggaggagcuggucaagaagcgggaggagugccucgacgcccuggagaccaucaugacgaccaagagcguguccuuccgccggcugagccaccuccgcaagcuggugcccggguucggcaaggcguacaccaucuucaacaagacccugauggaggccgacgcccacuacaaguccauccggacguggaacgagaucauccccagcaaggggugccuccgcgucggcggccggugccacccccacgugaacggggucuucuucaacggcaucauccuggggccggacggccacgugcugauccccgagaugcaguccagccuccugcaccagcacauggagcugcucgaguccagcgugaucccccugaugcacccccuggccgacccguccaccgucuucaaggacggggacgaggccgaggacuucguggaggugcaccuccccgacguccacaagcagaucagcggcguggaccugggccugcccaacugggggaaguacgugcucaucuccgcgggcgcccugaccgcccugaugcucaugaucuuccugaugaccugcugccgcaagacgaaccgggccgagagcauccagcacucccccggggagaccggccgcaaggucagcgugaccucccacaacgggcgggugaucagcagcugggaguccuacaagagcggcggcgagaccaagcuguga

SEQ ID NO: 95097 - RNA, 1575 nt, Artificial Sequence
  derived and/or modified CDS sequence (opt1) from glycoprotein__RABV__GQ918139.1
auggugccccagguccugcuguucgugcugcugcucggcuucagccugugcuucgggaaguucccgaucuacaccauccccgacgagcugggccccuggucccccaucgacauccaccaccucagcugcccgaacaaccugguggucgaggacgaggggugcaccaaccuguccgaguucagcuacauggagcucaaggugggcuacaucuccgccaucaaggugaacggguucacgugcaccggcgucgugaccgaggccgagaccuacacgaacuucgugggcuacgucaccaccaccuucaagcgcaagcacuuccggcccacgcccgacgcgugccgcgccgccuacaacuggaagauggccggggacccccgguacgaggagagccugcacaacccguaccccgacuaccacuggcugcgcaccgugcggaccaccaaggagucccucaucaucaucagccccuccgugacggaccuggaccccuacgacaagagccugcacucccgcgucuucccgggcgggaagugcagcggcaucaccguguccagcaccuacugcuccaccaaccacgacuacacgaucuggaugcccgagaacccccggccccgcaccccgugcgacaucuucaccaacagccgggggaagcgcgccuccaacggcaacaagaccugcggcuucguggacgagcgggggcucuacaagagccugaagggcgcgugccgccugaagcucugcgggguccugggccugcggcucauggacggcacguggguggccaugcagaccuccgacgagaccaaguggugcccgcccgaccagcuggugaaccugcacgacuuccgcagcgacgagaucgagcaccucgucguggaggagcuggugaagaagcgggaggagugccuggacgcccucgagagcaucaugaccacgaaguccgucagcuuccgccggcugucccaccuccgcaagcucgugcccggguucggcaaggccuacaccaucuucaacaagacccugauggaggcggacgcccacuacaagagcgugcggaccuggaacgagaucauccccuccaaggggugccugaaggucggcgggcgcugccacccccacgugaacggcgucuucuucaacggcaucauccucgggcccgacgaccacgugcugauccccgagaugcagagcucccugcuccagcagcacauggagcugcucaagagcuccgugaucccgcugaugcacccccuggccgaccccagcacggucuucaaggagggcgacgaggccgaggacuucguggaggugcaccuccccgacgucuacaagcagaucuccgggguggaccugggccugccgaacugggggaaguacgugcugaugaccgccggcgcgaugaucggccucguccugaucuucagccugaugaccuggugccggcgcgccaaccgccccgaguccaagcagcggagcuucgggggcaccgggggcaacguguccgugacgagccaguccgggaaggucauccccagcugggaguccuaccgcagcggcggcgagauccggcucuga

SEQ ID NO: 95098 - RNA, 1575 nt, Artificial Sequence
  derived and/or modified CDS sequence (opt1) from glycoprotein__RABV__GU186379.1
auggugccccaggcccugcuguucgucccgcugcuggccgugccccucugcuucggcaaguuccccaucuacaccauccccgacaagcuggggccguggagccccaucgacauccaccaccuguccugccccaacaaccucguggucgaggacgagggcugcaccaaccugagcggguucuccuacauggagcugaaggugggcuacaucagcgcgaucaaggugaacggguucacgugcaccggcgucgugaccgaggccgagaccuacacgaacuucgugggcuacgucaccaccaccuucaagcgcaagcacuuccggcccacgccggacgccugccgcuccgccuacaacuggaagauggccgggggcccccgguacgaggagagccuccacaaccccuaccccgacuaccacuggcugcgcaccgugaagaccaccaaggaguccuucgugaucaucagcccguccauggcggaccuggaccccuacgacaagagccuccacucccgggucuucccccgcgggaagugcagcggcaucacgguguccagcaccuacugcuccaccaaccacgacuacaccaucuggaugcuggagaacccccggcuggggacgagcugcgacaucuucaccaacucccgcggcaagcgggccagcaagggcuccaagaccugcggguucguggacgagcgcggccucuacaagagccugaagggggccugcaagcugaagcucugcggcguccugggccugcggcucauggacgggaccuggguggccauccagacgagcgacgagaccaaguggugcccgcccgaccagcuggugaaccugcacgacuuccacuccgacgagaucgagcaccucgucguggaggagcuggugaagaagcgcgaggagugccugggcgcgcucgagagcaucaugaccaccaaguccgucagcuuccggcgccugucccaccuccggaagcucgugcccggguucggcaaggccuacacgaucuucaacaagacccugauggaggccgacgcccacuacaagagcgugcgcaccuggaacgagaucauccccuccaaggggugccugcgggucggcggccgcugccacccgcacgugaacggggucuucuucaacggcaucauccucgggcccgacggccacgugcugauccccgagaugcagagcucccugcuccagcagcacauggagcugcuggagagcuccgugaucccccucaugcacccgcuggccgaccccagcaccgucuucaaggacggggacgaggcggaggacuucguggaggugcaccuccccgacguccacaagcaggucuccggcguggaccugggccugcccagcugggggaaguacgugcugauguccgccggcauccucacggcccugaugcugaugaucuuccucaugaccugcugccggcgcaccaaccgggccgagagcauccagcacucccugggggagaccggccgcaaggugagcgugacgucccagaacgggcgcgucaucagcagcugggaguccuacaagagcggcggcgagaccaagcuguga

SEQ ID NO: 95099 - RNA, 1575 nt, Artificial Sequence
  derived and/or modified CDS sequence (opt1) from glycoprotein__RABV__GU186380.1
auggugccccaggcccugcuguucgucccgcugcuggccgugccccucugcuucggcaaguuccccaucuacaccauccccgacaagcuggggccguggagccccaucgacauccaccaccuguccugccccaacaaccucguggucgaggacgagggcugcaccaaccugagcggguucuccuacauggagcugaaggugggcuacaucagcgcgaucaaggugaacggguucacgugcaccggcgucgugaccgaggccgagaccuacacgaacuucgugggcuacgucaccaccaccuucaagcgcaagcacuuccggcccacgccggacgccugccgcuccgccuacaacuggaagauggccggggacccccgguacgaggagagccuccacaaccccuaccccgacuaccacuggcugcgcaccgugaagaccaccaaggaguccuucgugaucaucagcccguccgucgcggaccuggaccccuacgacgagagccuccacucccggguguucccccgcggcaagugcagcgggaucacgguguccagcaccuacugcuccaccaaccacgacuacaccaucuggaugcccgagaacccgcggcugggcacgagcugcgacaucuucaccaacucccgcgggaagcgggccagcaagggcuccaagaccugcggcuucgucgacgagcgcgggcuguacaagagccucaagggcgccugcaagcugaagcugugcggggugcucggccugcggcugauggacggcaccuggguggccauccagacgagcgacgagaccaaguggugcccgcccgaccagcucgcgaaccugcacgacuuccacuccgacgagaucgagcaccuggucguggaggagcucgugcgcaagcgggaggagugccuggacgcccuggagagcaucaugaccaccaaguccgucagcuuccgccggcucucccaccuccgcaagcuggugcccggguucggcaaggccuacacgaucuucaacaagacccucauggaggccgacgcccacuacaagagcgugcggaccuggaacgagaucauccccuccaaggggugccugcgcgucggcgggcggugccacccccacgugaacggcgucuucuucaacggcaucauccuggggcccgacggccacgugcucauccccgagaugcagagcucccugcugcagcagcacauggagcuccuggagagcuccgugaucccgcugaugcacccccucgcggaccccagcaccgucuucaaggacggggacgaggccgaggacuucguggaggugcaccuccccgacguccacaagcaggucuccggcguggaccuggggcugccgagcuggggccgcuacgugcugauguccgccggcauccugacggcccucaugcugaugaucuuccugaugaccugcugccggcgcaccaaccgcgccaagagcauccagcacucccucggggagaccggccggaaggugagcgugacgucccagaacgggcgcgucaucagcagcugggaguccuacaagagcggcggggagaccaagcuguga

SEQ ID NO: 95100 - RNA, 1575 nt, Artificial Sequence; identical to SEQ ID NO: 94863
  derived and/or modified CDS sequence (opt1) from glycoprotein__RABV__GU186381.1

SEQ ID NO: 95101 - RNA, 1575 nt, Artificial Sequence
  derived and/or modified CDS sequence (opt1) from glycoprotein__RABV__GU186382.1
augaucccccaggugcugcuguucgucccgcugcugguguucagcuccugcuucggcaaguuccccaucuacaccauccccgacaagcucgggcccuggagcccgaucgacauccaccaccuguccugccccaacaaccugguggucgaggacgagggcugcaccaaccucagcggguucuccuacauggagcugaaggugggcuacaucagcgccaucaaggugaacggguucacgugcaccggcgucgugaccgaggccgagaccuacacgaacuucgugggcuacgucaccaccaccuucaagcgcaagcacuuccggcccaugcccgacgcgugccgcgccgccuacaacuggaagauggccggggacccgcgguacgaggagucccugcacaaccccuaccccgacuaccacuggcuccgcacggugaagaccaccaaggagagccuggugaucaucucccccagcgucgccgaccuggacccguacgacaagucccuccacagccggguguuccccggcgggaagugcuccggcaucaccgugagcuccacgugcugcagcaccaaccacgacuacaccaucuggaugcccgagaacccccgccuggggaccuccugcgacaucagcacgaacucccggggcaagcgcgcgagcaagggcgggaagaccugcggcuucgucgacgagcgggggcuguacaagagccucaagggcgccugcaagcugaagcugugcggcgugcucgggcugcgccugauggacggcaccuggguggccauccagaccuccgacgagaucaaguggugcagcccggaccagcucgucaaccugcacgacuuccacuccgacgagaucgagcaccuggugguggaggagcucgucaagaagcgggaggagugccuggacgcccuggagacgaucaugaccaccaagagcguguccuuccgccggcucagccaccuccgcaagcuggugcccggguucggcaaggcguacaccaucuucaacaagacgcucauggaggccgacgcccacuacaaguccauccggaccuggaacgagaucauccccagcaaggggugccugcgcgucggcggccggugccacccccacgugaacggggucuucuucaacggcaucauccuggggccggacggccacgugcucauccccgagaugcaguccagccugcugcaccagcacauggagcuccuggaguccagcgugaucccccugaugcacccccucgccgacccguccaccgucuucaaggacggggacgaggccgaggacuucguggaggugcaccuccccgacguccacaagcagaucagcggcguggaccugggcccgcccaacugggggaaguacgugcugaucuccgcgggcgcccugaccgcccugaugagcaugaucuuccucaugacgugcugccgcaagaccaaccgggccgaguccauccagcacagccccggggagaccggccgcaaggucuccgugaccagccacaacgggcgggugaucagcuccugggagagcuacaaguccggcggcgagacgaagcuguga

SEQ ID NO: 95102 - RNA, 1575 nt, Artificial Sequence
  derived and/or modified CDS sequence (opt1) from glycoprotein__RABV__GU186383.1
augaucccccaggugcugcuguucgucccgcugcugguguucagcuccugcuucggcaaguuccccaucuacaccauccccgacaagcucgggcccuggagcccgaucgacauccaccaccuguccugccccaacaaccugguggucgaggacgagggcugcaccaaccucagcggguucuccuacauggagcugaaggugggcuacaucagcgccaucaaggugaacggguucacgugcaccggcgucgugaccgaggccgagaccuacacgaacuucgugggcuacgucaccaccaccuucaagcgcaagcacuuccggcccaugcccgacgcgugccgcgccgccuacaacuggaagauggccggggacccgcgguacgaggagucccugcacaaccccuaccccgacuaccacuggcuccgcacggugaagaccaccaaggagagccuggugaucaucucccccagcgucgccgaccuggacccguacgacaagucccuccacagccggguguuccccggcgggaagugcuccggcaucaccgugagcuccacgugcugcagcaccaaccacgacuacaccaucuggaugcccgagaacccccgccuggggaccuccugcgacaucuucacgaacagccggggcaagcgcgcguccaagggcgggaagaccugcggcuucgucgacgagcgggggcuguacaagagccucaagggcgccugcaagcugaagcugugcggcgugcucgggcugcgccugauggacggcaccuggguggccauccagaccagcgacgagaucaaguggugcuccccggaccagcucgucaaccugcacgacuuccacagcgacgagaucgagcaccuggugguggaggagcucgucaagaagcgggaggagugccuggacgcccuggagacgaucaugaccaccaaguccgugagcuuccgccggcucucccaccuccgcgagcuggugcccggguucggcaaggcguacaccaucuucaacaagacgcucauggaggccgacgcccacuacaagagcauccggaccuggaacgagaucauccccuccaaggggugccugcgcgucggcggccggugccacccccacgugaacggggucuucuucaacggcaucauccuggggccggacggccacgugcucauccccgagaugcagagcucccugcugcaccagcacauggagcuccuggagagcuccgugaucccccugaugcacccccucgccgacccgagcaccgucuucaaggacggggacgaggccgaggacuucguggaggugcaccuccccgacguccacaagcagaucuccggcguggaccugggccugcccaacugggggaaguacgugcugaucagcgcgggcgcccugaccgcccucaucuccaugaucuuccugaugacgugcugccgcaagaccaaccgggccgagagcauccagcacucccccggggagaccggccgcaaggucagcgugaccucccacaacgggcgggugaucagcagcugggaguccuacaagagcggcggcgagacgaagcuguga

SEQ ID NO: 95103 - RNA, 1575 nt, Artificial Sequence
  derived and/or modified CDS sequence (opt1) from glycoprotein__RABV__GU186384.1
augaucccccaggugcugcuguucgucccgcugcugguguucagcuccugcuucggcaaguuccccaucuacaccauccccgacaagcucgggcccuggagcccgaucgacauccaccaccuguccugccccaacaaccugguggucgaggacgagggcugcaccaaccucagcggguucuccuacauggagcugaaggugggcuacaucagcgccaucaaggugaacggguucacgugcaccggcgucgugaccgaggccgagaccuacacgaacuucgugggcuacgucaccaccaccuucaagcgcaagcacuuccggcccaugcccgacgcgugccgcgccgccuacaacuggaagauggccggggacccgcgguacgaggagucccugcacaaccccuaccccgacuaccacuggcuccgcacggugaagaccaccaaggagagccuggugaucaucucccccagcgucgccgaccuggacccguacgacaagucccuccacagccggguguuccccggcgggaagugcuccggcaucaccgugagcuccacgugcugcagcaccaaccacgacuacaccaucuggaugcccgagaacccccgccuggggaccuccugcgacaucuucacgaacagccggggcaagcgcgcguccaagggcgggaagaccugcggcuucgucgacgagcgggggcuguacaagagccucaagggcgccugcaagcugaagcugugcggcgugcucgggcugcgccugauggacggcaccuggguggccauccagaccagcgacgagaucaaguggugcuccccggaccagcucgucaaccugcacgacuuccacagcgacgagaucgagcaccuggugguggaggagcucgucaagaagcgggaggagugccuggacgcccuggagacgaucaugaccaccaaguccgugagcuuccgccggcucucccaccuccgcaagcuggugcccggguucggcaaggcguacaccaucuucaacaagacgcucauggaggccgacgcccacuacaagagcauccggaccuggaacgagaucauccccuccaaggggugccugcgcgucggcggccggugccacccccacgugaacggggucuucuucaacggcaucauccuggggccggacggccacgugcucauccccgagaugcagagcucccugcugcaccagcacauggagcuccuggagagcuccgugaucccccugaugcacccccucgccgacccgagcaccgucuucaaggacggggacgaggccgaggacuucguggacgugcaccuccccgacguccacaagcagaucuccggcguggaccugggccugcccaacugggggaaguacgugcugaucagcgcgggcgcccugaccgcccucaugcugaugaucuuccugaugacgugcugccgcaaggccaaccgggccgaguccauccagcacaaccccgggggcaccgggcgcaaggucagcgugaccucccacaacggccgggugaucagcuccugggagagcuacaagagcggcggggagaccaagcucuga

SEQ ID NO: 95104 - RNA, 1575 nt, Artificial Sequence
  derived and/or modified CDS sequence (opt1) from glycoprotein__RABV__GU186385.1
augaucccccaggugcuccuguucgucccgcugcugguguucagcuccugcuucggcaaguuccccaucuacaccauccccgacaagcucgggcccuggagcccgaucgacauccaccaccuguccugccccaacaacaugguggucgaggacgagggcugcaccaaccugagcggguucuccuacauggagcucaaggugggcuacaucagcgccaucaaggugaacggguucacgugcaccggcgucgugaccgaggccgagaccuacacgaacuucgugggcuacgucaccaccaccuucaagcgcaagcacuuccggcccaugcccgacgcgugccgcgccgccuacaacuggaagauggccggggacccgcgguacgaggagucccugcacaaccccuaccccgacuaccacuggcugcgcacggugaagaccaccaaggagagccucgugaucaucucccccagcgucgccgaccuggacccguacgacaagucccugcacagccggguguuccccggcgggaagugcuccggcaucaccgugagcuccacgugcugcagcaccaaccacgacuacaccaucuggaugcccgagaacccccgccucgggaccuccugcgacaucuucacgaacagccggggcaagcgcgcguccaagggcgggaagaccugcggcuucgucgacgagcgggggcuguacaagagccugaagggcgccugcaagcucaagcugugcggcgugcuggggcuccgccugauggacggcaccuggguggccauccagaccagcgacgagaucaaguggugcuccccggaccagcuggucaaccuccacgacuuccacagcgacgagaucgagcaccuggugguggaggagcuggucaagaagcgggaggagugccucgacgcccuggagacgaucaugaccaccaaguccgugagcuuccgccggcugucccaccuccgcaagcuggugcccggguucggcaaggcguacaccaucuucaacaagacgcugauggaggccgacgcccacuacaagagcauccggaccuggaacgagaucauccccuccaaggggugccuccgcgucggcggccggugccacccccacgugaacggggucuucuucaacggcaucauccuggggccggacggccacgugcugauccccgagaugcagagcucccuccugcaccagcacauggagcugcucgagagcuccgugaucccccugaugcacccccuggccgacccgagcaccgucuucaaggacggggacgaggccgaggacuucguggaggugcaccuccccgacguccacaagcagaucuccggcguggaccugggccugcccaacugggggaaguacgugcucaucagcgcgggcgcccugaccgcccugaugcucacgaucuuccugaugaccugcugccgcaagaccucccgggccgagagcauccagcacucccccggggagaccggccgcaaggucagcgugacgucccacaacgggcgggugaucagcagcugggaguccuacaagagcggcggcgagaccaagcuguga

SEQ ID NO: 95105 - RNA, 1575 nt, Artificial Sequence
  derived and/or modified CDS sequence (opt1) from glycoprotein__RABV__GU186386.1
auggugccccaggcccugcuguucgucccgcugcuggccgugccccucugcuucggcaaguuccccaucuacaccauccccgacaagcuggggccguggagccccaucgacauccaccaccuguccugccccaacaaccucguggucgaggacgagggcugcaccaaccugagcggguucuccuacauggagcugaaggugggcuacaucagcgcgaucaaggugaacggguucacgugcaccggcgucgugaccgaggccgagaccuacacgaacuucgugggcuacgucaccaccaccuucaagcgcaagcacuuccggcccacgccggacgccugccgcuccgccuacaacuggaagauggccggggacccccgguacgaggagagccuccacaaccccuaccccgacuaccacuggcugcgcaccgugaagaccaccaaggaguccuucgugaucaucagcccguccgucgcggaccuggaccccuacgacaagagccuccacucccggguguucccccgcggcaagugcagcgggaucacgguguccagcaccuacugcuccaccaaccacgacuacaccaucuggaugcccgagaacccgcggcugggcacgagcugcgacaucuucaccaacucccgcgggaagcgggccagcaagggcuccaagaccugcggcuucgucgacgagcgcgggcuguacaagagccucaagggcgccugcaagcugaagcugugcggggugcucggccugcggcugauggacggcaccuggguggccauccagacgagcgacgagaccaaguggugcccgcccgaccagcucgucaaccugcacgacuuccacuccgacgagaucgagcaccuggugguggaggagcucgucaagaagcgcgaggagugccuggacgcgcuggagagcaucaugaccaccaaguccgugagcuuccggcgccucucccaccuccggaagcuggugcccggguucggcaaggccuacacgaucuucaacaagacccucauggaggccgacgcccacuacaagagcguccgcaccuggaacgagaucauccccuccaaggggugccugcgggugggcgggcgcugccacccccacgucaacggcguguucuucaacggcaucauccuggggcccgacggccacgugcucauccccgagaugcagagcucccugcugcagcagcacauggagcuccuggagagcuccgucaucccgcugaugcacccccucgccgaccccagcaccguguucaaggacggggacgaggcggaggacuucguggagguccaccuccccgacgugcacaagcaggucuccggcguggaccuggggcugccgagcuggggcaaguacgugcugauguccgccggcauccugacggcccucaugcugaugaucuuccugacgaccugcugccggcgcaccaaccgggccgagagcauccagcacucccucggggagaccggccgcaaggugagcgucaccucccagaacgggcgcgugaucagcagcugggaguccuacaagagcggcggggagaccaagcuguga

SEQ ID NO: 95106 - RNA, 1575 nt, Artificial Sequence
  derived and/or modified CDS sequence (opt1) from glycoprotein__RABV__GU186387.1
augaucccccaggcccugcuguucgugccgcugcuggucuucagccucugcuucggcaaguuccccguguacgccauccccgacaagcuggggcccugguccccgaucgacauccaccaccugagcugccccaacaaccucguggucgaggacgagggcugcaccaaccuguccggguucagcuacauggagcugaaggugggcuacaucuccgcgaucaaggugaacggguucacgugcaccggcgucgugaccgaggccgagaccuacaccaacuucaucggcuacgugacgaccaccuucaagcgcaagcacuuccggcccacccccgacgccugccgcgccgccuacaacuggaagauggcgggggacccgcgguacgaggagagccuccacaaccccuaccccgacuaccacuggcugcgcacggucaagaccaccaaggagucccugguggugaucagccccuccgucgccgaccucgacccguacgacaagagccugcacucccggguguuccccagcggcaagugcuccgggaucaccgugagcuccacgugcugcagcaccaaccacgacuacaccaucuggaugcccgagaacccccgccugggcaccuccugcgacaucuucgucaacagccgggggaagcgcgccuccaagggcagcaagacgugcggcuucguggacgagcgggggcucuacaagagccugaagggcgccugcaagcugaagcucugcggggugcugggccugcgccucauggacggcaccugggucgcgauccagaccuccgacgagaccaaguggugcccgcccgaccagcuggugaaccugcacgacuuccggagcgacgagaucgagcaccucguggucgaggagcuggugaagaagcgcgaggagugccuggacgcccucgaguccaucaugacgaccaagagcguguccuuccggcgccugagccaccuccggaagcucguccccggguucggcaaggccuacaccaucuucaacaagacccugauggaggccgacgcccacuacaaguccgugcgcacguggaacgagaucauccccagcaaggggugccugcgggucggcgggcgcugccacccgcacgugaacggcguguucuucaacggcaucauccucgggcccgacggccacguccugauccccgagaugcaguccagccugcuccagcagcacauggagcugcuggaguccagcgugaucccccucaugcacccgcuggcggaccccuccaccaucuucaagaacggggacgaggccgaggacuucguggagguccaccuccccgacgugcacaagcaggucagcggcguggaccuggggcugcccaacuggggcaaguacgugcugauguccgccggcgcccucaucgcccugaugcugaugaucuuccucaugaccugcugccggaagaccgaccgcacggggagcacccaccacuccccgggcgagaccgggcggaaggugagcgucaccucccagaacggccgcgugaucgcgagcugggagagcuacaaguccgggggcgagacgaagcuguga

SEQ ID NO: 95107 - RNA, 1575 nt, Artificial Sequence; identical to SEQ ID NO: 94863
  derived and/or modified CDS sequence (opt1) from glycoprotein__RABV__GU186388.1

SEQ ID NO: 95108 - RNA, 1575 nt, Artificial Sequence
  derived and/or modified CDS sequence (opt1) from glycoprotein__RABV__GU186389.1
augaucccccaggugcugcuguucgucccgcugcugguguucagcuccugcuucggcaaguuccccaucuacaccauccccgacaagcucgggcccuggagcccgaucgacauccaccaccuguccugccccaacaaccugguggucgaggacgagggcugcaccaaccucagcggguucuccuacauggagcugaaggugggcuacaucagcgccaucaaggugaacggguucacgugcaccggcgucgugaccgaggccgagaccuacacgaacuucgugggcuacgucaccaccaccuucaagcgcaagcacuuccggcccaugcccgacgcgugccgcgccgccuacaacuggaagauggccggggacccgcgguacgaggagucccugcacaaccccuaccccgacuaccacuggcuccgcacggugaagaccaccaaggagagccuggugaucaucucccccagcgucgccgaccuggacccguacgacaagucccuccacagccggguguuccccggcgggaagugcuccggcaucaccgugagcuccacgugcugcagcaccaaccacgacuacaccaucuggaugcccgagaacccccgccuggggaccuccugcgacaucuucacgaacagccggggcaagcgcgcguccaagggcgggaagaccugcggcuucgucgacgagcgggggcuguacaagagccuccgcggcgccugcaagcugaagcugugcggcgugcucgggcugcggcugauggacggcaccuggguggccauccagaccagcgacgagaucaaguggugcuccccggaccagcucgucaaccugcacgacuuccacagcgacgagaucgagcaccuggugguggaggagcucgucaagaagcgcgaggagugccuggacgcccuggagacgaucaugaccaccaaguccgugagcuuccggcgccucucccaccuccggaagcuggugcccggguucggcaaggcguacaccaucuucaacaagacgcucauggaggccgacgcccacuacaagagcauccgcaccuggaacgagaucauccccuccaaggggugccugcgggucggcggccgcugccacccccacgugaacggggucuucuucaacggcaucauccuggggccggacggccacgugcucauccccgagaugcagagcucccugcugcaccagcacauggagcuccuggagagcuccgugaucccccugaugcacccccucgccgacccgagcaccgucuucaaggacggggacgaggccgaggacuucguggaggugcaccuccccgacguccacaagcagaucuccggcguggaccugggccugcccaacugggggaaguacgugcugaucagcgcgggcgcccugaccgcccucaugcugaugaucuuccugaugacgugcugccggaagaccaaccgcgccgaguccauccagcacagccccggggagaccggccggaaggucuccgugaccagccacaacgggcgcgugaucuccagcugggagagcuacaaguccggcagcgagacgaagcucuga

SEQ ID NO: 95109 - RNA, 1575 nt, Artificial Sequence; identical to SEQ ID NO: 94851
  derived and/or modified CDS sequence (opt1) from glycoprotein__RABV__GU186390.1

SEQ ID NO: 95110 - RNA, 1575 nt, Artificial Sequence
  derived and/or modified CDS sequence (opt1) from glycoprotein__RABV__GU186392.1
augaucccccaggugcugcuguucgucccgcugcugguguucagcuccugcuucggcaaguuccccaucuacaccauccccgacaagcucgggcccuggagcccgaucgacauccaccaccuguccugccccaacaaccugguggucgaggacgagggcugcaccaaccucagcggguucuccuacauggagcugaaggugggcuacaucagcgccaucaaggugaacggguucacgugcaccggcgucgugaccgaggccgagaccuacacgaacuucgugggcuacgucaccaccaccuucaagcgcaagcacuuccggcccacgcccgacgcgugccgcgccgccuacaacuggaagauggccggggacccgcgguacgaggagucccugcacaaccccuaccccgacuaccacuggcuccgcaccgugaagaccagcaaggagucccuggugaucaucagccccuccgucgccgaccuggacccguacgacaagagccuccacucccggguguuccccggcgggaagugcagcggcaucaccguguccagcacgugcugcuccaccaaccacgacuacaccaucuggaugcccgagaacccccgccuggggaccagcugcgacaucuucacgaacucccggggcaagcgcgcgagcaagggcgggaagaccugcggcuucgucgacgagcgggggcuguacaagagccucaagggcgccugcaagcugaagcugugcggcgugcucgggcugcgccugauggacggcaccuggguggccauccagaccuccgacgagaucaaguggugcagcccggaccagcucgucaaccugcacgacuuccacuccgacgagaucgagcaccuggugguggaggagcucgucaagaagcgggaggagugccuggacgcccuggagacgaucaugaccaccaagagcguguccuuccgccggcucagccaccuccgcaagcuggugcccggguucggcaaggcguacaccaucuucaacaagacgcucauggaggccgacgcccacuacaaguccauccggaccuggaacgagaucauccccagcaaggggugccugcgcgucggcggccggugccacccccacgugaacggggucuucuucaacggcaucauccuggggccggacggccacgugcucauccccgagaugcaguccagccugcugcaccagcacauggagcuccuggaguccagcgugaucccccugaugcacccccucgccgacccguccaccgucuucaaggacggggacgaggccgaggacuucguggaggugcaccuccccgacguccacaagcagaucagcgagguggaccugggccugcccaacuggggcaaguacgugcuggucuccgcgggggcccugaccgcccucaugcugaugaucuuccugaugacgugcugccgcaagaccaaccgggccgagagcauccagcacucccccggcgagaccgggcgcaaggugagcgugaccucccacaacggccgggucaucagcagcugggaguccuacaagagcgggggcgagacgaagcucuga

SEQ ID NO: 95111 - RNA, 1575 nt, Artificial Sequence
  derived and/or modified CDS sequence (opt1) from glycoprotein__RABV__GU186396.1
augaucccccaggcccugcuguucgugccgcugcuggucuucagccucugcuucggcaaguuccccaucuacaccauccccgacaagcuggggcccugguccccgaucgacauccaccaccugagcugccccaacaaccucgugguggaggacgagggcugcaccaaccuguccggguucagcuacauggagcugaaggucggcuacaucuccgccaucaaggugaacggguucacgugcaccggcguggucaccgaggcggagaccuacacgaacuucgugggcuacgugaccaccaccuucaagcgcaagcacuuccggcccacgcccgacgccugccgcgccgccuacaacuggaagauggccggggacccgcgguacgaggagagccucaacaaccccuaccccgacuaccacuggcugcgcaccgucaagaccaccaaggagucccugguggugaucagccccuccgucgcggaccucgacccguacgacgagagccugcacucccggguguuccccagcggcaagugcuccgggaucacggugagcuccacgugcugcagcaccaaccacgacuacaccaucuggaugcccgagaacccccgccugggcaccuccugcgacaucuucgucaacagccgggggaagcgcgccuccaagggcagcaagaccugcggcuucguggacgagcgggggcucuacaagagccugaagggcgccugcaagcugaagcucugcggggugcugggccugcgccucauggacggcaccugggucgccauccagaccuccgacgagacgaaguggugcccgcccgaccagcuggugaaccugcacgacuuccggagcgacgagaucgagcaccucguggucgaggagcuggugaagaagcgcgaggagugccuggacgcgcucgaguccaucaugaccaccaagagcguguccuuccggcgccugagccaccuccggaagcucguccccggguucggcaaggccuacaccaucuucaacaagacgcugauggaggccgacgcccacuacaaguccgugcgcaccuggaacgagaucauccccagcaaggggugccugcgggucggcgggcgcugccacccgcacgugaacggcguguucuucaacggcaucauccucgggcccgacggccacguccugauccccgagaugcaguccagccugcuccagcagcacauggagcugcuggaguccagcgugaucccccucaugcacccgcuggccgaccccuccaccaucuucaaggacggggacgaggcggaggacuucguggagguccaccuccccgacgugcacaagcaggucagcggcguggaccuggggcugcccaacuggggcaaguacgugcugauguccgccggcgcccucaucgcccugaugcugaugaucuucagcaugaccugcugccggaagacggaccgcaucggguccacccaccacggcccgggggagaccggccggaaggugagcgucaccucccagaacgggcgcgugaucgccagcugggagagcuacaaguccggcggcgagacgaagcucuga

SEQ ID NO: 95112 - RNA, 1575 nt, Artificial Sequence
  derived and/or modified CDS sequence (opt1) from glycoprotein__RABV__GU186397.1
augaucccccaggcccugcuguucgugccgcugcuggucuucagccucugcuucggcaaguuccccaucuacaccauccccgacaagcuggggcccugguccccgaucgacauccaccaccugagcugccccaacaaccucgugguggaggacgagggcugcaccaaccuguccggguucagcuacauggagcugaaggucggcuacaucuccgccaucaaggcgaacggguucacgugcaccggcguggugaccgaggccgagaccuacacgaacuucgucggcuacgugaccaccaccuucaagcgcaagcacuuccggcccacgcccgacgccugccgcgccgcccacaacuggaagauggcgggggagccgcgguacgaggagagccuccacaaccccuaccccgacuaccacuggcugcgcaccgugaagaccaccaaggagucccuggucaucaucagccccuccguggccgaccucgacccguacgacaagagccugcacucccggguguuccccagcggcaagugcuccgggaucacggucagcuccaccuacugcagcaccaaccacgacuacaccauccgcaugcccgagaacccccggcugggcacguccugcgacaucuucgugaacagccgcgggaagcgggccuccaagggcagcaagaccugcggcuucguggacgagcgcgggcucuacaagagccugaagggcgccugcaagcugaagcucugcgggguccugggccugcggcucauggacggcaccuggguggcgauccagaccuccgacgagacgaaguggugcccgcccgaccagcuggugaaccugcacgacuuccgcagcgacgagaucgagcaccucgucguggaggagcuggugaagaagcgggaggagugccuggacgcccucgaguccaucaugaccaccaagagcgucuccuuccgccggcugagccaccuccgcaagcucgugcccggguucggcaaggccuacaccaucuucaacaagacgcugauggaggccgacgcccacuacaaguccgugcggaccuggaacgagaucauccccagcaaggggugccugcgcgucggcgggcggugccacccgcacgugaacggcgucuucuucaacggcaucauccucgggcccgacggccacgugcugauccccgagaugcaguccagccugcuccagcagcacauggagcugcuggaguccagcgugaucccccucaugcacccgcuggcggaccccuccaccaucuucaaggacggggacgaggccgaggacuucgucgaggugcaccuccccgacgugcaccgccaggucagcggcguggaccuggggcugcccaacuggggcaaguacgugcugauguccgccggcgcccucgucgcccugaugcugaugaucuuccucaugaccugcugcgugaagacggaccggaccgggagcacccaccacuccccgggcgagaccgggcgcaaggugagcgucacgucccagaacggccgcgugaucgcgagcugggagagcuacaaguccgggggcgagaccaagcuguga

SEQ ID NO: 95113 - RNA, 1575 nt, Artificial Sequence; identical to SEQ ID NO: 94551
  derived and/or modified CDS sequence (opt1) from glycoprotein__RABV__GU186398.1

SEQ ID NO: 95114 - RNA, 1575 nt, Artificial Sequence
  derived and/or modified CDS sequence (opt1) from glycoprotein__RABV__GU186400.1
auggugccccaggcccuccuguucgucccgcugcuggccgugccccucugcuucggcaaguuccccaucuacaccauccccgacaagcuggggccguggagccccaucgacauccaccaccuguccugccccaacaaccucguggucgaggacgagggcugcaccaaccugagcggguucuccuacauggagcugaaggugggcuacaucagcgcgaucaaggugaacggguucacgugcaccggcgucgugaccgaggccgagaccuacacgaacuucgugggcuacgucaccaccaccuucaagcgcaagcacuuccggcccacguccgacgccugccgcagcgccuacaacuggaagauggccggggacccgcgguacgaggagucccuccacaaccccuaccccgacuaccacuggcugcgcaccgugaagaccaccaaggagagcuucgugaucaucucccccagcgucgcggaccuggacccguacgacaagagcccccacucccggguguucccccgcggcaagugcuccgggaucacggugagcuccaccuacugcagcaccaaccacgacuacaccaucuggaugcccgagaacccgcggcucggcacguccugcgacaucuucaccaacagccgcgggaagcgggccuccaagggcagcaagaccugcggcuucgucgacgagcgcgggcuguacaagagccugaagggcgccugcaagcucaagcugugcggggugcugggccuccggcugauggacggcaccuggguggccauccagacguccgacgagaccaaguggugcccgcccgaccagcuggucaaccuccacgacuuccacagcgacgagaucgagcaccuggugguggaggagcuggucaagaagcgcgaggagugccucgacgcgcuggaguccaucaugaccaccaagagcguguccuuccggcgccugagccaccuccggaagcuggugcccggguucggcaaggccuacacgaucuucaacaagacccugauggaggccgacgcccacuacaaguccguccgcaccuggaacgagaucauccccagcaaggggugccuccgggugggcgggcgcugccacccccacgucaacggcguguucuucaacggcaucauccuggggcccgacggccacgugcugauccccgagaugcaguccagccuccugcagcagcacauggagcugcucgaguccagcgucaucccgcugaugcacccccuggccgaccccuccaccguguucaaggacggggacgaggcggaggacuucguggagguccaccuccccgacgugcacaagcaggucagcggcguggaccuggggcugccguccuggggcaaguacgugcucaugagcgccggcauccugacggcccugaugcucaccaucuuccugaugaccugcugccggcgcaccaaccgggccaaguccauccagcacagccugggggagacgggccgcaagguguccgucaccagccagagcgggcgcgugaucuccagcugggaguccuacaagagcggcggggagaccaagcucuga

SEQ ID NO: 95115 - RNA, 1575 nt, Artificial Sequence
  derived and/or modified CDS sequence (opt1) from glycoprotein__RABV__GU186401.1
auggugccccaggcccugcuguucgucccgcugcuggccgugccccucugcuucggcaaguuccccaucuacaccauccccgacaagcuggggccguggagccccaucgacauccaccaccuguccugccccaacaaccucguggucgaggacgagggcugcaccaaccugagcggguucuccuacauggagcugaaggugggcuacacgagcgcgaucaaggugaacggguucacgugcaccggcgucgugaccgaggccgagacguacaccaacuucgugggcuacgucaccaccacguucaagcgcaagcacuuccggcccaccuccgacgccugccgcagcgccuacaacuggaagauggccggggacccgcgguacgaggagucccuccacaaccccuaccccgacuaccacuggcugcgcaccgugaagaccacgaaggagagcuucgugaucaucucccccagcgucgcggaccuggacccguacgacaagucccuccacagccggguguucccccgcggcaagugcuccgggaucaccgugagcuccaccuacugcagcaccaaccacgacuacacgaucuggaugcccgagaacccccggcugggcaccuccugcgacaucuucaccaacagccgcgggaagcgggccuccaagggcagcaagaccugcggcuucgucgacgagcgcgggcuguacaagagccucaagggcgccugcaagcugaagcugugcggggugcucggccugcggcugauggacggcacguggguggccauccagaccuccgacgagaccaaguggugcccgcccgaccagcucgucaaccugcacgacuuccacagcgacgagaucgagcaccuggugguggaggagcucgucaagaagcgcgaggagugccuggacgcgcuggaguccaucaugaccaccaagagcguguccuuccggcgccucagccaccuccggaagcuggugcccggguucggcaaggccuacaccaucuucaacaagacccucauggaggccgacgcccacuacaaguccguccgcaccuggaacgagaucauccccagcaaggggugccugcgggugggcgggcgcugccacccgcacgucaacggcguguucuucaacggcaucauccuggggcccgacggccacgugcucauccccgagaugcaguccagccugcugcagcagcacauggagcuccuggaguccagcgucaucccccugaugcacccgcucgccgaccccuccacgguguucaaggacggggacgaggcggaggacuucguggagguccaccuccccgacgugcacaagcaggucagcggcguggaccuggggcugcccuccuggggcaaguacgugcugaugagcgccggcauccugaccgcccucaugcugaccaucuuccugaugaccugcugccggcgcacgaaccgggccaaguccauccagcacagccucggggagaccggccgcaagguguccgucaccagccagagcgggcgcgugaucuccagcugggaguccuacaagagcggcggggagaccaagcuguga

SEQ ID NO: 95116 - RNA, 1575 nt, Artificial Sequence
  derived and/or modified CDS sequence (opt1) from glycoprotein__RABV__GU186402.1
auggcgccccaggcccugcuguucgugccgcugcuggccgucccccucugccugggcaaguuccccaucuacaccauccccgacaagcuggggccguggagccccaucgacauccaccaccucuccugccccaacaaccuggugguggaggacgagggcugcaccaaccugagcggguucuccuacauggagcucaaggucggcuacaucagcgccaucaaggugaacggguucacgugcaccggcguggucaccgaggccgagaccuacacgaacuucgugggcuacgugaccaccaccuucaagcgcaagcacuuccggcccacgccggacgccugccgcuccgccuacaacuggaagauggcgggggacccccgguacgaggagagccugcacaaccccuaccccgacuaccacuggcugcgcaccgucaagaccaccaaggaguccuucgugaucaucagcccguccguggccgaccucgaccccuacgacaagagccugcacucccgggucuucccccgcggcaagugcagcgggaucacgguguccagcaccuacugcuccaccaaccacgacuacaccaucuggaugcccgagaacccgcggcugggcacgagcugcgacaucuucaccaacucccgcgggaagcgggccagcaagggcuccaagaccugcggcuucguggacgagcgcgggcucuacaagagccugaagggcgccugcaagcugaagcucugcgggguccugggccugcggcucauggacggcaccuggguggcgauccagacgagcgacgagaccaaguggugcccgcccgaccagcuggugaaccugcacgacuuccacuccgacgagaucgagcaccucgucguggaggagcuggugaagaagcgcgaggagugccuggacgcccucgagagcaucaugaccaccaaguccgucagcuuccggcgccugucccaccuccggaagcucgugcccggguucggcaaggccuacacgaucuucaacaagacccugauggaggccgacgcccacuacaagagcgugcgcaccuggaacgagaucauccccuccaaggggugccugcgggucggcgggcgcugccacccccacgugaacggcgucuucuucaacggcaucauccucgggcccgacggccacgugcugauccccgagaugcagagcucccugcuccagcagcacauggagcugcuggagagcuccgugaucccgcucaugcacccccuggcggaccccagcaccgucuucaaggacggggacgaggccgaggacuucguggaggugcaccuccccgacguccacaagcacguguccggcguggaccuggggcugccgagcuggggcaaguacguccugguguccgccggcauccucacggcccugaugcugaccaucuuccucaugaccugcugccggcgcaccaaccgggccgagagcauccagcacucccugggggagacgggccgcaaggugagcgucaccucccagagcgggcgcgugaucagcuccugggagagcuacaaguccggcggggagaccaagcuguga

SEQ ID NO: 95117 - RNA, 1575 nt, Artificial Sequence
  derived and/or modified CDS sequence (opt1) from glycoprotein__RABV__GU186403.1
augaucccccaggugcugcuguucgucccgcugcugguguucagcuccugcuucggcaaguuccccaucuacaccauccccgacaagcucgggcccuggagcccgaucgacauccaccaccuguccugccccaacaaccugguggucgaggacgagggcugcaccaaccucagcggguucuccuacauggagcugaaggugggcuacaucagcgccaucaaggugaacggguucacgugcaccggcgucgugaccgaggccgagaccuacacgaacuucgugggcuacgucaccaccaccuucaagcgcaagcacuuccggcccaugcccgacgcgugccgcgccgccuacaacuggaagauggccggggacccgcgguacgaggagucccugcacaaccccuaccccgacuaccacuggcuccgcacggugaagaccaccaaggagagccugguggucaucucccccagcguggccgaccuggacccguacgacaagucccuccacagccggguguuccccggcgggaagugcuccggcaucaccgucagcuccacgugcugcagcaccaaccacgacuacaccaucuggaugcccgagaacccccgccuggggaccuccugcgacaucuucacgaacagccggggcaagcgcgcguccaagggcgggaagaccugcggcuucguggacgagcgggggcuguacaagagccucaagggcgccugcaagcugaagcugugcggcgugcucgggcugcgccugauggacggcaccugggucgccauccagaccagcgacgagaucaaguggugcuccccggaccagcucgugaaccugcacgacuuccacagcgacgagaucgagcaccugguggucgaggagcucgugaagaagcgggaggagugccuggacgcccuggagacgaucaugaccaccaaguccgugagcuuccgccggcucucccaccuccgcaagcugguccccggguucggcaaggcguacaccaucuucaacaagacgcucauggaggccgacgcccacuacaagagcauccggaccuggaacgagaucauccccuccaaggggugccugcgcgugggcggccggugccacccccacgucaacgggguguucuucaacggcaucauccuggggccggacggccacgugcucauccccgagaugcagagcucccugcugcaccagcacauggagcuccuggagagcuccgucaucccccugaugcacccccucgccgacccgagcaccguguucaaggacggggacgaggccgaggacuucguggagguccaccuccccgacgugcacaagcagaucuccggcguggaccugggccugcccaacugggggaaguacguccugaucagcgcgggcgcccugaccgcccucaugcugacgaucuuccugaugaccugcugccgcaagaccaaccgggccggguccauccagcacagccccggcgagaccgggcgcaagguguccgugacgagccacaacggccgggucaucuccagcugggagagcuacaaguccggcagcgagaccaagcucuga

SEQ ID NO: 95118 - RNA, 1575 nt, Artificial Sequence; identical to SEQ ID NO: 94869
  derived and/or modified CDS sequence (opt1) from glycoprotein__RABV__GU186404.1

SEQ ID NO: 95119 - RNA, 1575 nt, Artificial Sequence
  derived and/or modified CDS sequence (opt1) from glycoprotein__RABV__GU186406.1
augaucccccaggugcuccuguucgucccgccccugguguucagcuccugcuucggcaaguuccccaucuacaccauccccgacaagcuggggccguggagccccaucgacauccaccaccucuccugccccaacaaccugguggucgaggacgagggcugcaccaaccugagcggguucuccuacauggagcucaaggugggcuacaucagcgccaucaaggugaacggguucacgugcaccggcgucgugaccgaggccgagaccuacacgaacuucgugggcuacgucaccaccaccuucaagcgcaagcacuuccggcccaugccggacgcgugccgcgccgccuacaacuggaagauggccggggacccccgguacgaggagucccugcacaaccccuaccccgacuaccacuggcugcgcacggugaagaccaccaaggagagccucgugaucaucuccccgagcgucgccgaccuggaccccuacgacaagucccugcacagccggguguuccccggcgggaagugcuccggcaucaccgugagcuccacgugcugcagcaccaaccacgacuacaccaucuggaugcccgagaacccgcgccucgggaccuccugcgacaucuucacgaacagccggggcaagcgcgcguccaagggcgggaagaccugcggcuucgucgacgagcgggggcuguacaagagccugaagggcgccugcaagcucaagcugugcggcgugcuggggcuccgccugauggacggcaccuggguggccauccagaccagcgacgagaucaaguggugcucccccgaccagcuggucaaccuccacgacuuccacagcgacgagaucgagcaccuggugguggaggagcuggucaagaagcgggaggagugccucgacgcccuggagacgaucaugaccaccaaguccgugagcuuccgccggcugucccaccuccgcaagcuggugcccggguucggcaaggcguacaccaucuucaacaagacgcugauggaggccgacgcccacuacaagagcauccggaccuggaacgagaucauccccuccaaggggugccuccgcgucggcggccggugccacccgcacgugaacggggucuucuucaacggcaucauccuggggcccgacggccacgugcugauccccgagaugcagagcucccuccugcaccagcacauggagcugcucgagagcuccgugaucccccugaugcacccgcuggccgaccccagcaccgucuucaaggacggggacgaggccgaggacuucguggaggugcaccuccccgacguccacaagcagaucuccggcguggaccugggccugcccaacugggggaaguacgugcucaucagcgcgggcgcccugaccgcccugaugcucaugacguuccugaugaccugcugccgcaagaccaaccgggccgaguccauccagcacagcccgggggagaccggccgcaaggucuccgugacgagccacaacgggcgggugaucuccagcugggagagcuacaaguccggcggcgagaccaagcuguga

SEQ ID NO: 95120 - RNA, 1575 nt, Artificial Sequence
  derived and/or modified CDS sequence (opt1) from glycoprotein__RABV__GU186407.1
augaucccccaggugcugcuguucgucccgcugcugguguucagcuccugcuucggcaaguuccccaucuacaccauccccgacaagcucgggcccuggagcccgaucgacauccaccaccuguccugccccaacaaccugguggucgaggacgagggcugcaccaaccucagcggguucuccuacauggagcugaaggugggcuacaucagcgccaucaaggugaacggguucacgugcaccggcgucgugaccgaggccgagaccuacacgaacuucgugggcuacgucaccaccaccuucaagcgcaagcacuuccggcccaugcccgacgcgugccgcgccgccuacaacuggaagauggccggggacccgcgguacgaggagucccugcacaaccccuaccccgacuaccacuggcuccgcacggugaagaccaccaaggagagccuggugaucaucucccccagcgucgccgaccuggacccguacgacaagucccuccacagccggguguuccccggcgggaagugcuccggcaucaccgugagcuccacgugcugcagcaccaaccacgacuacaccaucuggaugcccgagaacccccgccuggggaccuccugcgacaucuucacgaacagccggggcaagcgcgcguccaagggcgggaagaccugcggcuucgucgacgagcgggggcuguacaagagccucaagggcgccugcaagcugaagcugugcggcgugcucgggcugcgccugauggacggcaccuggguggccauccagaccagcgacgagaucaaguggugcuccccggaccagcucgucaaccugcacgacuuccacagcgacgagaucgagcaccuggugguggaggagcucgucaagaagcgggaggagugccuggacgcccuggagacgaucaugaccaccaaguccgugagcuuccgccggcucucccaccuccgcaagcuggugcccggguucggcaaggcguacaccaucuucaacaagacgcucauggaggccgacgcccacuacaagagcauccggaccuggaacgagaucauccccuccaaggggugccugcgcgucggcggccggugccacccccacgugaacggggucuucuucaacggcaucauccuggggccggacggccacgugcucauccccgagaugcagagcucccugcugcaccagcacauggagcuccuggagagcuccgugaucccccugaugcacccccucgccgacccgagcaccgucuucaaggacggggacgaggccgaggacuucguggaggugcaccuccccgacguccacaagcagaucuccggcguggaccugggccugcccaacugggggaaguacgugcugaucagcgcgggcgcccugaccgcccucaugcugaugacguuccugaugaccugcugccgcaagaccaaccgggccgaguccauccagcacagccccggggagaccggccgcaaggucuccgugacgagccacaacgggcgggugaucuccagcugggagagcuacaaguccggcggcgagaccaagcucuga

SEQ ID NO: 95121 - RNA, 1575 nt, Artificial Sequence; identical to SEQ ID NO: 95120
  derived and/or modified CDS sequence (opt1) from glycoprotein__RABV__GU186408.1

SEQ ID NO: 95122 - RNA, 1575 nt, Artificial Sequence
  derived and/or modified CDS sequence (opt1) from glycoprotein__RABV__GU186409.1
augaucccccaggugcugcuguucgucccgcugcugguguucagcuccugcuucggcaaguuccccaucuacaccauccccgacaagcucgggcccuggagcccgaucgacauccaccaccuguccugccccaacaaccugguggucgaggacgagggcugcaccaaccucagcggguucuccuacauggagcugaaggugggcuacaucagcgccaucaaggugaacggguucacgugcaccggcgccgucaccgaggcggagaccuacacgaacuucgugggcuacgugaccaccaccuucaagcgcaagcacuuccggcccaugcccgacgccugccgcgccgccuacaacuggaagauggccggggacccgcgguacgaggagucccugcacaaccccuaccccgacuaccacuggcuccgcacggucaagaccaccaaggagagccuggugaucaucucccccagcguggcggaccuggacccguacgacaagucccuccacagccgggucuuccccggcgggaagugcuccggcaucaccgugagcuccacgugcugcagcaccaaccacgacuacaccaucuggaugcccgagaacccccgccuggggaccuccugcgacaucuucacgaacagccggggcaagcgcgccuccaagggcgggaagaccugcggcuucguggacgagcgggggcuguacaagagccucaagggcgccugcaagcugaagcugugcggcguccucgggcugcgccugauggacggcaccuggguggccauccagaccagcgacgagaucaaguggugcccgcccgaccagcucgugaaccugcacgacuuccacuccgacgagaucgagcaccuggucguggaggagcucgugaagaagcgggaggagugccuggacgcgcuggagacgaucaugaccaccaagagcgucuccuuccgccggcucagccaccuccgcaagcuggugcccggguucggcaaggccuacaccaucuucaacaagacgcucauggaggccgacgcccacuacaaguccauccggaccuggaacgagaucauccccagcaaggggugccugcgcgugggcggccggugccacccgcacgucaacgggguguucuucaacggcaucauccuggggcccgacggccacguccucauccccgagaugcaguccagccugcugcaccagcacauggagcuccuggaguccagcgugaucccccugaugcacccgcucgccgaccccuccaccguguucaaggacggggacgaggcggaggacuucgucgaggugcaccuccccgacgugcacaagcagaucagcggcgucgaccugggccugcccaacugggggaaguacgugcugaucuccgccggcgcccugaccgcccucaugcugacgaucuuccugaugaccugcugccgcaagaccaaccgggccgggagcauccagcacuccccgggcgagaccgggcgcaaggugagcgucacgucccacaacggccgggugaucagcuccugggagagcuacaagagcggcuccgagaccaagcucuga

SEQ ID NO: 95123 - RNA, 1575 nt, Artificial Sequence
  derived and/or modified CDS sequence (opt1) from glycoprotein__RABV__GU186410.1
augaucccccaggugcugcuguucgucccgcugcugguguucagcuccggcuucgggaaguuccccaucuacaccauccccgacaagcucggccccuggagcccgaucgacauccaccaccuguccugccccaacaaccugguggucgaggacgaggggugcaccaaccucagcggcuucuccuacauggagcugaaggugggguacaucagcgccaucaaggugaacggcuucacgugcaccggcgucgugaccgaggccgagaccuacacgaacuucgugggguacgucaccaccaccuucaagcgcaagcacuuccggcccaugcccgacgcgugccgcgccgccuacaacuggaagauggccggcgacccgcgguacgaggagucccugcacaaccccuaccccgacuaccacuggcuccgcacggugaagaccaccaaggagagccuggugaucaucucccccagcgucgccgaccuggacccguacgacaagucccuccacagccggguguuccccgggggcaagugcuccgggaucaccgugagcuccacgugcugcagcaccaaccacgacuacaccaucuggaugcccgagaacccccgccugggcaccuccugcgacaucuucacgaacagccggggcaagcgcgcguccaagggcgggaagaccugcggguucgucgacgagcggggccuguacaagagccucaagggcgccugcaagcugaagcugugcggggugcucggccugcgccugauggacgggaccuggguggccauccagaccagcgacgagaucaaguggugcuccccggaccagcucgucaaccugcacgacuuccacagcgacgagaucgagcaccuggugguggaggagcucgucaagaagcgggaggagugccuggacgcccuggagacgaucaugaccaccaaguccgugagcuuccgccggcucucccaccuccgcaagcuggugcccggcuucgggaaggcguacaccaucuucaacaagacgcucauggaggccgacgcccacuacaagagcauccggaccuggaacgagaucauccccuccaagggcugccugcgcgucggcgggcggugccacccccacgugaacggcgucuucuucaacgggaucauccugggcccggacgggcacgugcucauccccgagaugcagagcucccugcugcaccagcacauggagcuccuggagagcuccgugaucccccugaugcacccccucgccgacccgagcaccgucuucaaggacggcgacgaggccgaggacuucguggaggugcaccuccccgacguccacaagcagaucuccggcguggaccuggggcugcccaacuggggcaaguacgugcugaucagcgcgggggcccugaccgcccucaugcugacgaucuuccugaugaccugcugccgcaagaccaaccgggccggcuccauccagcacagccccggggagaccggccgcaaggucuccgugacgagccacaacggccgggugaucuccagcugggagagcuacaaguccgggagcgagaccaagcucuga

SEQ ID NO: 95124 - RNA, 1575 nt, Artificial Sequence; identical to SEQ ID NO: 94876
  derived and/or modified CDS sequence (opt1) from glycoprotein__RABV__GU345746.1

SEQ ID NO: 95125 - RNA, 1575 nt, Artificial Sequence
  derived and/or modified CDS sequence (opt1) from glycoprotein__RABV__GU345747.1
augaucccccaggcccugcuguucgugccgcugcuggucuucagccucugcuucggcaaguuccccaucuacaccauccccgacaagcuggggcccugguccccgaucgacauccaccaccugagcugccccaacaaccucgugguggaggacgagggcugcaccaaccuguccggguucagcuacauggagcugaaggucggcuacaucuccgccaucaaggugaacggguucacgugcaccggcguggucaccgaggcggagaccuacacgaacuucgugggcuacgugaccaccaccuucaagcgcaagcacuuccggcccacgcccgacgccugccgcgccgccuacaacuggaagauggccggggacccgcgguacgaggagagccuccacaaccccuaccccgacuaccacuggcugcgcaccgucaagaccaccaaggagucccuggugaucaucagccccuccguggcggaccucgacccguacgacaagagccugcacucccgggucuuccccagcggcaagugcuccgggaucacggugagcuccaccuacugcagcaccaaccacgacuacaccaucuggaugcccgagaacccccgccugggcacguccugcgacaucuucgugaacagccgggggaagcgcgccuccaagggcagcaagaccugcggcuucgucgacgagcgggggcucuacaagagccugaagggcgccugcaagcugaagcucugcggggugcugggccugcgccucauggacggcaccuggguggccauccagaccuccgacgagacgaaguggugcccgcccgaccagcuggucaaccugcacgacuuccggagcgacgagaucgagcaccucgugguggaggagcuggucaagaagcgcgaggagugccuggacgcgcucgaguccaucaugaccaccaagagcguguccuuccggcgccugagccaccuccggaagcucgugcccggguucggcaaggccuacaccaucuucaacaagacgcugauggaggccgacgcccacuacaaguccguccgcaccuggaacgagaucauccccagcaaggggugccugcgggugggcgggcgcugccacccgcacgucaacggcguguucuucaacggcaucauccucgggcccgacggccacgugcugauccccgagaugcaguccagccugcuccagcagcacauggagcugcuggaguccagcgucaucccccucaugcacccgcuggccgaccccuccaccaucuucaaggacggggacgaggcggaggacuucguggaggugcaccuccccgacguccacaagcaggucagcggcguggaccuggggcugcccaacuggggcaaguacgugcugauguccgccggcgcccucaucgcccugaugcugaugaucuuccucaugaccugcugccggaagacggaccgcaccgggagcacccaccacuccccgggcgagaccgggcggaaggugagcgugacgucccagaacggccgcgucaucgccagcugggagagcuacaaguccgggggcgagacccgccuguga

SEQ ID NO: 95126 - RNA, 1575 nt, Artificial Sequence
  derived and/or modified CDS sequence (opt1) from glycoprotein__RABV__GU565703.1
auggugccccagguccuccuguucgugccgcugcugggcuucagccucugcuucgggaaguuccccaucuacaccauccccgacaagcugggccccugguccccgaucgacauccaccaccugagcugccccaacaaccucguggucgaggacgaggggugcaccaaccuguccgaguucagcuacauggagcugaaggugggcuacaucuccgccaucaaggugaacggguucacgugcaccggcgucgugaccgaggccgagaccuacacgaacuucgugggcuacgucaccaccaccuucaagcgcaagcacuuccggcccacgcccgacgcgugccgcgccgccuacaacuggaagauggccggggacccgcgguacgaggagagccuccacaaccccuaccccgacuaccacuggcugcgcaccgugaagaccaccaaggagucccuggugaucaucagccccuccgucacggaccucgacccguacgacaagagccugcacucccggguguuccccggcgggaacugcagcggcaucaccguguccagcaccuacugcuccaccaaccacgacuacacgaucuggaugcccgagaaccugcgccucgggaccagcugcgacaucuucaccaacucccggggcaagcgcgccagcaagggcgggaagaccugcggcuucgucgacgagcgggggcuguacaagucccugaagggcgcgugcaagcucaagcugugcggcgugcuggggcuccgccugauggacggcacguggguggccaugcagaccagcgacgagaccaaguggugcccgcccgggcagcuggucaaccuccacgacuuccggagcgacgagaucgagcaccuggugguggaggagcuggucaagaagcgcgaggagugccucgacgcccuggaguccaucaugaccaccaagagcguguccuuccggcgccugagccaccuccggaagcuggugcccggcuucgggaaggccuacacgaucuucaacaagacccugauggaggcggacgcccacuacaaguccguccgcaccuggaacgagaucauccccagcaagggcugccuccgggugggcgggcgcugccacccccacgucaacggcguguucuucaacgggaucauccugggcuccgacgggcacgugcugaucccggagaugcagagcucccuccugcagcagcacauggagcugcucgagagcuccgucaucccccugaugcacccccuggccgaccccagcacgguguucaaggacggcgacgagguggaggacuucgucgaggugcaccucccggacgugcacgagcaggucuccggcguggagcuggggcugcccaacuggggcaaguacgugcucaugaucgccggggcccugaucgcgcugaugcucaucaucuuccugaugaccugcugccggcgcgucaaccggcccgagagcacccaguccagccugggcgagaccgggcgcaacguguccgugacgagccaguccggcaaggucaucagcagcugggaguccuacaagagcggcggggagacccgccuguga

SEQ ID NO: 95127 - RNA, 1575 nt, Artificial Sequence
  derived and/or modified CDS sequence (opt1) from glycoprotein__RABV__GU565704.1
auggugccccagguccugcuguucgccccgcugcugguguucagccucugcuucggcaaguuccccaucuacaccauccccgacaagcuggggcccugguccccgaucgaccugcaccaccucagcugccccaacaaccugguggucgaggacgagggcugcaccaaccuguccggguucagcuacauggagcucaaggugggcuacaucuccgccaucaaggugaacggguucacgugcaccggcgucgugaccgaggcggagaccuacacgaacuucgugggcuacgucaccaccaccuucaagcgcaagcacuuccggcccacgcccgacgccugccgcgccgccuacaacuggaagauggccggggacccgcgguacgaggagagccugcacaaccccuaccccgacuaccacuggcugcgcaccgugaagaccaccaaggagucccucgugaucaucagccccuccgucacggaccuggacccguacgacaagagccugcacucccggguguuccccggcgggaacugcagcggcaucaccguguccagcaccuacugcuccaccaaccacgacuacacgaucuggaugcccgagaaccuccgccuggggaccagcugcgacaucuucacccacucccggggcaagcgcgcgagcaagggcgacaagaccugcggguucgucgacgagcggggccuguacaagucccucaagggggccugcaagcugaagcugugcggcgugcucggccugcgccugauggacgggacguggguggccaugcagaccagcgacgagaccaaguggugcccgcccggccagcucgucaaccugcacgacuuccggagcgacgagaucgagcaccuggugguggaggagcucgucaagaagcgcgaggagugccuggacgcccuggaguccaucaugaccaccaagagcguguccuuccggcgccucagccaccuccggaagcuggugcccggguucggcaaggcguacacgaucuucaacaagacccucauggaggccgacgcccacuacaaguccguccagaccuggaacgagaucauccccagcaaggggugccugcgcgugggcgagcggugccacccccacgucaacggcguguucuucaacgggaucauccugggcuccgacgggcacgugcucaucccggagaugcagagcucccugcugcagcagcacauggagcuccuggagagcuccgucaucccccugaugcacccccucgccgaccccagcacgguguucaaggacggcgacgagguggaggacuucgucgaggugcaccucccggacgugcacaagcaggucuccgggguggaccugggccugcccaaguggggcaaguacgugcugaugaucgccggggcgcugaucgcccucaugcugaucaucuuccugaugaccugcugccgccgggucaaccgccccgagagcacccaguccaaccugggcgggaccggccggaacgugagcgugacgucccagagcgggaaggucaucuccagcugggagagcuacaaguccggcggcgagacccgccucuga

SEQ ID NO: 95128 - RNA, 1575 nt, Artificial Sequence; identical to SEQ ID NO: 95108
  derived and/or modified CDS sequence (opt1) from glycoprotein__RABV__GU591789.1

SEQ ID NO: 95129 - RNA, 1575 nt, Artificial Sequence; identical to SEQ ID NO: 95108
  derived and/or modified CDS sequence (opt1) from glycoprotein__RABV__GU591791.1

SEQ ID NO: 95130 - RNA, 1575 nt, Artificial Sequence
  derived and/or modified CDS sequence (opt1) from glycoprotein__RABV__GU647092.1
augaucccccaggcccuccuguucgugccgcugcuggucgugccccucugcuucggcaaguuccccaucuacaccauccccgacaagcuggggccguggagccccaucgacauccaccaccuguccugccccaacaaccucgugauggaggacgagggcugcaccaaccugagcggguucuccuacauggagcugaaggucggcuacaucagcgccaucaaggugaacggguucacgugcaccggcguggucaccgaggcggagaccuacacgaacuucgugggcuacgugaccaccaccuucaagcgcaagcacuuccggcccacgccggacgccugccgcuccgccuacaacuggaagauggccggggacccccgguacgaggagagccuccacaaccccuaccccgacuaccacuggcugcgcaccgucaagaccaccaaggagccguucgugaucaucucccccagcguggccgaccuggaccccuacgacaagucccuccacagccgggucuucccccgcggcaagugcuccgggaucacggugagcuccaccuacugcccgaccaaccacgacuacaccaucuggaugcccgagaacccccggagcggcacguccugcgacaucuucaccaacagccgcgggaagcgggcguucaagggcuccaagaccugcggcuucguggacgagcgcgggcuguacaagagccugaagggcgccugcaagcucaagcugugcgggguccugggccuccggcugauggacggcaccuggguggccauccagacguccgacgagaccaaguggugcccgcccgaccagcuggugaaccuccacgacuuccacagcgacgagaucgagcaccuggucguggaggagcuggugaagaagcgcgaggagugccucgacgcccuggagagcaucaugaccaccaaguccgucagcuuccggcgccugucccaccuccggaagcuggugcccggguucggcaaggcguacacgaucuucaacaagacccugauggaggccgacgcccacuacaagagcgugcgcaccuggaacgagaucauccccuccaaggggugccuccgggucggcgggcgcugccacccccacgugaacggcgucuucuucaacggcaucauccuggggccggacggccacgugcugauccccgagaugcagagcucccuccugcagcagcacauggagcugcucgagagcuccgugaucccccugaugcacccccuggccgacccgagcaccgucuucaagaacggggacgaggccgaggacuucguggaggugcaccuccccgacguccacaagcaggucuccggcguggaccuggggcugcccagcuggggcaaguacgugcucauguccgcgggcauccugacggcccugaugcucaugaucuuccugaugaccugcugccggcgcaccaaccggccggagagcauccagcacucccugggggagaccggccgcaaggugagcgugacgucccagagcgggcgcgucaucuccagcugggagagcuacaaguccggcggggagaccaagcucuga

SEQ ID NO: 95131 - RNA, 1575 nt, Artificial Sequence
  derived and/or modified CDS sequence (opt1) from glycoprotein__RABV__GU937024.1
auggugccccaggcccugcuguucgucccccugcugguguucagcaugugcuucggcaaguuccccaucuacaccauccccgacaagcucgggcccugguccccgaucgacauccaccaccugagcugccccaacaaccugguggucgaggacgagggcugcaccaaccucuccggguucagcuacauggagcugaaggugggcuacaucuccgccaucaaggugaacggguucacgugcaccggcgucgugaccgaggcggagaccuacacgaacuucgugggcuacgucaccaccaccuucaagcgcaagcacuuccggcccacgcccgacgccugccgcgccgccuacaacuggaagauggccggggacccgcgguacgaggagagccugcacaaccccuaccccgacuaccacuggcuccgcaccgugaagaccaccaaggagucccuggugaucaucagccccuccgucgcggaccuggacccguacgacaagagccuccacucccggguguuccccaacggcaagugcagcgggaucacgaucuccagcaccuacugccccaccaaccacgacuacaccaucuggcugcccgagaacccgcgccugggcacguccugcgacaucuucaccaacagccgggggaagcgcgccuccaagggcagcaagaccugcggcuucguggacgagcgggggcucuacaagucccugaagggcgccugcaagcugaagcucugcgggguccugggccugcgccucauggacggcaccuggguggccaugcaggcgagcgacgagacgaaguggugcccgcccgaccagcuggugaaccugcacgacuuccggagcgacgagaucgagcaccucgucguggaggagcuggugaagaagcgcgaggagugccuggacgcccucgaguccaucaugaccaccaagagcgucuccuuccggcgccugagccaccuccggaagcucgugcccggguucggcaaggccuacaccaucuucaacaagacgcugauggaggccgacgcccacuacaaguccgugcgcaccuggaacgagaucauccccagcaaggggugccugcgggucggcgggcgcugccacccccacgugaacggcgucuucuucaacggcaucauccucgggcccgacggccacgugcugauccccgagaugcaguccagccugcuccagcagcacauggagcugcuggaguccagcgugaucccgcucaugcacccccuggcggaccccuccaccgucuucaaggacggggacgaggccgagaacuucguggaggugcaccuccccgacguccacaagcagaucagcggcguggaccuggggcugccgaacuggggcaaguacgugcuggucuccgccggcgugcucaucgcccugaugcugaucaucuuccucaugaccugcugcgggcgggugaaccgccccaagagcacgcagcacaaccugggcgggaccggccgggaggucuccgugaccccgcagagcgggaaggugaucuccagcugggaguccuacaagagcggcggcgagacccgccuguga

SEQ ID NO: 95132 - RNA, 1575 nt, Artificial Sequence
  derived and/or modified CDS sequence (opt1) from glycoprotein__RABV__GU937025.1
auggugccccaggcccugcuguucgucccccugcugguguucagcaugugcuucggcaaguuccccaucuacaccauccccgacaagcucgggcccugguccccgaucgacauccaccaccugagcugccccaacaaccugguggucgaggacgagggcugcaccaaccucuccggguucagcuacauggagcugaaggugggcuacaucuccgccaucaaggugaacggguucacgugcaccggcgucgugaccgaggcggagaccuacacgaacuucgugggcuacgucaccaccaccuucaagcgcaagcacuuccggcccacgcccgacgccugccgcgccgccuacaacuggaagauggccggggacccgcgguacgaggagagccugcacaaccccuaccccgacuaccacuggcuccgcaccgugaagaccaccaaggagucccuggugaucaucagccccuccgucgcggaccuggacccguacgacaagagccuccacucccggguguuccccaacggcaagugcagcgggaucacgaucuccagcaccuacugccccaccaaccacuacuacaccaucuggcugcccgagaacccgcgccaggagacguccugcgacaucuucaccaacagccggggcaagcgcgccuccaaggggagcaagaccugcggcuucguggacgagcggggccuguacaagucccucaagggggccugcaagcugaagcugugcggcguccucgggcugcgccugauggacggcaccuggguggccaugcaggcgagcgacgagacgaaguggugcccgcccgaccagcucgugaaccugcacgacuuccggagcgacgagaucgagcaccuggucguggaggagcucgugaagaagcgcgaggagugccuggacgcccuggaguccaucaugaccaccaagagcgucggcuuccggcgccucucccaccuccggaagcuggugcccggguuccgcaaggccuacaccaucuucaacaagacgcucauggaggccgacgcccacuacaagagcgugcggaccuggaacgagaucauccccuccaagggcugccugcgcgucgggggccggugccacccccacgugaacggggucuucuucaacggcaucauccugggccccgacgggcacgugcucauccccgagaugcagagcucccugcugcagcagcacaugggccuccuggagagcuccgugaucccgcugaugcacccccucgcggaccccagcaccgucuucaaggacggggacgaggccgagaacuucguggaggugcaccuccccgacguccacaagcagaucuccggcguggaccuggggcugccgaacuggggcaaguacgugcuggucagcgccggcgugcugaucgcccucaugcugaucaucuuccugaugaccugcugcgggcgcgugaaccggcccaaguccacgcagcacaaccucggcgggaccggccgcgaggucagcgugaccccgcaguccgggaaggugaucagcuccugggagagcuacaaguccggcggcgagacccgccuguga

SEQ ID NO: 95133 - RNA, 1575 nt, Artificial Sequence
  derived and/or modified CDS sequence (opt1) from glycoprotein__RABV__GU937026.1
auggugccccaggcccugcuguucgucccccugcugguguucagcaugugcuucggcaaguuccccaucuacaccauccccgacaagcucgggcccugguccccgaucgacauccaccaccugagcugccccaacaaccugguggucgaggacgagggcugcaccaaccucuccggguucagcuacauggagcugaaggugggcuacaucuccgccaucaaggugaacggguucacgugcaccggcgucgugaccgaggcggagaccuacacgaacuucgugggcuacgucaccaccaccuucaagcgcaagcacuuccggcccacgcccgacgccugccgcgccgccuacaacuggaagauggccggggacccgcgguacgaggagagccugcacaaccccuaccccgacuaccacuggcuccgcaccgugaagaccaccaaggagucccuggugaucaucagccccuccgucgcggaccuggacccguacgacaagagccuccacucccggguguuccccaacggcaagugcagcgggaucacgaucuccagcaccuacugccccaccaaccacgacuacaccaucuggcugcccgagaacccgcgccugggcacguccugcgacaucuucaccaacagccgggggaagcgcgccuccaagggcagcaagaccugcggcuucguggacgagcgggggcucuacaagucccugaagggcgccugcaagcugaagcucugcgggguccugggccugcgccucauggacggcaccuggguggccaugcaggcgagcgacgagacgaaguggugcccgcccgaccagcuggugaaccugcacgacuuccggagcgacgagaucgagcaccucgucguggaggagcuggugaagaagcgcgaggagugccuggacgcccucgaguccaucaugaccaccaagagcgucuccuuccggcgccugagccaccuccggaagcucgugcccggguucggcaaggccuacaccaucuucaacaagacgcugauggaggccgacgcccacuacaaguccgugcgcaccuggaacgagaucauccccagcaaggggugccugcgggucggcgggcgcugccacccccacgugaacggcgucuucuucaacggcaucauccucgggcccgacggccacgugcugauccccgagaugcaguccagccugcuccagcagcacauggagcugcuggaguccagcguggucccgcucaugcacccccuggcggaccccuccaccgugcugaaggacggggacgaggccgagaacuucguggagguccaccuccccgacgugcacaagcagaucagcggcguggaccuggggcugccgaacuggggcaaguacguccucguguccgccggcgugcugaucgcccugaugcucaucaucuuccugaugaccugcugcgggcgggucaaccgccccaagagcacgcagcacaaccugggcgggaccggccggaagguguccgugaccccgcagagcgggaaggucaucuccagcugggaguccuacaagagcggcggcgagacccgccuguga

SEQ ID NO: 95134 - RNA, 1575 nt, Artificial Sequence
  derived and/or modified CDS sequence (opt1) from glycoprotein__RABV__GU937027.1
auggugccccaggcccugcuguucgucccccugcugguguucagcaugugcuucggcaaguuccccaucuacaccauccccgacaagcucgggcccugguccccgaucgacauccaccaccugagcugccccaacaaccugguggucgaggacgagggcugcaccaaccucuccggguucagcuacauggagcugaaggugggcuacaucuccgccaucaaggugaacggguucacgugcaccggcgucgugaccgaggcggagaccuacacgaacuucgugggcuacgucaccaccaccuucaagcgcaagcacuuccggcccacgcccgacgccugccgcgccgccuacaacuggaagauggccggggacccgcgguacgaggagagccugcacaaccccuaccccgacuaccacuggcuccgcaccgugaagaccaccaaggagucccuggugaucaucagccccuccgucgcggaccuggacccguacgacaagagccuccacucccggguguuccccaacggcaagugcagcgggaucacgaucuccagcaccuacugccccaccaaccacuacuacaccaucuggcugcccgagaacccgcgccugggcacguccugcgacaucuucaccaacagccgggggaagcgcgccuccaagggcagcaagaccugcggcuucguggacgagcgggggcucuacaagucccugaagggcgccugcaagcugaagcucugcgggguccugggccugcgccucauggacggcaccuggguggccaugcaggcgagcgacgagacgaaguggugcccgcccgaccagcuggugaaccugcacgacuuccggagcgacgagaucgagcaccucgucguggaggagcuggugaagaagcgcgaggagugccuggacgcccucgaguccaucaugaccaccaagagcgucuccuuccggcgccugagccaccuccggaagcucgugcccggguucggcaaggccuacaccaucuucaacaagacgcugauggaggccgacgcccacuacaaguccgugcgcaccuggaacgagaucauccccagcaaggggugccugcgggucggcgggcgcugccacccccacgugaacggcgucuucuucaacggcaucauccucgggcccgacggccgggugcugauccccgagaugcaguccagccugcuccagcagcacauggagcugcuggaguccagcgugaucccgcucaugcacccccuggcggaccccuccaccgucuucaaggacggggacgaggccgagaacuucguggaggugcaccuccccgacguccacaagcagaucagcggcguggaccuggggcugccgaacuggggcaaguacgugcuggucuccgccggcgugcucaucgcccugaugcugaucaucuuccucaugaccugcugcgggcgcgugaaccggcccaagagcacgcagcacaaccugggcgggaccggccgcgaggucuccgugaccccgcagagcgggaaggugaucuccagcugggaguccuacaagagcggcggcgagacccgccuguga

SEQ ID NO: 95135 - RNA, 1575 nt, Artificial Sequence
  derived and/or modified CDS sequence (opt1) from glycoprotein__RABV__GU937028.1
auggugccccaggcccuccuguucgucccccugcugguguucagcaugugcuucggcaaguuccccaucuacaccauccccgacaagcucgggcccugguccccgaucgacauccaccaccugagcugccccaacaaccugguggucgaggacgagggcugcaccaaccucuccggguucagcuacauggagcugaaggugggcuacaucuccgccaucaaggugaacggguucacgugcaccggcgucgugaccgaggcggagaccuacacgaaccuggugggcuacgucaccaccaccuucaagcgcaagcacuuccggcccacgcccgacgccugccgcgccgccuacaacuggaagauggccggggacccgcgguacgaggagagccuccacaaccccuaccccgacuaccacuggcugcgcaccgugaagaccaccaaggagucccuggugaucaucagccccuccgucgcggaccucgacccguacgacaagagccugcacucccggguguuccccaacggcaagugcagcgggaucacgaucuccagcaccuacugccccaccaaccacgacuacaccaucuggcugcccgagaacccgcgccucggcacguccugcgacaucuucaccaacagccgggggaagcgcgccuccaagggcagcaagaccugcggcuucguggacgagcgggggcuguacaagucccugaagggcgccugcaagcucaagcugugcgggguccugggccuccgccugauggacggcaccuggguggccaugcaggcgagcgacgagacgaaguggugcccgcccgaccagcuggugaaccuccacgacuuccggagcgacgagaucgagcaccuggucguggaggagcuggugaagaagcgcgaggagugccucgacgcccuggaguccaucaugaccaccaagagcgucuccuuccggcgccugagccaccuccggaagcuggugcccggguucggcaaggccuacaccaucuucaacaagacgcugauggaggccgacgcccacuacaaguccgugcgcaccuggaacgagaucauccccagcaaggggugccuccgggucggcgggcgcugccacccccacgugaacggcgucuucuucaacggcaucauccuggggcccgacggccacgugcugauccccgagaugcaguccagccuccugcagcagcacauggagcugcucgaguccagcgugaucccgcugaugcacccccuggcggaccccuccaccgucuucaaggacggggacgaggccgagaacuucguggaggugcaccuccccgacguccacaagcagaucagcggcguggaccuggggcugccgaacuggggcaaguacgugcucgucuccgccggcgugcugaucgcccugaugcucaucaucuuccugaugaccugcugcgggcgggugaaccgccccaagagcacgcagcacaaccugggcgggaccggccgggaggucuccgugaccccgcagagcgggaaggugaucuccagccgcgaguccuacaagagcggcggcgagacccgccuguga

SEQ ID NO: 95136 - RNA, 1575 nt, Artificial Sequence
  derived and/or modified CDS sequence (opt1) from glycoprotein__RABV__GU937029.1
auggugccccaggcccuccuguucgucccccugcugguguucagcaugugcuucggcaaguuccccaucuacaccauccccgacaagcucgggcccugguccccgaucgacauccaccaccugagcugccccaacaaccugguggucgaggacgagggcugcaccaaccucuccggguucagcuacauggagcugaaggugggcuacaucuccgccaucaaggugaacggguucacgugcaccggcgucgugaccgaggcggagaccuacacgaaccuggugggcuacgucaccaccaccuucaagcgcaagcacuuccggcccacgcccgacgccugccgcgccgccuacaacuggaagauggccggggacccgcgguacgaggagagccuccacaaccccuaccccgacuaccacuggcugcgcaccgugaagaccaccaaggagucccuggugaucaucagccccuccgucgcggaccucgacccguacgacaagagccugcacucccggguguuccccaacggcaagugcagcgggaucacgaucuccagcaccuacugccccaccaaccacgacuacaccaucuggcugcccgagaacccgcgccucggcacguccugcgacaucuucaccaacagccgggggaagcgcgccuccaagggcagcaagaccugcggcuucguggacgagcgggggcuguacaagucccugaagggcgccugcaagcucaagcugugcgggguccugggccuccgccugauggacggcaccuggguggccaugcaggcgagcgacgagacgaaguggugcccgcccgaccagcuggugaaccuccacgacuuccggagcgacgagaucgagcaccuggucguggaggagcuggugaagaagcgcgaggagugccucgacgcccuggaguccaucaugaccaccaagagcgucuccuuccggcgccugagccaccuccggaagcuggugcccggguucggcaaggccuacaccaucuucaacaagacgcugauggaggccgacgcccacuacaaguccgugcgcaccugggacgagaucauccccagcaaggggugccuccgggucggcgggcgcugccacccccacgugaacggcgucuucuucaacggcaucauccuggggcccgacggccacgugcugauccccgagaugcaguccagccuccugcagcagcacauggagcugcucgaguccagcgugaucccgcugaugcacccccuggcggaccccuccaccgucuucaaggacggggacgaggccgagaacuucguggaggugcaccuccccgacguccacaagcagaucagcggcguggaccuggggcugccgaacuggggcaaguacgugcucgucuccgccggcgugcugaucgcccugaugcucaucauccugcugaugaccugcugcgggcgggugaaccgccccaagagcacgcagcacaaccugggcgggaccggccgggaggucuccgugaccccgcagagcgggaaggugaucuccagcugggaguccuacaagagcggcggcgagacccgccucuga

SEQ ID NO: 95137 - RNA, 1575 nt, Artificial Sequence
  derived and/or modified CDS sequence (opt1) from glycoprotein__RABV__GU937030.1
auggugccccaggcccugcuguucgucccgcugcugguguucagcaugugcuucggcaaguuccccaucuacaccauccccgacaagcucgggcccugguccccgaucgacauccaccaccugagcugccccaacaaccugguggucgaggacgagggcugcaccaaccucuccggguucagcuacauggagcugaaggugggcuacaucuccgccaucaaggugaacggguucacgugcaccggcgucgugaccgaggcggagaccuacacgaacuucgugggcuacgucaccaccaccuucaagcgcaagcacuuccggcccacgcccgacgccugccgcgccgccuacaacuggaagauggccggggacccgcgguacgaggagagccugcacaaccccuaccccgacuaccacuggcuccgcaccgugaagaccaccaaggagucccuggugaucaucagccccuccgucgcggaccuggacccguacgacaagagccuccacucccggguguuccccaacggcaagugcagcgggaucacgaucuccagcaccuacugccccaccaaccacgacuacaccaucuggcugcccgagaacccgcgccugggcacguccugcgacaucuucaccaacagccgggggaagcgcgccuccaagggcagcaagaccugcggcuucguggacgagcgggggcucuacaagucccugaagggcgccugcaagcugaagcucugcgggguccugggccugcgccucauggacggcaccuggguggccaugcaggcgagcgacgagacgaaguggugcccgcccgaccagcuggugaaccugcacgacuuccggagcgacgagaucgagcaccucgucguggaggagcuggugaagaagcgcgaggagugccuggacgcccucgaguccaucaugaccaccaagagcgucuccuuccggcgccugagccaccuccggaagcccgugcccggguucggcaaggccuacaccaucuucaacaagacgcucauggaggccgacgcccacuacaaguccgugcgcaccuggaacgagaucauccccagcaaggggugccugcgggucggcgggcgcugccacccccacgugaacggcgucuucuucaacggcaucauccuggggcccgacggccacgugcucaucccggagaugcaguccagccugcugcagcagcacauggagcuccuggaguccagcgugaucccccugaugcacccccucgcggaccccuccaccgucuucaaggacggggacgaggccgagaacuucguggaggugcaccucccggacguccacaagcagaucagcggcguggaccuggggcugcccaacuggggcgaguacgugcuggucuccgccggcgugcugaucgcccucaugcugaucaucuuccugaugaccugcugcgggcgggugaaccgccccaagagcacgcagcacaaccucggcgggaccggccgggaggucuccgugaccccgcagagcgggaaggugaucuccagcugggaguccuacaagagcggcggcgagacccgccuguga

SEQ ID NO: 95138 - RNA, 1575 nt, Artificial Sequence
  derived and/or modified CDS sequence (opt1) from glycoprotein__RABV__GU937031.1
auggugccccaggcccugcuguucgucccccugcugguguucagcaugugcuucggcaaguuccccaucuacaccauccccgacaagcucgggcccugguccccgaucgacauccaccaccugagcugccccaacaaccugguggucgaggacgagggcugcaccaaccucuccggguucagcuacauggagcugaaggugggcuacaucuccgccaucaaggugaacggguucacgugcaccggcgucgugaccgaggcggagaccuacacgaacuucgugggcuacgucaccaccaccuucaagcgcaagcacuuccggcccacgcccgacgccugccgcgccgccuacaacuggaagauggccggggacccgcgguacgaggagagccugcacaaccccuaccccgacuaccacuggcuccgcaccgugaagaccaccaaggagucccuggugaucaucagccccuccgucgcggaccuggacccguacgacaagagccuccacucccggguguuccccaacggccgcugcagcgggaucacgaucuccagcaccuacugccccaccaaccacgacuacaccaucuggcugcccgagaacccgcggcugggcacguccugcgacaucuucaccaacagccgcgggaagcgggccuccaagggcagcaagaccugcggcuucguggacgagcgcgggcucuacaagucccugaagggcgccugcaagcugaagcucugcgggguccugggccugcggcucauggacggcaccuggguggccaugcaggcgagcgacgagacgaaguggugcccgcccgaccagcuggugaaccugcacgacuuccgcagcgacgagaucgagcaccucgucguggaggagcuggugaagaagcgggaggagugccuggacgcccucgaguccaucaugaccaccaagagcgucuccuuccgccggcugagccaccuccgcaagcucgugcccggguucggcaaggccuacaccaucuucaacaagacgcugauggaggccgacgcccacuacaaguccgugcggaccuggaacgagaucauccccagcaaggggugccugcgcgucggcgggcggugccacccccacgugaacggcgucuucuucaacggcaucauccucgggcccgacggccacgugcugauccccgagaugcaguccagccugcuccagcagcacauggagcugcuggaguccagcgugaucccgcucaugcacccccuggcggaccccuccaccgucuucaaggacggggacgaggccgagaacuucguggaggugcaccuccccgacguccacaagcagaucagcggcguggaccuggggcugccgaacuggggcaaguacgugcuggucuccgccggcgugcucaucgcccugaugcugaucaucuuccucaugaccugcugcgggcgcgugaaccggcccaagagcacgcagcacaaccugggcgggaccggccgcgaggucuccgugaccccgcagagcgggaaggugaucuccagcugggaguccuacaagagcggcggcgagacccgccuguga

SEQ ID NO: 95139 - RNA, 1575 nt, Artificial Sequence
  derived and/or modified CDS sequence (opt1) from glycoprotein__RABV__GU937032.1
auggugccccaggcccugcuguucgucccccugcuggccuucagcaugugcuucggcaaguuccccaucuacaccauccccgacaagcuggggcccugguccccgaucgacauccaccaccugagcugccccaacaaccuggugguggaggacgagggcugcaccaaccucuccggguucagcuacauggagcugaaggucggcuacaucuccgcgaucaaggugaacggguucacgugcaccggcguggucaccgaggccgagaccuacacgaacuucgugggcuacgugaccaccaccuucaagcgcaagcacuuccggcccacgcccgacgccugccgcgccgccuacaacuggaagauggcgggggacccgcgguacgaggagagccugcacaaccccuaccccgacuaccacuggcuccgcaccgucaagaccaccaaggagucccuggugaucaucagccccuccguggccgaccuggacccguacgacaagagccuccacucccgggucuuccccaacggcaagugcagcgggaucacgaucuccagcaccuacugccccaccaaccacgacuacaccaucuggcugcccgagaacccgcgccugggcacguccugcgacaucuucaccaacagccgggggaagcgcgccuccaagggcagcaagaccugcggcuucguggacgagcgggggcucuacaagucccugaagggcgccugcaagcugaagcucugcggggugcugggccugcgccucauggacgagaccugggucgcgaugcaggccagcgacgagacgaaguggugcccgcccgaccagcuggugaaccugcacgacuuccggagcgacgagaucgagcaccucguggucgaggagcuggugaagaagcgcgaggagugccuggacgcccucgaguccaucaugaccaccaagagcguguccuuccggcgccugagccaccuccggaagcucguccccggcuucgggaaggccuacaccaucuucaacaagacgcugauggaggccgacgcgcacuacaaguccgugcgcaccuggaacgagaucauccccagcaagggcugccugcgggucgggggccgcugccacccccacgugaacgggguguucuucaacggcaucauccucggccccgacgggcacguccugauccccgagaugcaguccagccugcuccagcagcacauggagcugcuggaguccagcgugaucccgcucaugcacccccuggccgaccccuccaccguguucaaggacggcgacgaggccgagaacuucgucgaggugcaccuccccgacgugcacaagcagaucagcggggucgaccugggccugccgaacugggggaaguacgugcugguguccgccggcguccucaucgcccugaugcugaucaucuuccucaugaccugcugcggccgggugaaccgccccaagagcacgcagcacaaccucgggggcaccgggcgggagguguccgucaccccgcagagcggcaaggugaucuccagcugggaguccuacaagagcgggggcgagacccgccuguga

SEQ ID NO: 95140 - RNA, 1575 nt, Artificial Sequence
  derived and/or modified CDS sequence (opt1) from glycoprotein__RABV__GU937033.1
auggugccccaggcccugcuguucgucccccugcugguguucagcaugugcuucggcaaguuccccaucuacaccauccccgacaagcucgggcccugguccccgaucgacauccaccaccugagcugccccaacaaccugguggucgaggacgagggcugcaccaaccucuccggguucagcuacauggagcugaaggugggcuacaucuccgccaucaaggugaacggguucacgugcaccggcgucgugaccgaggcggagaccuacacgaacuucgugggcuacgucaccaccaccuucaagcgcaagcacuuccggcccacgcccgacgccugccgcgccgccuacaacuggaagauggccggggacccgcgguacgaggagagccugcacaaccccuaccccgacuaccacuggcuccgcaccgugaagaccaccaaggagucccuggugaucaucagccccuccgucgcggaccuggacccguacgacaagagccuccacucccggguguuccccaacggcaagugcagcgggaucacgaucuccagcaccuacugccccaccaaccacgacuacaccaucuggcugcccgagaacccgcgccugggcacguccugcgacaucuucaccaacagccgggggaagcgcgccuccaagggcagcaagaccugcggcuucguggacgagcgggggcucuacaagucccugaagggcgccugcaagcugaagcucugcgggguccugggccugcgccucauggacggcaccuggguggccaugcaggcgagcgacgagacgaaguggugcccgcccgaccagcuggugaaccugcacgacuuccggagcgacgagaucgagcaccucgucguggaggagcuggugaagaagcgcgaggagugccuggacgcccucgaguccaucaugaccaccaagagcgucuccuuccggcgccugagccaccuccggaagcucgugcccggguucggcaaggccuacaccaucuucaacaagacgcugauggaggccgacgcccaccacaaguccgugcgcaccuggaacgagaucauccccagcaaggggugccugcgggucggcgggcgcugccacccccacgugaacggcgucuucuucaacggcaucauccucgggcccgacggccacgugcugauccccgagaugcaguccagccugcuccagcagcacauggagcugcuggaguccagcguggucccgcucaugcacccccuggcggaccccuccaccgugcugaaggacggggacgaggccgagaacuucguggagguccaccuccccgacgugcacaagcagaucagcggcguggaccuggggcugccgaacuggggcaaguacguccucguguccgccggcgugcugaucgcccugaugcucaucaucuuccugaugaccugcugcgggcgggucaaccgccccaagagcacgcagcacaaccugggcgggaccggccggaagguguccgugaccccgcagagcgggaaggucaucuccagcugggaguccuacaagagcggcggcgagacccgccuguga

SEQ ID NO: 95141 - RNA, 1575 nt, Artificial Sequence
  derived and/or modified CDS sequence (opt1) from glycoprotein__RABV__GU937034.1
auggugccccaggcccugcuguucgucccgcugcugguguucagcaugugcuucggcaaguuccccaucuacaccauccccgacaagcucgggcccugguccccgaucgacauccaccaccugagcugccccaacaaccugguggucgaggacgagggcugcaccaaccucuccggguucagcuacauggagcugaaggugggcuacaucuccgccaucaaggugaacggguucacgugcaccggcgucgugaccgaggcggagaccuacacgaacuucgugggcuacgucaccaccaccuucaagcgcaagcacuuccggcccacgcccgacgugugccgcgccgccuacaacuggaagauggccggggacccgcgguacgaggagagccugcacaaccccuaccccgacuaccacuggcuccgcaccgugaagaccaccaaggagucccuggucaucaucagccccuccguggccgaccuggacccguacgacaagagccuccacucccggguguuccccaacggcaagugcagcgggaucacgaucuccagcaccuacugccccaccaaccacgacuacaccaucuggcugcccgagaacccgcgccugggcacgcccugcgacaucuucaccaacucccgggggaagcgcgcgagcaagggcuccaagaccugcggcuucgucgacgagcgggggcucuacaagagccugaagggcgccugcaagcugaagcucugcggggugcugggccugcgccucauggacggcaccuggguggccaugcaggccuccgacgagacgaaguggugcccgcccgaccagcuggucaaccugcacgacuuccggagcgacgagaucgagcaccucgugguggaggagcuggucaagaagcgcgaggagugccuggacgcgcucgagagcaucaugaccaccaaguccgugagcuuccggcgccugucccaccuccggaagcucgugcccggguucggcaaggccuacaccaucuucaacaagacgcugauggaggccgacgcccacuacaagagcguccgcaccuggaacgagaucauccccuccaaggggugccugcgggugggcgggcgcugccacccccacgucaacggcguguucuucaacggcaucauccucgggcccgacggccacgugcugaucccggagaugcagagcucccugcuccagcagcacauggagcugcuggagagcuccgucaucccccucaugcacccccuggccgaccccagcaccguguucaaggacggggacgaggcggagaacuucguggagguccaccucccggacgugcacaagcagaucuccggcguggaccuggggcugcccaacuggggcaaguacguccuggugagcgccggcgugcucaucgcccugaugcugaucaucuuccucaugaccugcugcgggcgggucaaccagcccaaguccacgcagcacaaccugggcgggaccggccgcgaggugagcgugaccccgcaguccgggaaggucaucagcuccugggagagcuacaaguccggcggcgagacccggcuguga

SEQ ID NO: 95142 - RNA, 1575 nt, Artificial Sequence
  derived and/or modified CDS sequence (opt1) from glycoprotein__RABV__HE801606.1
auggugccccagguccugcuguucgugccgcugcugguguucagcaugugcuucggcaaguuccccaucuacaccauccccgacaagcucgggcccugguccccgaucgacauccaccaccugagcugccccaacaaccuggucguggaggacgagggcugcaccaaccucuccggguucagcuacauggagcugaaggugggcuacaucuccgccaucaaggucaacggguucacgugcaccggcguggugaccgaggccgagaccuacacgaacuucgucggcuacgugaccaccaccuucaagcgcaagcacuuccggcccacgcccgacgcgugccgcgccgccuacaacuggaagcuggccggggacccgcgguacgaggagagccuccacaaccccuaccccgacuaccacuggcugcgcaccgugaagaccaccaaggagucccuggucaucaucagccccuccguggccgaccucgacccguacgacaagagccugcacucccggguguuccccagcggcaagugccuggggaucacgaucuccagcaccuacugcuccaccaaccacgacuacaccaucuggaugcccgagaacccccgccucggcacgagcugcgacaucuucaccaacucccgggggaagcgcgcgagcaagggcuccaagaccugcggcuucgucgacgagcgggggcuguacaagagccugaagggcgccugcaagcucaagcugugcggggugcugggccuccgccugauggacggcaccuggguggccaugcagacgagcgacgagaccaaguggugcccgcccgaccagcuggucaaccuccacgacuuccgguccgacgagaucgagcaccuggugguggaggagcuggucaagaagcgcgaggagugccucgacgcccuggagagcaucaugaccaccaaguccgugagcuuccggcgcuucucccaccuccggaagcucgugcccggguucggcaaggcguaccccaucuucaacaagacgcugauggaggccgacgcccacuacaagagcguccgcaccuggaacgagaucaucccguccaaggggugccugcgggugggcgggcgcugccacccccacgucaacggcguguucuucaacggcaucauccucgggcccgacggccacgugcugauccccgagaugcagagcucccugcuccagcagcacauggagcugcuggagagcuccgucaucccgcucaugcacccccuggccgaccccagcaccguguucaaggacggggacgaggccgaggacuucguggagguccaccuccccgacgugcacaagcagaucuccggcguggaccuggggcugccgagcuggggcaaguacguccugguguccgcgggcgugcucgucgugcugaugcugaccaucuucacgaugaccugcugcgggcgggugcaccgccccaagagcacccagcacucccucggcgggaccggccggaaggucagcgugacgucccagagcgggaaggugaucagcuccugggagagcuacaaguccggcggcgagacccgccuguga

SEQ ID NO: 95143 - RNA, 1575 nt, Artificial Sequence
  derived and/or modified CDS sequence (opt1) from glycoprotein__RABV__HE801607.1
auggugccgcagguccacauguucgugccgcugcucguguacgccaugugcuucggcaaguuccccaucuacaccauccccgacaagcuggggcccuggagcccgaucgacauccaccaccuguccugccccaacaaccucgucguggaggacgagggcugcaccaaccugagcggguucuccuacauggagcugaaggugggcuacaucagcgccaucaaggucuccggguucacgugcaccggcguggugaccgaggcggagaccuacacgaacuucgucggcuacgugaccaccaccuucaagcgcaagcacuuccggcccacgcccgacgccugccgcgccgccuacaacuggaagcucgccggggacccgcgguacgaggagagccugcacaaccccuaccccgacuaccacuggcugcgcaccgugaagaccaccaaggagucccucgucaucaucagccccuccguggcggaccuggacccguacgacaagagccugcacucccggguguuccccagcggcaagugccucgggaucacgaucuccagcaccuacugcuccaccaaccacgacuacaccaucuggaugcccgagaacccccgccugggcacgagcugcgacaucuucaccaacucccgggggaagcgcgccagcaagggcuccaagaccugcggcuucgucgacgagcgggggcuguacaagagccucaagggcgccugcaagcugaagcugugcggggugcucggccugcgccugauggacggcaccuggguggccaugcagacgagcgacgagaccaaguggugcccgcccgaccagcucgucaaccugcacgacuuccgguccgacgagaucgagcaccuggugguggaggagcucgucaagaagcgcgaggagugccuggacgcgcuggagagcaucaugaccaccaaguccgugagcuuccggcgccucucccaccuccggaagcuggugcccggguucggcaaggccuacacgaucuucaacaagacccugauggaggccgacgcccacuacaagagcguccgcaccuggaacgagaucauccccuccaaggggugccugcgggugggcgggcgcugccacccgcacgucaacggcguguucuucaacggcaucauccuggggcccgacggccacgugcucauccccgagaugcagagcucccugcugcagcagcacauggagcuccuggagagcuccgucaucccccugaugcacccgcucgccgaccccagcaccguguucaaggacggggacgaggcggaggacuucguggagguccaccuccccgacgugcacaagcagaucuccggcguggaccuggggcugcccagcuggggcaaguacguccugguguccgccggcgugcuggucgugcucaugcuggccaucuucaucaugacgugcugcgggcgggugcaccgccccaagagcacccagcacucccugggcgggaccggccggaaggccagcgucaccucccagagcgggaaggugaucagcuccugggagagcuacaaguccggcggcgagacgcgccucuga

SEQ ID NO: 95144 - RNA, 1575 nt, Artificial Sequence
  derived and/or modified CDS sequence (opt1) from glycoprotein__RABV__HE801608.1
auggugccgcagguccuccuguucgugccgcugcugguguucagcaugugcuucggcaaguuccccaucuacaccauccccgacaagcucgggcccugguccccgaucgacauccaccaccugagcugccccaacaaccuggucguggaggacgagggcugcaccaaccucuccggguucagcuacauggagcugaaggugggcuacaucuccgccaucaaggucaacggguucacgugcaccggcguggugaccgaggccgagaccuacacgaacuucgucggcuacgugaccaccaccuucaagcgcaagcacuuccggcccacgcccgacgcgugccgcaccgccuacaacuggaagcuggccggggacccgcgguacgaggagagccuccacaaccccuaccccgacuaccacuggcugcgcaccgugaagaccacgaaggagucccuggucaucaucagccccuccguggccgaccucgacccguacgacaagagccugcacucccggguguuccccagcggcaagugccuggggaucaccaucuccagcaccuacugcuccaccaaccacgacuacacgaucuggaugcccgagaacccccgccucggcaccagcugcgacaucuucaccaacucccgggggaagcgcgccagcaagggcuccaagaccugcggcuucgucgacgagcgggggcuguacaagagccugaagggcgcgugcaagcucaagcugugcggggugcugggccuccgccugauggacggcacguggguggccaugcagaccagcgacgagaccaaguggugcccgcccgaccagcuggucaaccuccacgacuuccgguccgacgagaucgagcaccuggugguggaggagcuggucaagaagcgcgaggagugccucgacgcccuggagagcaucaugaccacgaaguccgugagcuuccggcgccugucccaccuccggaagcuggugcccggguucggcaaggccuacaccaucuucaacaagacccugauggaggcggacgcccacuacaagagcguccgcaccuggaacgagaucauccccuccaaggggugccuccgggugggcgggcgcugccacccgcacgucaacggcguguucuucaacggcaucauccuggggcccgacggccacgugcugauccccgagaugcagagcucccuccugcagcagcacauggagcugcucgagagcuccgucaucccccugaugcacccgcuggccgaccccagcacgguguucaaggacggggacgaggccgaggacuucguggagguccaccuccccgacgugcacaagcagaucuccggcguggaccuggggcugcccagcuggggcaaguacguccucguguccgccggcgugcuggucgugcugaugcucaccaucuucaucaugaccugcugcgggcgggugcaccgccccaagagcacccagcacucccugggcgggacgggccggaaggucagcgugaccucccagagcgggaaggugaucagcuccugggagagcuacaaguccggcggcgagacccgccuguga

SEQ ID NO: 95145 - RNA, 1575 nt, Artificial Sequence
  derived and/or modified CDS sequence (opt1) from glycoprotein__RABV__HE801609.1
auggugccccagguccugcuguucgugccgcugcugguguucagcaugugcuucggcaaguuccccaucuacaccauccccgacaagcucgggcccugguccccgaucgacauccaccaccugagcugccccaacaaccuggucguggaggacgagggcugcaccaaccucuccggguucagcuacauggagcugaaggugggcuacaucuccgccaucaaggucaacgggcugacgugcaccggcguggugaccgaggccgagaccuacacgaacuucgucggcuacgugaccaccaccuucaagcgcaagcacuuccggcccacgcccgacgcgugccgcgccgccuacaacuggaagcucgccggggacccgcgguacgaggagagccugcacaaccccuaccccgacuaccacuggcugcgcaccgugaagaccaccaaggagucccucgucaucaucagccccuccguggccgaccuggacccguacgacaagagccugcacucccggguguuccccagcggcaagugccucgggaucacgaucuccagcaccuacugcuccaccaaccacgacuacaccaucuggaugcccgagaacccccgccugggcacgagcugcgacaucuucaccaacucccgggggaagcgcgcgagcaagggcuccaagaccugcggcuucgucgacgagcgggggcuguacaagagccucaagggcgccugcaagcugaagcugugcggggugcucggcccgcgccugauggacggcaccuggguggccaugcagacgagcgacgagaccaaguggugcccgcccgaccagcuggucaaccuccacgacuuccgguccgacgagaucgagcaccuggugguggaggagcuggucaagaagcgcgaggagugccucgacgcccuggagagcaucaugaccaccaagucccugagcuuccggcgccucucccaccuccggaagcuggugcccggguucggcaaggcguacacgaucuucaacaagacccucauggaggccgacgcccacuacaagagcgugcgcaccuggaacgagaucauccccuccaaggggugccugcgggucggcgggcgcugccacccccacgugaacggcgucuucuucaacggcaucauccuggggcccgacggccacgugcucauccccgagaugcagagcucccugcugcagcagcacauggagcuccuggagagcuccgugaucccgcugaugcacccccucgccgaccccagcaccgucuucaaggacggggacgaggccgaggacuucguggaggugcaccuccccgacguccacaagcagaucuccggcguggaccuggggcugccgagcuggggcaaguacgugcuggucuccgcgggcgugcuggugguccucaugcugacgaucuucaucaugaccugcugcgggcgggugcaccgccccaagagcacccagcacucccugggcgggaucggccggaaggugagcgucaccucccagagcgggaaggugaucagcuccugggagagcuacaaguccggcggcgagacgcgccuguga

SEQ ID NO: 95146 - RNA, 1575 nt, Artificial Sequence
  derived and/or modified CDS sequence (opt1) from glycoprotein__RABV__HE801610.1
auggugccgcagguccugcuguucgugccgcugcugguguucagcaugugcuucggcaaguuccccaucuacaccauccccgacaagcucgggcccugguccccgaucgacauccaccaccugagcugccccaacaaccuggucguggaggacgagggcugcaccaaccucuccggguucagcuacauggagcugaaggugggcuacaucuccgccaucaaggucaacggguucacgugcaccggcguggugaccgaggccgagaccuacacgaacuucgucggcuacgugaccaccaccuucaagcgcaagcacuuccggcccacgcccgacgcgugccgcgccgccuacaacuggaagcuggccggggacccgcgguacgaggagagccuccugaaccccuaccccgacuaccacuggcugcgcaccgugaagaccaccaaggagucccucgucaucaucagccccuccguggccgaccuggacccguacgacaagagccugcacuccaagguguuccccagcggcaagugccucgggaucacgaucuccagcaccuacugcuccaccaaccacgacuacaccaucuggaugcccgagaacccccggcugggcacgagcugcgacaucuucaccaacucccgcgggaagcgggcgagcaagggcuccaagaccugcggcuucgucgacgagcgcgggcuguacaagagccucaagggcgccugcaagcugaagcugugcggggugcucggccugcggcugauggacggcaccuggguggccaugcagacgagcgacgagaccaaguggugcccgcccgaccagcucgucaaccugcacgacuuccgcuccgacgagaucgagcaccuggugguggaggagcucgucaagaagcgggaggagugccuggacgcccuggagagcaucaugaccaccaaguccgugagcuuccgccggcucucccaccuccgcaagcuggugcccggguucggcaaggcguacacgaucuucaacaagacccucauggaggccgacgcccacuacaagagcguccggaccuggaacgagaucauccccuccaaggggugccugcgcgugggcgggcggugccacccgcacgucaacggcguguucuucaacggcaucauccuggggcccgacggccacgugcucauccccgagaugcagagcucccugcugcagcagcacauggagcuccuggagagcuccgucaucccccugaugcacccgcucgccgaccccagcaccguguucaaggacggggacgaggccgaggacuucguggagguccaccuccccgacgugcacaagcagaucuccggcguggaccuggggcugcccagcuggggcaaguacguccugguguccgcgggcgugcuggucgugcucaugcuggccaucuucaucaugacgugcugcgggcgcgugcaccagcccaagagcacccagcacucccugggcgggaccggccggaaggucagcgugaccucccagagcgggaaggugaucagcuccugggagagcuacaaguccggcggcgagacgcgccuguga

SEQ ID NO: 95147 - RNA, 1575 nt, Artificial Sequence
  derived and/or modified CDS sequence (opt1) from glycoprotein__RABV__HE801611.1
auggugccgcagguccuccuguucgugccgcugcugguguucagcaugugcuucggcaaguuccccaucuacaccauccccgacaagcucgggcccugguccccgaucgacauccaccaccugagcugccccaacaaccuggucguggaggacgagggcugcaccaaccucuccggguucagcuacauggagcugaaggugggcuacaucuccgccaucaaggucaacggguucacgugcaccggcguggugaccgaggccgagaccuacacgaacuucgucggcuacgugaccaccaccuucaagcgcaagcacuuccggcccacgcccgacgcgugccgcgccgccuacaacuggaagcuggccggggacccgcgguacgaggagagccuccacaaccccuaccccgacuaccacuggcugcgcaccgugaagaccaccaaggagucccuggucaucaucagccccuccguggccgaccucgacccguacgacaagagccugcacucccggguguuccccagcggcaagugccuggggaucacgaucuccagcaccuacugcuccaccaaccacgacuacaccaucuggaugcccgagaacccccgccucggcacgagcugcgacaucuucaccaacucccgggggaagcgcgcgagcaagggcuccaagaccugcggcuucgucgacgagcgggggcuguacaagagccugaagggcgccugcaagcucaagcugugcggggugcugggccuccgccugauggacggcaccuggguggccaugcagacgagcgacgagaccaaguggugcccgcccgaccagcuggucaaccuccacgacuuccgguccgacgagaucgagcaccuggugguggaggagcuggucaagaagcgcgaggagugccucgacgcccuggagagcaucaugaccaccaaguccgugagcuuccggcgccugucccaccuccggaagcuggugcccggguucggcaaggcguacacgaucuucaacaagacccugauggaggccgacgcccacuacaagagcauccgcaccuggaacgagaucauccccuccaaggggugccuccgggucggcgggcgcugccacccgcacgugaacggcgucuucuucaacggcaucauccuggggcccgacggccacgugcugauccccgagaugcagagcucccuccugcagcagcacauggagcugcucgagagcuccgugaucccccugaugcacccgcuggccgaccccagcaccgucuucaaggacggggacgaggccgaggacuucguggaggugcaccuccccgacguccacaagcagaucuccggcguggaccuggggcugcccagcuggggcaaguacgugcucgucuccgcgggcgugcuggugguccugaugcucacgaucuucaucaugaccugcugcgggcgggugcaccgccccaagagcaugcagcacucccugggcgggaccggccggaaggugagcgucaccucccagagcgggaaggugaucagcuccugggagagcuacaaguccggcggcgagacgcgccuguga

SEQ ID NO: 95148 - RNA, 1575 nt, Artificial Sequence
  derived and/or modified CDS sequence (opt1) from glycoprotein__RABV__HE801612.1
auggugccgcagguccuccuguucgugccgcugcugguguucagcaugugcuucggcaaguuccccaucuacaccauccccgacaagcucgggcccugguccccgaucgacauccaccaccugagcugccccaacaaccuggucguggaggacgagggcugcaccaaccucuccggguucagcuacauggagcugaaggugggcuacaucuccgccaucaaggucaacggguucacgugcaccggcguggugaccgaggccgagaccuacacgaacuucgucggcuacgugaccaccaccuucaagcgcaagcacuuccggcccacgcccgacgcgugccgcgccgccuacaacuggaagcuggccggggacccgcgguacgaggagagccuccacaaccccuaccccgacuaccacuggcugcgcaccgugaagaccaccaaggagucccuggucaucaucagccccuccguggccgaccucgacccguacgacaagagccugcacucccggguguuccccagcggcaagugccuggggaucacgaucuccagcaccuacugcuccaccaaccacgacuacaccaucuggaugcccgagaacccccgccucggcacgagcugcgacaucuucaccaacucccgggggaagcgcgcgagcaagggcuccaagaccugcggcuucgucgacgagcgggggcuguacaagagccugaagggcgccugcaagcucaagcugugcggggugcugggccuccgccugauggacggcaccuggguggccaugcagacgagcgacgagaccaaguggugcccgcccgaccagcuggucaaccuccacgacuuccgguccgacgagaucgagcaccuggugguggaggagcuggucaagaagcgcgaggagugccucgacgcccuggagagcaucaugaccaccaaguccgugagcuuccggcgccugucccaccuccggaagcuggugcccggguucggcaaggcguacacgaucuucaacaagacccugauggaggccgacgcccacuacaagagcguccgcaccuggaacgagaucauccccuccaaggggugccuccgggugggcgggcgcugccacccgcacgucaacggcguguucuucaacggcaucauccuggggcccgacggccacgugcugauccccgagaugcagagcucccuccugcagcagcacauggagcugcucgagagcuccgucaucccccugaugcacccgcuggccgaccccagcaccguguucaaggacggggacgaggccgaggacuucguggagguccaccuccccgacgugcacaagcagaucuccggcguggaccuggggcugcccagcuggggcaaguacguccucguguccgcgggcgugcuggucgugcugaugcucacgaucuucaucaugaccugcugcgggcgggugcaccgccccaagagcacccagcacucccugggcgggaccggccggaaggucagcgugacgucccagagcgggaaggugaucagcuccugggagagcuacaaguccggcggcgagacccgccuguga

SEQ ID NO: 95149 - RNA, 1575 nt, Artificial Sequence
  derived and/or modified CDS sequence (opt1) from glycoprotein__RABV__HE801613.1
auggugccgcagguccuccuguucgugccgcugcugguguucagcaugugcuucggcaaguuccccaucuacaccauccccgacaagcucgggcccugguccccgaucgacauccaccaccugagcugccccaacaaccuggucguggaggacgagggcugcaccaaccucuccggguucagcuacauggagcugaaggugggcuacaucuccgccaucaaggucaacggguucacgugcaccggcguggugaccgaggccgagaccuacacgaacuucgucggcuacgugaccaccaccuucaagcgcaagcacuuccggcccacgcccgacgcgugccgcgccgccuacaacuggaagcuggccggggacccgcgguacgaggagagccuccacaaccccuaccccgacuaccacuggcugcgcaccgugaagaccaccaaggagucccuggucaucaucagccccuccguggccgaccucgacccguacgacaagagccugcacuccaagguguuccccagcggcaagugccuggggaucacgaucuccagcaccuacugcuccaccaaccacgacuacaccaucuggaugcccgagaacccccggcucggcacgagcugcgacaucuucaccaacucccgcgggaagcgggcgagcaagggcuccaagaccugcggcuucgucgacgagcgcgggcuguacaagagccugaagggcgccugcaagcucaagcugugcggggugcugggccuccggcugauggacggcaccuggguggccaugcagacgagcgacgagaccaaguggugcccgcccgaccagcuggucaaccuccacgacuuccgcuccgacgagaucgagcaccuggugguggaggagcuggucaagaagcgggaggagugccucgacgcccuggagagcaucaugaccaccaaguccgugagcuuccgccggcugucccaccuccgcaagcuggugcccggguucggcaaggcguacacgaucuucaacaagacccugauggaggccgacgcccacuacaagagcguccggaccuggaacgagaucauccccuccaaggggugccuccgcgugggcgggcggugccacccgcacgucaacggcguguucuucaacggcaucauccuggggcccgacggccacgugcugauccccgagaugcagagcucccuccugcagcagcacauggagcugcucgagagcuccgucaucccccugaugcacccgcuggccgaccccagcaccguguucaaggacggggacgaggccgaggacuucguggagguccaccuccccgacgugcacaagcagaucuccggcguggaccuggggcugcccagcuggggcaaguacguccucguguccgcgggcgugcuggucgugcugaugcucgccaucuucaucaugacgugcugcgggcgcgugcaccagcccaagagcacccagcacucccugggcgggaccggccggaaggucagcgugaccucccagagcgggaaggugaucagcuccugggagagcuacaaguccggcggcgagacgcgccuguga

SEQ ID NO: 95150 - RNA, 1575 nt, Artificial Sequence
  derived and/or modified CDS sequence (opt1) from glycoprotein__RABV__HE801614.1
auggugccgcagguccugcuguucgugccgcugcugguguucagcaugugcuucggcaaguuccccaucuacaccauccccgacaagcucgggcccugguccccgaucgacauccaccaccugagcugccccaacaaccuggucguggaggacgagggcugcaccaaccucuccggguucagcuacauggagcugaaggugggcuacaucuccgccaucaaggucaacggguucacgugcaccggcguggugaccgaggccgagaccuacacgaacuucgucggcuacgugaccaccaccuucaagcgcaagcacuuccggcccacgcccgacgcgugccgcgccgccuacaacuggaagauggccggggacccgcgguacgaggagagccugcacaaccccuaccccgacuaccacuggcuccgcaccgugaagaccaccaaggagucccuggucaucaucagccccuccguggccgaccuggacccguacgacaagagccuccacucccggguguuccccagcggcaagugccuggggaucacgaucuccagcaccuacugcuccaccaaccacgacuacaccaucuggaugcccgagaacccccgccugggcacgagcugcgacaucuucaccaacucccgggggaagcgcgcgagcaagggcuccaagaccugcggcuucgucgacgagcgggggcucuacaagagccugaagggcgccugcaagcugaagcucugcggggugcugggccugcgccucauggacggcaccuggguggccaugcagacgagcgacgagaccaaguggugcccgcccgaccagcuggucaaccugcacgacuuccgguccgacgagaucgagcaccucgugguggaggagcuggucaagaagcgcgaggagugccuggacgcccucgagagcaucaugaccaccaaguccgugagcuuccggcgccugucccaccuccggaagcucgugcccggguucggcaaggcguacacgaucuucaacaagacccugauggaggccgacgcccacuacaagagcguccgcaccuggaacgagaucauccccuccaaggggugccugcgggugggcgggcgcugccacccgcacgucaacggcguguucuucaacggcaucauccucgggcccgacggccacgugcugauccccgagaugcagagcucccugcuccagcagcacauggagcugcuggagagcuccgucaucccccucaugcacccgcuggccgaccccagcaccguguucaaggacggggacgaggccgaggacuucguggagguccaccuccccgacgugcacaagcagaucuccggcguggaccuggggcugcccagcuggggcaaguacguccugguguccgcgggcgugcucgucgugcugaugcugacgaucuucaucaugaccugcugcgggcgggugcgccggcccaagagcacccagcacucccucggcgggaccggccgcaaggucagcgugacgucccagagcgggaaggugaucagcuccugggagagcuacaaguccggcggcgagacccgccuguga

SEQ ID NO: 95151 - RNA, 1575 nt, Artificial Sequence
  derived and/or modified CDS sequence (opt1) from glycoprotein__RABV__HE801615.1
auggugccccagguccuccuguucgugccgcugcugguguucagcaugugcuucggcaaguuccccaucuacaccauccccgacaagcucgggcccugguccccgaucgacauccaccaccugagcugccccaacaaccuggucguggaggacgagggcugcaccaaccucuccggguucagcuacauggagcugaaggugggcuacaucuccgccaucaaggucaacggguucacgugcaccggcguggugaccgaggccgagaccuacacgaacuucgucggcuacgugaccaccaccuucaagcgcaagcacuuccggcccacgcccgacgcgugccgcaccgccuacaacuggaagcuggccggggacccgcgguacgaggagagccuccacaaccccuaccccgacuaccacuggcugcgcaccgugaagaccacgaaggagucccuggucaucaucagccccuccguggccgaccucgacccguacgacaagagccugcacucccggguguuccccagcggcaagugccuggggaucaccaucuccagcaccuacugcuccaccaaccacgacuacacgaucuggaugcccgagaacccccgccucggcaccagcugcgacaucuucaccaacucccgggggaagcgcgccagcaagggcuccaagaccugcggcuucgucgacgagcgggggcuguacaagagccugaagggcgcgugcaagcucaagcugugcggggugcugggccuccgccugauggacggcacguggguggccaugcagaccagcgacgagaccaaguggugcccgcccgaccagcuggucaaccuccacgacuuccgguccgacgagaucgagcaccuggugguggaggagcuggucaagaagcgcgaggagugccucgacgcccuggagagcaucaugaccacgaaguccgugagcuuccggcgccugucccaccuccggaagcuggugcccggguucggcaaggccuacaccaucuucaacaagacccugauggaggcggacgcccacuacaagagcguccgcaccuggaacgagaucauccccuccaaggggugccuccgggugggcgggcgcugccaccaccacgucaacggcguguucuucaacggcaucauccuggggccggacggccacgugcugauccccgagaugcagagcucccuccugcagcagcacauggagcugcucgagagcuccgucaucccccugaugcacccccuggccgacccgagcacgguguucaaggacggggacgaggccgaggacuucguggagguccaccuccccgacgugcacaagcagaucuccggcguggaccuggggcugcccagcuggggcaaguacguccucguguccgccggcgugcuggucgugcugaugcucaccaucuucaucaugaccugcugcgggcgggugcaccgccccaagagcacccagcacucccugggcgggacgggccggaaggucagcgugaccucccagagcgggaaggugaucagcuccugggagagcuacaaguccggcggcgagacccgccuguga

SEQ ID NO: 95152 - RNA, 1575 nt, Artificial Sequence
  derived and/or modified CDS sequence (opt1) from glycoprotein__RABV__HE801616.1
auggugccccagguccugcuguucgugccgcugcugguguucagcaugugcuucggcaaguuccccaucuacaccauccccgacaagcucgggcccugguccccgaucgacauccaccaccugagcugccccaacaaccuggucguggaggacgagggcugcaccaaccucuccggguucagcuacauggagcugaaggugggcuacaucuccgccaucaaggucaacggguucacgugcaccggcguggugaccgaggccgagaccuacacgaacuucgucggcuacgugaccaccaccuucaagcgcaagcacuuccggcccacgcccgacgcgugccgcgccgccuacaacuggaagauggccggggacccgcgguacgaggagagccugcacaaccccuaccccgacuaccacuggcuccgcaccgugaagaccaccaaggagucccuggucaucaucagccccuccguggccgaccuggacccguacgacaagagccuccacucccggguguuccccagcggcaagugccuggggaucacgaucuccagcaccuacugcuccaccaaccacgacuacaccaucuggaugcccgagaacccccgccugggcacgagcugcgacaucuucaccaacucccgggggaagcgcgcgagcaagggcuccaagaccugcggcuucgucgacgagcgggggcucuacaagagccugaagggcgccugcaagcugaagcucugcggggugcugggccugcgccucauggacggcaccuggguggccaugcagacgagcgacgagaccaaguggugcccgcccgaccagcuggucaaccugcacgacuuccgguccgacgagaucgagcaccucgugguggaggagcuggucaagaagcgcgaggagugccuggacgcccucgagcccaucaugaccaccaagagcguguccuuccggcgccugagccaccuccggaagcucgugcccggguucggcaaggcguacacgaucuucaacaagacccugauggaggccgacgcccacuacaaguccguccgcaccuggaacgagaucaucccgagcaaggggugccugcgggugggcgggcgcugccacccccacgucaacggcguguucuucaacggcaucauccucgggcccgacggccacgugcugauccccgagaugcaguccagccugcuccagcagcacauggagcugcuggaguccagcgucaucccgcucaugcacccccuggccgaccccuccaccguguucaaggacggggacgaggccgaggacuucguggagguccaccuccccgacgugcacaagcagaucagcggcguggaccuggggcugccguccuggggcaaguacguccuggugagcgcgggcgugcucgucgugcugaugcugacgaucuucaucaugaccugcugcgggcgggugcgccggcccaaguccacccagcacagccucggcgggaccggccgcaaggucuccgugacgagccaguccgggaaggugaucagcagcugggaguccuacaagagcggcggcgagacccgccuguga

SEQ ID NO: 95153 - RNA, 1575 nt, Artificial Sequence
  derived and/or modified CDS sequence (opt1) from glycoprotein__RABV__HE801617.1
auggugccgcagguccugcuguucgugccgcugcugguguucagcaugugcuucggcaaguuccccaucuacaccauccccgacaagcucgggcccugguccccgaucgacauccaccaccugagcugccccaacaaccuggucguggaggacgagggcugcaccaaccucuccggguucagcuacauggagcugaaggugggcuacaucuccgccaucaaggucaacggguucacgugcaccggcguggugaccgaggccgagaccuacacgaacuucgucggcuacgugaccaccaccuucaagcgcaagcacuuccggcccacgcccgacgcgugccgcgccgccuacaacuggaagauggccggggacccgcgguacgaggagagccugcacaaccccuaccccgacuaccacuggcuccgcaccgugaagaccaccaaggagucccuggucaucaucagccccuccguggccgaccuggacccguacgacaagagccuccacucccggguguuccccagcggcaagugccuggggaucacgaucuccagcaccuacugcuccaccaaccacgacuacaccaucuggaugcccgagaacccccgccugggcacgagcugcgacaucuucgcgaacucccgggggaagcgcgccagcaagggcuccaagaccugcggcuucgucgacgagcgggggcucuacaagagccugaagggcgccugcaagcugaagcucugcggggugcugggccugcgccucauggacggcaccuggguggccaugcagaccagcgacgagacgaaguggugcccgcccgaccagcuggucaaccugcacgacuuccgguccgacgagaucgagcaccucgugguggaggagcuggucaagaagcgcgaggagugccuggacgcgcucgagagcaucaugaccaccaaguccgugagcuuccggcgccugucccaccuccggaagcucgugcccggguucggcaaggccuacaccaucuucaacaagacgcugauggaggccgacgcccacuacaagagcguccgcaccuggaacgagaucauccccuccaaggggugccugcgggugggcgggcgcugccacccgcacgucaacggcguguucuucaacggcaucauccucgggcccgacggccacgugcugauccccgagaugcagagcucccugcuccagcagcacauggagcugcuggagagcuccgucaucccccucaugcacccgcuggccgaccccagcaccguguucaaggacggggacgaggcggaggacuucguggagguccaccuccccgacgugcacaagcagaucuccggcguggaccuggggcugcccagcuggggcaaguacguccugguguccgccggcgugcucgucgugcugaugcugaccaucuucaucaucacgugcugcgggcgggugcaccgccccaagagcauccagcacucccucggcgggaccggccggaaggucagcgugaccucccagagcgggaaggugaucagcuccugggagagcuacaaguccggcggcgagacccgccuguga

SEQ ID NO: 95154 - RNA, 1575 nt, Artificial Sequence
  derived and/or modified CDS sequence (opt1) from glycoprotein__RABV__HE802675.1
auggugccgcagguccugcuguucgugccgcugcugguguucagcaugugcuucggcaaguuccccaucuacaccauccccgacaagcucgggcccugguccccgaucgacauccaccaccugagcugccccaacaaccuggucguggaggacgagggcugcaccaaccucuccggguucagcuacauggagcugaaggugggcuacaucuccgccaucaaggucaacggguucacgugcaccggcguggugaccgaggccgagaccuacacgaacuucgucggcuacgugaccaccaccuucaagcgcaagcacuuccggcccacgcccgacgcgugccgcgccgccuacaacuggaagauggccggggacccgcgguacgaggagagccugcacaaccccuaccccgacuaccacuggcuccgcaccgugaagaccaccaaggagucccuggucaucaucagccccuccguggccgaccuggacccguacgacaagagccuccacucccggguguuccccagcggcaagugcuccgggaucacgaucagcuccaccuacugcagcaccaaccacgacuacaccaucuggaugcccgagaacccccgccugggcacguccugcgacaucuucaccaacagccgggggaagcgcgcguccaagggcggcaagaccugcggguucgucgacgagcggggccuguacaagagccucaagggggccugcaagcugaagcugugcggcgugcucggccugcgccugauggacgggaccuggguggccaugcagacgagcgacgagaccaaguggugcccgcccgaccagcucgucaaccugcacgacuuccgguccgacgagaucgagcaccuggugguggaggagcucgucaagaagcgcgaggagugccuggacgcccuggagagcaucaugaccaccaaguccgugagcuuccggcgccucucccaccuccggaagcuggugcccggcuucgggaaggcguacacgaucuucaacaagacccucauggaggccgacgcccacuacaagagcguccgcaccuggaacgagaucauccccuccaagggcugccugcgggucgggggccgcugccacccgcacgugaagggcguguucuucaacgggaucauccugggccccgacgggcacgugcucauccccgagaugcagagcucccugcugcagcagcacauggagcuccuggagagcuccgucaucccccugaugcacccgcucgccgaccccagcaccguguucaaggacggcgacgaggccgaggacuucguggagguccaccuccccgacgugcacaagcagaucuccgggguggaccugggccugcccagcuggggcaaguacguccugguguccgcgggggugcuggucgugcucaugcugacgaucuucaucaucacgugcugcggccggauccaccgccccaagagcacccagcacgggcugggcgggaccggccggaagguguccgucaccagccaguccggcaaggugaucagcagcugggaguccuacaagagcgggggcgagacccgccucuga

SEQ ID NO: 95155 - RNA, 1575 nt, Artificial Sequence
  derived and/or modified CDS sequence (opt1) from glycoprotein__RABV__HM535790.1
auggugccccagguccugcuguucgugcugcugcucggcuucagccugugcuucgggaaguucccgaucuacaccauccccgacgagcugggccccuggucccccaucgacauccaccaccucagcugcccgaacaaccugguggucgaggacgaggggugcaccaaccuguccgaguucagcuacauggagcucaaggugggcuacaucuccgccaucaaggugaacggguucacgugcaccggcgucgugaccgaggccgagaccuacacgaacuucgugggcuacgucaccaccaccuucaagcgcaagcacuuccggcccacgcccgacgcgugccgcgccgccuacaacuggaagauggccggggacccccgguacgaggagagccugcacaacccguaccccgacuaccacuggcugcgcaccgugcggaccaccaaggagucccucaucaucaucagccccuccgugacggaccuggaccccuacgacaagagccugcacucccgcgucuucccgggcgggaagugcagcggcaucaccguguccagcaccuacugcuccaccaaccacgacuacacgaucuggaugcccgagaacccccggccccgcaccccgugcgacaucuucaccaacagccgggggaagcgcgccuccaacggcaacaagaccugcggcuucguggacgagcgggggcucuacaagagccugaagggcgcgugccgccugaagcucugcgggguccugggccugcggcucauggacggcacguggguggccaugcagaccuccgacgagaccaaguggugcccgcccgaccagcuggugaaccugcacgacuuccgcagcgacgagaucgagcaccucgucguggaggagcuggugaagaagcgggaggagugccuggacgcccucgagagcaucaugaccacgaaguccgucagcuuccgccggcugucccaccuccgcaagcucgugcccggguucggcaaggccuacaccaucuucaacaagacccugauggaggcggacgcccacuacaagagcgugcggaccuggaacgagaucauccccuccaaggggugccugaaggucggcgggcgcugccacccccacgugaacggcgucuucuucaacggcaucauccucgggcccgacgaccacgugcugauccccgagaugcagagcucccugcuccagcagcacauggagcugcuggagagcuccgugaucccgcucaugcacccccuggccgaccccagcacggucuucaaggagggcgacgaggccgaggacuucguggaggugcaccuccccgacgucuacaagcagaucuccgggguggaccugggccugccgaacugggggaaguacgugcugaugaccgccggcgcgaugaucggccucguccugaucuucagccugaugaccuggugccggcgcgccaaccgccccgaguccaagcagcggagcuucgggggcaccgggggcaacguguccgugacgagccaguccgggaaggucauccccagcugggaguccuacaagagcggcggcgagauccgccucuga

SEQ ID NO: 95156 - RNA, 1575 nt, Artificial Sequence; identical to SEQ ID NO: 95052
  derived and/or modified CDS sequence (opt1) from glycoprotein__RABV__HQ166186.1

SEQ ID NO: 95157 - RNA, 1575 nt, Artificial Sequence
  derived and/or modified CDS sequence (opt1) from glycoprotein__RABV__HQ232301.1
augaucccccaggcccuccuguucgugccguuccuggucuucccccugugcuucggcaaguuccccaucuacaccauccccgacaagcucgggccguggagccccaucgacauccaccaccuguccugccccaacaaccuggugguggaggacgagggcugcaccaaccucagcggguucuccuacauggagcugaaggucggcuacaucagcgccaucaaggugaacggguucacgugcaccggcguggucaccgaggcggagaccuacacgaacuucgugggcuacgugaccaccaccuucaagcgcaagcacuuccggcccacgccggacgccugccgcgccgccuacaacuggaagauggccggggacccccgguacgaggagucccugcacaaccccuaccccgacuaccacuggcuccgcaccgucaagaccaccaaggagagccuggugaucaucuccccgagcguguccgaccuggaccccuacgacaagagccuccacucccgggucuuccccagcggcaagugcuccgggaucacggugagcuccaccuacugccccaccagccacgacuacaccaucuggaugccggagaacccccgccugggcacguccugcgacaucuucaucaacagccgggggaagcgcgcguccaagggcagcaagaccugcggcuucguggacgagcgggggcuguacaagagccucaagggcgccugcaagcugaagcugugcgggguccucggccugcgccugauggacggcaccugggccgccauccagaccuccgacgaggcgaaguggugcccgcccgaccagcucgugaacauccacgacuuccacagcgacgagaucgagcaccugguggucgaggagcuggugaagaagcgggaggagugccucgacgcccuggaguccaucaugacgaccaagagcguguccuuccgccggcugagccaccuccgcaagcugguccccggguucggcaaggccuacaccaucuucaacaagacccugauggaggccgacgcccacuacaaguccgugcggacguggaacgagaucauccccagcaaggggugccuccgcgugggcgggcggugccacccccacgucaacggcguguucuucaacggcaucauccuggggcccgacggccacguccugaucccggagaugcaguccagccuccugcagcagcacauggagcugcucgaguccagcgugaucccccugaugcacccccuggcggaccccuccaccguguucaaggacggggacgaggccgaggacuucgucgaggugcaccucccggacgugcacaagcaggucagcggcguggaccuggggcugcccuccuggggcaaguacgugcucaugagcgucggcgcccugaucgcccugaugcucaugaucuuccugaugaccugcugccgcaaggccaacgggguggaguccaugcagcaccggcugggcgagaccgggcgcaaggugagcgucacgucccagagcggccgggugaucagcuccugggagagcuacaaguccgggggcgagaccaagcucuga

SEQ ID NO: 95158 - RNA, 1575 nt, Artificial Sequence
  derived and/or modified CDS sequence (opt1) from glycoprotein__RABV__HQ266618.1
auggugccccaggcccugcuguucgucccgcugcugguguucagccucugcuucggcaaguuccccaucuacaccauccccgacaagcuggggcccugguccccgaucgacauccaccaccugagcugccccaacaaccucguggucgaggacgagggcugcaccaaccuguccggguucagcuacauggagcugaaggugggcuacaucuccgccaucaaggugaacggguucacgugcaccggcgucgugaccgaggcggagaccuacacgaacuucgugggcuacgucaccaccaccuucaagcgcaagcacuuccggccccuccccgacgccugccgcgccgccuacaacuggaagauggccggggacccgcgguacgaggagagccugcacaaccccuaccccgacuaccacuggcugcgcacggugaagaccaccaaggagucccucgugaucaucagccccuccgucgcggaccuggacccguacgacaagagccugcacucccggguguuccccagcggcaagugcuccgggaucaccgugagcuccacguucugcagcaccaaccacgacuacaccaucuggaugcccgagaacccccgccucggcaccuccugcgacaucuucgccaacagccgggggaagcgcgccuccaagggcggcaagacgugcggguucgucgacgagcggggccuguacaagagccugaagggggccugcaagcucaagcugugcggcgugcugggccuccgccugauggacgggaccuggguggcgaugcagaccagcgacgagaccaaguggugcccgcccgaccagcuggucaacaugcacgacuuccgguccgacgagaucgagcaccucgugguggaggagcuggucaagaagcgcgaggagugccuggacgcccucgagagcaucaugacgaccaaguccgugagcuuccggcgccugucccaccuccggaagcucgugcccggcuucgggaaggccuacaccaucuucaacaagacccugauggaggccgacgcccacuacaagagcguccgcacguggaacgagaucauccccuccaagggcugccugcgggucgggggccgcugccacccgcacgugaacggcguguucuucaacgggaucauccucggccccgacgggcacgugcugauccccgagaugcagagcucccugcuccagcagcacauggagcugcuggagagcuccgucaucccccucaugcacccgcuggcggaccccagcaccguguucaaggacggcgacgaggccgaggacuucguggagguccaccuccccgacgugcacaagcaggucuccgggguggaccugggccugcccaacuggggcaaguacgugcugcucagcgccgggacccugaucgcccugaugcucaucaucuuccugaugaccugcugcaagcgggugaaccagccggaguccacgaagcgcagccugggcgggaccggccggaaggucuccgugaccagccaguccgggaaggugaucagcagcugggaguccuacaagagcggcggcgagacccgccuguga

SEQ ID NO: 95159 - RNA, 1575 nt, Artificial Sequence
  derived and/or modified CDS sequence (opt1) from glycoprotein__RABV__HQ266620.1
auggugccccaggcccugcuguuccugccgcugcucgucuucccccugugcuucggccgcuuccccaucuacaccauccccgacaagcuggggccguggagccccaucgacauccaccaccucuccugccccaacaaccuggugguggaggacgagggcugcaccaaccugagcggguucuccuacauggagcucaaggucggcuacaucagcgccaucaaggugaacggguucacgugcaccggcguggucaccgaggcggagaccuacacgaacuucgugggcuacgugaccaccaccuucaagcggaagcacuuccgccccaucccggacgccugccgggccgccuacaacuggaagauggccggggacccccgcuacgaggagucccugcacaaccccuaccccgacuaccacuggcugcggacggucaagaccaccaaggagagccucgugaucaucuccccgagcguggcggaccuggaccccuacgacaagucccugcacagccgcgucuuccccuccggcaagugcagcgggaucaccguguccagcacguucugcuccaccaaccacgacuacaccaucuggaugcccgagaacccgcggcucggcaccagcugcgacaucuucgccaacucccgcgggaagcgggccagcaagggcggcaagacgugcggguucguggacgagcgcggccuguacaagucccugaagggggccugcaagcucaagcugugcggcguccugggccuccggcugauggacgggaccuggguggcgaugcagaccagcgacgagaccaaguggugcccgcccgaccagcuggugaacauccacgacuuccgcagcgacgagaucgagcaccucgucguggaggagcuggugaagaagcgggaggagugccuggacgcccucgaguccaucaugacgaccaagagcgucuccuuccgccggcugagccaccuccgcaagcucgugcccggcuucgggaaggccuacaccaucuucaacaagacccugauggaggccgacgcccacuacaaguccgugcggacguggaacgagaucauccccagcaagggcugccugcgcgucgggggccggugccacccccacgugaacggcgucuucuucaacgggaucauccucggccccgacgggcacgugcugauccccgagaugcaguccagccugcuccagcagcacauggagcugcuggaguccagcgugaucccgcucaugcacccccuggcggaccccuccaccgucuucaaggacggcgacgaggccgaggacuucguggaggugcaccuccccgacguccacaagcaggucagcgggguggaccugggccugccgaacuggggcaaguacauccugcucuccgccgggacccugaucgcccugaugcucaucaucuuccugaugaccugcugccgccgggugaaccgccccgagagcacggagcgcucccugggcgggaccggccggaaggugagcgugaccucccagagcgggaaggucaucuccagcugggagagcuacaaguccggcggcgagacccgccuguga

SEQ ID NO: 95160 - RNA, 1575 nt, Artificial Sequence
  derived and/or modified CDS sequence (opt1) from glycoprotein__RABV__HQ266621.1
auggugccccaggcccugcuguucgucccgcugcugggcuucagccugugcuucgggaaguuccccaucuacaccauccccgacaagcugggccccugguccccgaucgacauccaccaccugagcugccccaacaaccucgugguggaggacgaggggugcaccaaccuguccggcuucagcuacauggagcugaaggucggguacaucuccgccaucaaggugaacggcuucacgugcaccggcguggucaccgaggcggagaccuacacgaacuucgugggguacgugaccaccaccuucaagcgcaagcacuuccggcccauccccgacgccugccgcgccgccuacaacuggaaggucgccggcgacccgcgguacgaggagagccuccacaaccccuaccccgacuaccacuggcugcgcacggugaagaccaccaaggagucccuggugaucaucagccccuccgucgcggaccucgacccguacgacaagagccugcacucccggguguuccccagcgggaagugcuccggcaucaccgugagcuccacguacugcagcaccaaccacgacuacaccaucuggaugcccgagaacccccgccuggggaccuccugcgacaucuucgccaacagccggggcaagcgcgccuccaagggcgggaagacgugcggcuucgucgacgagcgggggcucuacaagagccugaagggcgccugcaagcugaagcucugcggcgugcuggggcugcgccucauggacggcaccuggguggcgaugcagaccagcgacgagaccaaguggugcccgcccgaccagcuggucaacaugcacgacuuccgguccgacgagaucgagcaccuggugguggaggagcucgucaagaagcgcgaggagugccuggacgcccuggagagcaucaugacgaccaaguccgugagcuuccggcgccucucccaccuccggaagcuggugcccggguucggcaaggccuacaccaucuucaacaagacccucauggaggccgacgcccacuacaagagcguccgcacguggaacgagaucauccccuccaaggggugccugcgggugggcggccgcugccacccgcacgucaacgggguguucuucaacggcaucauccuggggcccgacggccacgugcucauccccgagaugcagagcucccugcugcagcagcacauggagcuccuggagagcuccgucaucccccugaugcacccgcucgcggaccccagcaccguguucaaggacggggacgaggccgaggacuucguggagguccaccuccccgacgugcacaagcaggucuccggcguggaccugggccugcccaacugggggaaguacgugcugcugagcgccggcacccucaucgcccugaugcugaucaucuuccucaugaccugcugccggcgcgugaaccggccggaguccacgcagcgcagccucgggggcaccgggcgcaaggucuccgugaccagccaguccggcaaggugaucagcagcugggaguccuacaagagcggcggggagacccggcuguga

SEQ ID NO: 95161 - RNA, 1575 nt, Artificial Sequence
  derived and/or modified CDS sequence (opt1) from glycoprotein__RABV__HQ266622.1
auggugccccaggcccugcuguucaucccgcugcugggcuucagccugugcuucgggaaguuccccaucuacaccauccccgacaagcugggccccugguccccgaucgacauccaccaccugagcugccccaacaaccucgucguggaggacgaggggugcaccaaccuguccggcuucagcuacauggagcugaaggugggguacaucuccgccauccgcgucacgggcuucacgugcaccggcguggugaccgaggcggagaccuacaccaacuucgucggguacgugaccaccacguucaagcggaagcacuuccgccccacccccgacgccugccgggccgccuacaacuggaagauggccggcgacccgcgcuacgaggagagccuccacaaccccuaccccgacuaccacuggcugcggaccgugaagaccacgaaggagucccuggucaucaucagccccuccguggcggaccucgacccguacgacaagagccugcacucccgcguguuccccagcgggaagugcuccggcaucaccgucagcuccaccuacugcagcaccaaccacgacuacacgaucuggaugcccgagaacccccggcuggggaccuccugcgacaucuucgccaacagccgcggcaagcgggccuccaagggcgggaagaccugcggcuucguggacgagcgcgggcucuacaagagccugaagggcgccugcaagcugaagcucugcggcgugcuggggcugcggcucauggacggcaccugggucgcgaugcagacgagcgacgagaccaaguggugcccgcccgaccagcuggugaacaugcacgacuuccgcuccgacgagaucgagcaccugguggucgaggagcucgugaagaagcgggaggagugccuggacgcccuggagagcaucaugaccaccaaguccgugagcuuccgccggcucucccaccuccgcaagcugguccccggguucggcaaggccuacacgaucuucaacaagacccucauggaggccgacgcccacuacaagagcgugcggaccuggaacgagaucauccccuccaaggggugccugcgcgugggcggccggugccacccgcacgucaacgggguguucuucaacggcaucauccuggggcccgacggccacguccucauccccgagaugcagagcucccugcugcagcagcacauggagcuccuggagagcuccgugaucccccugaugcacccgcucgcggaccccagcgccguguucaaggacggggacgaggccgaggacuucgucgaggugcaccuccccgacgugcacaagcaggucuccggcguggaccugggccugcccaacugggggaaguacgugcugcugagcgccggcacccucgucgcccugaugcugaucaucuuccucaugacgugcugccgccgggugaaccgcccggaguccacccagugcagccucgggggcaccgggcgcaagggcuccgugaccagccaguccggcaaggucaucagcagcugggaguccuacaagagcgggggcgagacgcggcuguga

SEQ ID NO: 95162 - RNA, 1575 nt, Artificial Sequence; identical to SEQ ID NO: 95050
  derived and/or modified CDS sequence (opt1) from glycoprotein__RABV__HQ317918.1

SEQ ID NO: 95163 - RNA, 1575 nt, Artificial Sequence
  derived and/or modified CDS sequence (opt1) from glycoprotein__RABV__JN234411.1
auggugccccaggcccugcuccuggucccgcugcucggcuucagccugugcuucgggaaguuccccaucuacaccauccccgacacccugggccccugguccccgaucgacauccaccaccucagcugccccaacaaccuggugguggaggacgaggggugcacgaaccuguccggcuucagcuacauggagcucaaggucgggcacaucuccgccaucaaggugaacggcuucacgugcaccggcguggucaccgaggcggagaccuacaccaacuucgugggguacgugaccaccacguucaagcgcaagcacuuccggcccacccccgacgccugccgcgccgccuacaacuggaagauggccggcgacccgcgguacgaggagagccugcacucccccuaccccgacuaccacuggcugcgcaccgucaagaccacgaaggagagccucgugaucaucucccccagcguggcgaaccuggacccguacgacaacucccugcacagccgggucuuccccuccgggaagugcagcggcaucaccgugcccuccguguacugcagcaccaaccacgacuacaccgucuggaugcccgagauccuccgccuggggacguccugcgacaucuucaccaacagccggggcaagcgcgccuccaagggcagcaagaccugcggguucguggacgagcggggccuguacaagagccucaagggggccugcaagcugaagcugugcggcgugccgggccuccgccugauggacgggaccugggucgccaugcagacguccaacgagaccaaguggugcccgcccggccagcuggugaaccuccacgaccugcacagcgacgagaucgagcaccugguggucgaggagcucgugaagaagcgggaggagugccuggacgcgcuggaguccgugaucaccaccaagagcgucuccuuccgccggcucagccaccuccgcaagcuggugcccggguucggcaaggccuacacgaucuucaacaagacccugauggaggccgaggcccacuacaaguccguccggaccuggaacgagaucauccccagcaaggggugccugcgcgugggcggccggugcuacccccacgugaacggggucuucuucaacggcaucauccuggggcccgacggccacgugcucauccccgagaugcaguccagccugcugcagcagcacaucgagcuccuggaguccagcgugaucccgcugaugcacccccucgccgaccccuucaccgucuucaaggacggggacgagaucgaggacuucguggaggugcaccuccccgacguccacgagcaggucuccggcguggaccugggccugccgaacuggggcgaguacgugcugcugagcgcggggacgcucaucgcccugaugcugaucaucuuccugaucacgugcugcaagcgcguggaccggcccgaguccacccagcgcagccuccgggggaccggccgcaacguguccgucaccagccaguccgggaaguucauccccagcugggagagcuacaaguccggcggcgagaccgggcuguga

SEQ ID NO: 95164 - RNA, 1575 nt, Artificial Sequence
  derived and/or modified CDS sequence (opt1) from glycoprotein__RABV__JN234412.1
auggugccccaggcccugcuccuggucccgcugcucggcuucagccugugcuucgggaaguuccccaucuacaccauccccgacacccugggccccugguccccgaucgacauccaccaccucagcugccccaacaaccuggugguggaggacgaggggugcacgaaccuguccggcuucagcuacauggagcucaaggucgggcacaucuccgccaucaaggugaacggcuucacgugcaccggcguggucaccgaggcggagaccuacaccaacuucgugggguacgugaccaccacguucaagcgcaagcacuuccggcccacccccgacgccugccgcgccgccuacaacuggaagauggccggcgacccgcgguacgaggagagccugcacucccccuaccccgacuaccacuggcugcgcaccgucaagaccacgaaggagagccucgugaucaucucccccagcguggcgaaccuggacccguacgacaacucccugcacagccgggucuuccccuccgggaagugcagcggcaucaccgugcccuccguguacugcagcaccaaccacgacuacaccgucuggaugcccgagauccuccgccuggggacguccugcgacaucuucaccaacagccggggcaagcgcgccuccaagggcagcaagaccugcggguucguggacgagcggggccuguacaagagccucaagggggccugcaagcugaagcugugcggcgugccgggccuccgccugauggacgggaccugggucgccaugcagacguccaacgagaccaaguggugcccgcccggccagcuggugaaccuccacgaccugcacagcgacgagaucgagcaccugguggucgaggagcucgugaagaagcgggaggagugccuggacgcgcuggaguccaucaucaccaccaagagcguguccuuccgccggcucagccaccuccgcaagcugguccccggguucggcaaggccuacacgaucuucaacaagacccugauggaggccgaggcccacuacaaguccgugcggaccuggaacgagaucauccccagcaaggggugccugcgcgucggcggccggugcuacccccacgugaacgggguguucuucaacggcaucauccuggggcccgacggccacguccucauccccgagaugcaguccagccugcugcagcagcacaucgagcuccuggaguccagcgugaucccgcugaugcacccccucgccgaccccuucaccguguucaaggacggggacgagaucgaggacuucgucgaggugcaccuccccgacgugcacgagcaggucuccggcguggaccugggccugccgaacuggggcgaguacgugcugcugagcgcggggacgcucaucgcccugaugcugaucaucuuccugaucacgugcugcaagcgcgucgaccggcccgaguccacccagcgcagccuccgggggaccggccgcaacguguccgugaccagccaguccgggaaguucauccccagcugggagagcuacaaguccggcggcgagaccgggcuguga

SEQ ID NO: 95165 - RNA, 1575 nt, Artificial Sequence; identical to SEQ ID NO: 95054
  derived and/or modified CDS sequence (opt1) from glycoprotein__RABV__JN234413.1

SEQ ID NO: 95166 - RNA, 1575 nt, Artificial Sequence
  derived and/or modified CDS sequence (opt1) from glycoprotein__RABV__JN234420.1
augaucccccaggcccugcuguucgugccgcugcuggucuucccccucugcuucggcaaguuccccaucuacaccauccccgacaagcuggggccguggagccccaucgacauccaccaccuguccugccccaacaaccucgugguggaggacgagggcugcaccaaccugagcggguucuccuacauggagcugaaggucggcuacaucagcgccaucaaggugaacggguucacgugcaccggcguggucaccgaggcggagaccuacacgaacuucgugggcuacgugaccaccaccuucaagcgcaagcacuuccggcccacgccggacgccugccgcuccgccuacaacuggaagauggccggggacccccgguacgaggagagccuccacaaccccuaccccgacuaccacuggcugcgcaccgucaagaccaccaaggaguccguggugaucaucagcccguccgucgccgaccuggaccccuacgacaagagccuccacucccggguguucccccgcggcaagugcagcgggaucacgguguccagcgcguacugcuccaccaaccacgacuacaccaucuggaugcccgagaacccgcggcugggcaccagcugcgacaucuucacgaacucccgcgggaagcgggccagcaagggcuccaagaccugcggcuucgucgacgagcgcgggcuguacaagagccucaagggcgccugcaagcugaagcugugcggggugcucggccugcggcugauggacggcaccuggguggccauccagaccagcaacgagacgaaguggugcccgcccgaccagcucgucaaccugcacgacuuccacuccgacgagaucgagcaccuggugguggaggagcucgucaagaagcgcgaggagugccuggacgcgcuggagagcaucaugaccaccaaguccgugagcuuccggcgccucucccaccuccggaagcuggugcccggguucggcaaggccuacaccaucuucaacaagacgcucauggaggccgacgcccacuacaagagcguccgcaccuggaacgagaucauccccuccaaggggugccugcgggugggcgggcgcugccacccccacgucaacggcguguucuucaacggcaucauccuggggcccgacggccacgugcucauccccgagaugcagagcucccugcugcagcagcacauggagcuccucaagagcuccgucaucccgcugaugcacccccuggccgaccccagcaccguguucaaggacggggacgagguggaggacuucgucgaggugcaccuccccgacgugcacaagcaggucuccggcguggaccuggggcugccgaacuggggcaaggacgugcugaugggcgcggggguccugaccgcccucaugcugaugaucuuccugaugacgugcugccggcgcaccaaccgggccgagagcauccagcacucccucggcgagaccgggcgcaaggugagcgugaccucccagagcggccgcgucaucuccagcugggagagcuacaaguccgggggcgagacgaagcuguga

SEQ ID NO: 95167 - RNA, 1575 nt, Artificial Sequence; identical to SEQ ID NO: 95166
  derived and/or modified CDS sequence (opt1) from glycoprotein__RABV__JN234423.1

SEQ ID NO: 95168 - RNA, 1575 nt, Artificial Sequence
  derived and/or modified CDS sequence (opt1) from glycoprotein__RABV__JN234424.1
auggugccccaggcccugcuguucgucccgcugcugguguucccccucugcuucggcaaguuccccaucuacaccauccccgacaagcuggggccguggagccccaucgacauccaccaccuguccugccccaacaaccucguggucgaggacgagggcugcaccaaccugagcggguucuccuacauggagcugaaggugggcuacaucagcgccaucaagacgaacggguucacgugcaccggcguggucaccgaggcggagaccuacaccaacuucgugggcuacgugaccaccacguucaagcgcaagcacuuccggcccaccccggacgccugccgcgccgccuacaacuggaagauggccggggacccccgguacgaggagucccuccacaaccccuaccccgacuaccacuggcugcgcaccgucaagaccacgaaggagagccuggugaucaucuccccgagcguggcggaccucgaccccuacgaccggucccugcacagccgcgucuuccccggcgggaacugcuccggcguggccgugagcuccaccuacugcagcaccaaccacgacuacaccaucuggaugcccgagaacccgcggcuggggauguccugcgacaucuucacgaacagccgcggcaagcgggccuccaagggcagcgagaccugcggguucgucgacgagcgcggccucuacaagucccugaagggggccugcaagcugaagcucugcggcgugcugggccugcggcucauggacgggaccuggguggcgaugcagaccagcaacgagacgaaguggugcccgcccggccagcuggucaaccugcacgacuuccgcagcgacgagaucgagcaccucgugguggaggagcuggucaagaagcgggaggagugccuggacgcccucgaguccaucaugaccaccaagagcguguccuuccgccggcugagccaccuccgcaagcucgugcccggguucggcaaggccuacaccaucuucaacaagacgcugauggaggccgacgcccacuacaaguccguccggaccuggaacgagaucauccccagcaaggggugccugcgcgugggcggccggugccacccccacgucaacgggguguucuucaacggcaucauccucgggcccgacggcaacgugcugauccccgagaugcaguccagccugcuccagcagcacauggagcugcuggucuccagcgugaucccgcucaugcaccccauggcggaccccuccaccguguucaagaacggggacgaggccgaggacuucgucgaggugcaccuccccgacgugcacgagcgcaucagcggcgucgaccugggccugccgaacugggggaaguacgugcugcuguccgccggcgcccucaccgcccugaugcugaucaucuuccucaugacgugcuggcggcgcgugaaccgcagcgagcccacccagcacaaccugcgggggaccggccgcgaggucuccgugacgccccagagcgggaagaucaucuccagcugggaguccuacaagagcggcggcgagaccgggcuguga

SEQ ID NO: 95169 - RNA, 1575 nt, Artificial Sequence; identical to SEQ ID NO: 95052
  derived and/or modified CDS sequence (opt1) from glycoprotein__RABV__JN786877.1

SEQ ID NO: 95170 - RNA, 1575 nt, Artificial Sequence
  derived and/or modified CDS sequence (opt1) from glycoprotein__RABV__JN786878.1
augaucccccaggcccugcuguucgugccgcugcuggucuucagcuccugcuucggcaaguuccccaucuacaccauccccgacaagcucgggcccuggagcccgaucgacauccaccaccuccgcugccccaacaaccuggugguggaggacgagggcugcaccaaccucuccggguucagcuacauggagcugaaggucggcuacaucuccgccaucaaggugaacggguucacgugcaccggcguggucaccgaggcggagaccuacacgaacuucgugggcuacgugaccaccaccuucaagcggaagcacuuccgccccacgcccgacgccugccgggccgccuacaacuggaagauggccggggacccgcgcuacgaggagagccugcacaaccccuaccccgacuaccacuggcuccggaccgucaagaccaccaaggagucccuggugaucaucagccccuccgugagcgaccuggacccguacgacaagucccuccacagccgcgucuuccccuccggcaagugcagcgggaucacgguguccagcaccuacugccccaccaaccacgacuacaccaucuggaugcccgagaacccgcggcugggcacguccugcgacaucuucaccaacagccgcgggaagcgggcguccaagggcggcaagaccugcggguucguggacgagcgcggccuguacaagagccucaagggggccugcaagcugaagcugugcggcguccucggccugcggcugauggacgggaccuggguggccauccagacgagcgacgaggccaaguggugcccgcccgaccagcucgugaacauccacgacuuccgcuccgacgagaucgagcaccuggucguggaggagcuggugaagaagcgggaggagugccucgacgcgcuggagagcaucaugaccaccaaguccgucagcuuccgccggcugucccaccuccgcaagcuggugcccggcuucgggaaggccuacaccaucuucaacaagacgcugauggaggccgacgcccacuacaagagcgugcggaccuggaacgagaucauccccuccaagggcugccuccgcgucgggggccggugccacccccacgugaacggcgucuucuucaacgggaucauccugggccccgacgggcacgugcugauccccgagaugcagagcucccuccugcagcagcacauggagcugcucgagagcuccgugaucccgcugaugcacccccuggccgaccccagcaccgucuucaaggacggcgacgaggcggaggacuucguggaggugcaccuccccgacgucccgaagcaggucuccgggguggaccugggccugcccagcuggggcaaguacgugcucauguccgugggggccaugaucgcccugaugcugaugaucuuccucaugaccugcugccgcaaggccaacggcgccgagacgauccagcaccggcugggggagaccggccgcaaggugagcgucaccucccagagcgggcgcgugaucuccagcugggagagcuacaaguccggcggcgagaccaagcuguga

SEQ ID NO: 95171 - RNA, 1575 nt, Artificial Sequence; identical to SEQ ID NO: 94869
  derived and/or modified CDS sequence (opt1) from glycoprotein__RABV__JN936687.1

SEQ ID NO: 95172 - RNA, 1575 nt, Artificial Sequence
  derived and/or modified CDS sequence (opt1) from glycoprotein__RABV__JN936688.1
auggugccccagguccugcuguucgugccgcugcuggccgugccccucugcuucggcaaguuccccaucuacaccauccccgacaagcuggggccguggagccccaucgacauccaccaccuguccugccccaacaaccucgucguggaggacgagggcugcaccaaccugagcggguucuccuacauggagcugaaggugggcuacaucagcgccaucaaggucaacggguucacgugcaccggcguggugaccgaggcggagaccuacacgaacuucgucggcuacgugaccaccaccuucaagcgcaagcacuuccggcccacgccggacgccugccgcuccgccuacaacuggaagauggccggggacccccgguacgaggagagccuccacaaccccuaccccgacuaccacuggcugcgcaccgugaagaccaccaaggaguccuucgucaucaucagcccguccguggccgaccuggaccccuacgacaagagccuccacucccggguguucccccgcggcaagugcagcgggaucacggucuccagcaccuacugcuccaccaaccacgacuacaccaucuggaugcccgagaacccgcggcugggcacgagcugcgacaucuucaccaacucccgcgggaagcgggcgagcaagggcuccaagaccugcggcuucguggacgagcgcgggcuguacaagagccucaagggcgccugcaagcugaagcugugcggggugcucggccugcggcugauggacggcaccugggucgccauccagacgagcgacgagaccaaguggugcccgcccgaccagcucgugaaccugcacgacuuccacuccgacgagaucgagcaccugguggucgaggagcucgugaagaagcgcgaggagugccuggacgcccuggagagcaucaugaccaccaaguccgugagcuuccggcgccucucccaccuccggaagcugguccccggguucggcaaggcguacacgaucuucaacaagacccucauggaggccgacgcccacuacaagagcgugcgcaccuggaacgagaucauccccuccaaggggugccugcgggucggcgggcgcugccacccccacgugaacggcguguucuucaacggcaucauccuggggcccgacggccacguccucauccccgagaugcagagcucccugcugcagcagcacauggagcuccuggagagcuccgugaucccgcugaugcacccccucgccgaccccagcaccguguucaaggacggggacgaggccgaggacuucgucgaggugcaccuccccgacgugcacaagcaggucuccggcguggaccuggggcugccgagcuggggcaaguacgugcugauguccgcgggcauccugacggcccucaugcugaugaucuuccugaugaccugcugccggcgcaccaaccgggccgagagcauccagcacucccucggggagaccggccgcaaggucagcgugacgucccagaacgggcgcgugaucagcagcugggaguccuacaagagcggcggggagaccaagcuguga

SEQ ID NO: 95173 - RNA, 1575 nt, Artificial Sequence
  derived and/or modified CDS sequence (opt1) from glycoprotein__RABV__JN936689.1
auggugccccagguccugcuguucgugccgcugcuggccgugccccucugcuucggcaaguuccccaucuacaccauccccgacaagcuggggccguggagccccaucgacauccaccaccuguccugccccaacaaccucgucguggaggacgagggcugcaccaaccugagcggguucuccuacauggagcugaaggugggcuacaucagcgccaucaaggucaacggguucacgugcaccggcguggugaccgaggcggagaccuacacgaacuucgucggcuacgugaccaccaccuucaagcgcaagcacuuccggcccacgccggacgccugccgcuccgccuacaacuggaagauggccggggacccccgguacgaggagagccuccacaaccccuaccccgacuaccacuggcugcgcaccgugaagaccaccaaggaguccuucgucaucaucagcccguccguggccgaccuggaccccuacgacaagagccuccacucccggguguucccccgcggcaagugcagcgggaucacggucuccagcaccuacugcuccaccaaccacgacuacaccaucuggaugcccgagaacccgcggcugggcacgagcugcgacaucuucaccaacucccgcgggaagcgggcgagcaagggcuccaagaccugcggcuucguggacgagcgcgggcuguacaagagccucaagggcgccugcaagcugaagcugugcggggugcucggccugcggcugauggacggcaccugggucgccauccagacgagcgacgagaccaaguggugcccgcccgaccagcucgugaaccugcacgacuuccacuccgacgagaucgagcaccugguggucgaggagcucgugaagaagcgcgaggagugccuggacgcccuggagagcaucaugaccaccaaguccgugagcuuccggcgccucucccaccuccggaagcugguccccggguucggcaaggcguacacgaucuucaacaagacccucauggaggccgacgcccacuacaagagcgugcgcaccuggaacgagaucauccccuccaaggggugccugcgggucggcgggcgcugccacccccacgugaacggcguguucuucaacggcaucauccuggggcccgacggccacguccucauccccgagaugcagagcucccugcugcagcagcacauggagcuccuggagagcuccgugaucccgcugaugcacccccucgccgaccccagcaccguguucaaggacggggacgaggccgaggacuucgucgaggugcaccuccccgacgugcacaagcaggucuccggcguggaccuggggcugccgagcuggggcaaguacgugcugauguccgcgggcauccugacggcccucaugcugaccaucuuccugaugaccugcugccggcgcaccaaccgggccgagagcauccagcacucccucggggagacgggccgcaaggucagcgugaccucccagagcgggcgcgugaucagcuccugggagagcuacaaguccggcggggagaccaagcuguga

SEQ ID NO: 95174 - RNA, 1575 nt, Artificial Sequence
  derived and/or modified CDS sequence (opt1) from glycoprotein__RABV__JN936690.1
auggugccccaggccguccuguucgugccgcuccuggccgugccccugugcuucggcaaguuccccaucuacaccauccccgacaagcucgggccguggagccccaucgacauccaccaccuguccugccccaacaaccuggucguggaggacgagggcugcaccaaccucagcggguucuccuacauggagcugaaggugggcuacaucagcgcgaucaaggucaacggguucacgugcaccggcguggugaccgaggccgagaccuacacgaacuucgucggcuacgugaccaccaccuucaagcgcaagcacuuccggcccacgccggacgccugccgcuccgccuacaacuggaagauggccggggacccccgguacgaggagagccugcacaaccccuaccccgacuaccacuggcuccgcaccgugaagaccaccaaggaguccuucgucaucaucagcccguccguggcggaccuggaccccuacgacaagagccugcacucccggguguucccccgcggcaagugcagcgggaucacggucuccagcaccuacugcuccaccaaccacgacuacaccaucuggaugcccgagaacccgcggcucggcacgagcugcgacaucuucaccaacucccgcgggaagcgggccagcaagggcuccaagaccugcggcuucguggacgagcgcgggcuguacaagagccugaagggcgccugcaagcucaagcugugcggggugcugggccuccggcugauggacggcaccugggucgccauccagacgagcgacgagaccaaguggugcccgcccgaccagcuggugaaccuccacgacuuccacuccgacgagaucgagcaccugguggucgaggagcuggugaagaagcgcgaggagugccucgacgcgcuggagagcaucaugaccaccaaguccgugagcuuccggcgccugucccaccuccggaagcugguccccggguucggcaaggccuacacgaucuucaacaagacccugauggaggccgacgcccacuacaagagcgugcgcaccuggaacgagaucauccccuccaaggggugccuccgggucggcgggcgcugccacccccacgugaacggcguguucuucaacggcaucauccuggggcccgacggccacguccugauccccgagaugcagagcucccuccugcagcagcacauggagcugcucgagagcuccgugaucccgcugaugcacccccuggccgaccccagcaccguguucaaggacggggacgaggcggaggacuucgucgaggugcaccuccccgacgugcacaagcaggucuccggcguggaccuggggcugccgagcuggggcaaguacgugcucauguccgccggcauccugacggcccugaugcucaugaucuuccugaugaccugcugccggcgcaccaaccgggccgagagcauccagcacucccugggggagaccggccgcaaggucagcgugacgucccagaacgggcgcgugaucagcagcugggaguccuacaagagcggcggggagaccaagcucuga

SEQ ID NO: 95175 - RNA, 1575 nt, Artificial Sequence
  derived and/or modified CDS sequence (opt1) from glycoprotein__RABV__JN936691.1
augaucccccaggugcuccuguucgucccgcugcugguguucagcuccugcuucggcaaguuccccaucuacaccauccccgacaagcucgggcccuggagcccgaucgacauccaccaccuguccugccccaacaacaugguggucgaggacgagggcugcaccaaccugagcggguucuccuacauggagcucaaggugggcuacaucagcgccaucaaggugaacggguucacgugcaccggcgucgugaccgaggccgagaccuacacgaacuucgugggcuacgucaccaccaccuucaagcgcaagcacuuccggcccaugcccgacgcgugccgcgccgccuacaacuggaagauggccggggacccgcgguacgaggagucccugcacaaccccuaccccgacuaccacuggcugcgcacggugaagaccaccaaggagagccucgugaucaucucccccagcgucgccgaccuggacccguacgacaagucccugcacagccggguguuccccggcgggaagugcuccggcaucaccgugagcuccacgugcugcagcaccaaccacgacuacaccaucuggaugcccgagaacccccgccucgggaccuccugcgacaucuucacgaacagccggggcaagcgcgcguccaagggcgggaagaccugcggcuucgucgacgagcgggggcuguacaagagccugaagggcgccugcaagcucaagcugugcggcgugcuggggcuccgccugauggacggcaccuggguggccauccagaccagcgacgagaucaaguggugcuccccggaccagcuggucaaccuccacgacuuccacagcgacgagaucgagcaccuggugguggaggagcuggucaagaagcgggaggagugccucgacgcccuggagacgaucaugaccaccaaguccgugagcuuccgccggcugucccaccuccgcaagcuggugcccggguucggcaaggcguacaccaucuucaacaagacgcugauggaggccgacgcccacuacaagagcauccggaccuggaacgagaucauccccuccaaggggugccuccgcgucggcggccggugccacccccacgugaacggggucuucuucaacggcaucauccuggggccggacggccacgugcugauccccgagaugcagagcucccuccugcaccagcacauggagcugcucgagagcuccgugaucccccugaugcacccccuggccgacccgagcaccgucuucaaggacggggacgaggccgaggacuucguggaggugcaccuccccgacguccacaagcagaucuccggcguggaccugggccugcccaacugggggaaguacgugcucaucagcgcgggcgcccugaccgcccugaugcucacgaucuuccugaugaccugcugccgcaagaccaaccgggccgaguccauccagcacagccccggggagaccggccgcaaggucuccgugacgagccacaacgggcgggugaucuccagcugggagagcuacaaguccggcggcgagaccaagcuguga

SEQ ID NO: 95176 - RNA, 1575 nt, Artificial Sequence; identical to SEQ ID NO: 94869
  derived and/or modified CDS sequence (opt1) from glycoprotein__RABV__JN936692.1

SEQ ID NO: 95177 - RNA, 1575 nt, Artificial Sequence
  derived and/or modified CDS sequence (opt1) from glycoprotein__RABV__JN936693.1
auggugccccaggccuuccuguucgucccgcuccuggccaucccccugugcuucggcaaguuccccaucuacaccauccccgacaagcucgggccguggagccccaucgacauccaccaccuguccugccccaacaaccuggugguggaggacgagggcugcaccaaccucagcggguucuccuacauggagcugaaggucggcuacaucagcgcgaucaaggugaacggguucacgugcaccggcguggucaccgaggccgagaccuacacgaacuucgugggcuacgugaccaccaccuucaagcgcaagcacuuccggcccacgccggacgccugccgcuccgccuacaacuggaagauggccggggacccccgguacgaggagagccugcacaaccccuaccccgacuaccacuggcuccgcaccgucaagaccaccaaggaguccuucgugaucaucagcccguccguggcggaccuggaccccuacgacaagagccugcacucccgggucuucccccgcggcaagugcagcgggaucacgguguccagcaccuacugcuccaccaaccacgacuacaccaucuggaugcccgagaacccgcggcucggcacgagcugcgacaucuucaccaacucccgcgggaagcgggccagcaagggcuccaagaccugcggcuucguggacgagcgcgggcuguacaagagccugaagggcgccugcaagcucaagcugugcgggguccugggccuccggcugauggacggcaccuggguggccauccagacgagcgacgagaccaaguggugcccgcccgaccagcuggugaaccuccacgacuuccacuccgacgagaucgagcaccuggucguggaggagcuggugaagaagcgcgaggagugccucgacacccuggagagcaucaugaccacgaaguccgucagcuuccggcgccugucccaccuccggaagcuggugcccggguucggcaaggcguacaccaucuucaacaagacccugauggaggccgacgcccacuacaagagcgugcgcaccuggaacgagaucauccccuccaaggggugccuccgggucggcgggcgcugccacccccacgugaacggcgucuucuucaacggcaucauccuggggcccgacggccacgugcugauccccgagaugcagagcucccuccugcagcagcacauggagcugcucgagagcuccgugaucccgcugaugcacccccuggccgaccccagcacggucuucaaggacggggacgaggccgaggacuucguggaggugcaccuccccgacguccacaagcaggucuccggcguggaccuggggcugccgagcuggggcaaguacgugcucauguccgcgggcauccugaccgcccugaugcucaugaucuuccugaugaccugcugccggcgcaccaaccgggccgagagcauccagcacucccugggggagacgggccgcaaggugagcgugaccucccagagcgggcgcgucaucagcuccugggagagcuacaaguccggcggggagaccaagcucuga

SEQ ID NO: 95178 - RNA, 1575 nt, Artificial Sequence
  derived and/or modified CDS sequence (opt1) from glycoprotein__RABV__JN936694.1
auggugccccaggcccugcuguucgucccgcugcugguguucagcuccugcuucggcaaguuccccaucuacaccauccccgacaagcucgggcccuggagcccgaucgacauccaccaccuguccugccccaacaacuucguggucgaggacgagggcugcaccaaccugagcggguucuccuacauggagcucaaggugggcuacaucagcgccaucaaggugaacggguucacgugcaccggcgucgugaccgaggcggagaccuacacgaacuucgugggcuacgucaccaccaccuucaagcgcaagcacuuccggcccaugcccgacgccugccgcgccgccuacaacuggaagauggccggggacccgcgguacgaggagucccugcacaaccccuaccccgacuaccacuggcugcgcacggugaagaccaccaaggagagccucgugaucaucucccccagcgucgcggaccuggacccguacgacaagucccugcacagccggguguuccccggcgggaagugcuccggcaucaccgugagcuccacgugcugcagcaccaaccacgacuacaccaucuggaugcccgagaacccccgccucgggaccuccugcgacaucuucacgaacagccggggcaagcgcgccuccaagggcgggaagaccugcggcuucgucgacgagcgggggcuguacaagagccugaagggcgccugcaagcucaagcugugcggcgugcuggggcuccgccugauggacggcaccuggguggccauccagaccagcgacgagaucaaguggugcuccccggaccagcuggucaaccuccacgacuuccacagcgacgagaucgagcacuucgugguggaggagcuggucaagaagcgggaggagugccuggacgcgcucgagacgaucaugaccaccaaguccgugagcuuccgccggcugucccaccuccgcaagcucgugcccggguucggcaaggccuacaccaucuucaacaagacgcugauggaggccgacgcccacuacaagagcauccggaccuggaacgagaucauccccuccaaggggugccugcgcgucggcggccggugccacccccacgugaacggggucuucuucaacggcaucauccucgggccggacggccacgugcugauccccgagaugcagagcucccugcuccaccagcacauggagcugcuggagagcuccgugaucccccucaugcacccccuggccgacccgagcaccgucuucaaggacggggacgaggcggaggacuucguggaggugcaccuccccgacguccacaagcagaucuccggcguggaccugggccugcccaacugggggaaguacgugcugaucagcgccggcgcccucaccgcccugaugcugaugaucuuccucaugacgugcugccgcaaggccaaccgggcggaguccauccagcacaaccccggggagaccggccgcaaggucagcgugaccucccacaacgggcgggugaucagcuccugggagagcuacaagagcggcggcgagaccaagcuguga

SEQ ID NO: 95179 - RNA, 1575 nt, Artificial Sequence
  derived and/or modified CDS sequence (opt1) from glycoprotein__RABV__JN936695.1
auggugccccaggccuuccuguucgucccgcuccuggccaucccccugugcuucggcaaguuccccaucuacaccauccccgacaagcucgggccguggagccccaucgacauccaccaccuguccugccccaacaaccuggugguggaggacgagggcugcaccaaccucagcggguucuccuacauggagcugaaggucggcuacaucagcgcgaucaaggugaacggguucacgugcaccggcguggucaccgaggccgagaccuacacgaacuucgugggcuacgugaccaccaccuucaagcgcaagcacuuccggcccacgccggacgccugccgcuccgccuacaacuggaagauggccggggacccccgguacgaggagagccugcacaaccccuaccccgacuaccacuggcuccgcaccgucaagaccaccaaggaguccuucgugaucaucagcccguccguggcggaccuggaccccuacgacaagagccugcacucccgggucuucccccgcggcaagugcagcgggaucacgguguccagcaccuacugcuccaccaaccacgacuacaccaucuggaugcccgagaacccgcggcucggcacgagcugcgacaucuucaccaacucccgcgggaagcgggccagcaagggcuccaagaccugcggcuucguggacgagcgcgggcuguacaagagccugaagggcgccugcaagcucaagcugugcgggguccugggccuccggcugauggacggcaccuggguggccauccagacgagcgacgagaccaaguggugcccgcccgaccagcuggugaaccuccacgacuuccacuccgacgagaucgagcaccuggucguggaggagcuggugaagaagcgcgaggagugccucgacgcgcuggagagcaucaugaccaccaaguccgucagcuuccggcgccugucccaccuccggaagcuggugcccggguucggcaaggccuacacgaucuucaacaagacccugauggaggccgacgcccacuacaagagcgugcgcaccuggaacgagaucauccccuccaaggggugccuccgggucggcgggcgcugccacccccacgugaacggcgucuucuucaacggcaucauccuggggcccgacggccacgugcugauccccgagaugcagagcucccuccugcagcagcacauggagcugcucgagagcuccgugaucccgcugaugcacccccuggccgaccccagcaccgucuucaaggacggggacgaggcggaggacuucguggaggugcaccuccccgacguccacaagcaggucuccggcguggaccuggggcugccgagcuggggcaaguacgugcucauguccgccggcauccugacggcccugaugcucaugaucuuccugaugaccugcugccggcgcgccaaccgggccgagagcauccagcacucccugggggagaccggccgcaaggugagcgugaccucccagagcgggcgcgucaucagcuccugggagagcuacaaguccggcggggagacgaagcucuga

SEQ ID NO: 95180 - RNA, 1575 nt, Artificial Sequence
  derived and/or modified CDS sequence (opt1) from glycoprotein__RABV__JN936696.1
augauccuccaggugcugcuguucguccccuuccugguguucagcuccugcuucggcaaguucccgaucuacaccauccccgacaagcucgggcccuggagccccaucgacauccaccaccuguccugcccgaacaaccugguggucgaggacgagggcugcaccaaccucagcggguucuccuacauggagcugaaggugggcuacaucagcgccaucaaggugaacggguucacgugcaccggcgucgugaccgaggccgagaccuacacgaacuucgugggcuacgucaccaccaccuucaagcgcaagcacuuccggcccaugcccgacgcgugccgcgccgccuacaacuggaagauggccggggacccccgguacgaggagucccugcacaacccguaccccgacuaccacuggcuccgcacggugaagaccaccaaggagagccuggugaucaucucccccagcgucgccgaccuggaccccuacgacaagucccuccacagccggguguucccgggcgggaagugcuccggcaucaccgugagcuccacgugcugcagcaccaaccacgacuacaccaucuggaugcccgagaacccccgccuggggaccuccugcgacaucuucacgaacagccggggcaagcgcgcguccaagggcgggaagaccugcggcuucgucgacgagcgggggcuguacaagagccucaagggcgccugcaagcugaagcugugcggcgugcucgggcugcgccugauggacggcaccuggguggccauccagaccagcgacgagaucaaguggugcccgcccgaccagcucgucaaccugcacgacuuccacuccgacgagaucgagcaccuggugguggaggagcucgucaagaagcgggaggagugccuggacgcccuggagacgaucaugaccaccaagagcguguccuuccgccggcucagccaccuccgcaagcuggugcccggguucggcaaggcguacaccaucuucaacaagacgcugauggaggccgacgcccacuacaaguccauccggaccuggaacgagaucauccccagcaaggggugccugcgcgucggcggccggugccacccccacgugaacggggucuucuucaacggcaucauccuggggccggacggccacgugcucauccccgagaugcaguccagccugcugcaccagcacauggagcuccuggaguccagcgugaucccccugaugcacccccucgccgacccguccaccgucuucaaggacggggacgaggccgaggacuucguggaggugcaccuccccgacguccacaagcagaucagcggcguggaccugggccugcccaacugggggaaguacgugcugaucuccgcgggcgcccugaccgcccucaugcugaugaucuuccugaugacgugcugccgcaagaacaaccgggccgagagcauccagcacucccccggggagaccggccgcaaggucagcgugaccucccacaacgggcgggugaucagcuccugggagagcuacaagagcggcggcgagaccaagcucuga

SEQ ID NO: 95181 - RNA, 1575 nt, Artificial Sequence
  derived and/or modified CDS sequence (opt1) from glycoprotein__RABV__JN936697.1
auggugccccaggccuuccuguucgucccgcuccuggccaucccccugugcuucggcaaguuccccaucuacaccauccccgacaagcucgggccguggagccccaucgacauccaccaccuguccugccccaacaaccuggugguggaggacgagggcugcaccaaccucagcggguucuccuacauggagcugaaggucggcuacaucagcgcgaucaaggugaacggguucacgugcaccggcguggucaccgaggccgagaccuacacgaacuucgugggcuacgugaccaccaccuucaagcgcaagcacuuccggcccacgccggacgccugccgcuccgccuacaacuggaagauggccggggacccccgguacgaggagagccugcacaaccccuaccccgacuaccacuggcuccgcaccgucaagaccaccaaggaguccuucgugaucaucagcccguccguggcggaccuggaccccuacgacaagagccugcacucccgggucuucccccgcggcaagugcagcgggaucacgguguccagcaccuacugcuccaccaaccacgacuacaccaucuggaugcccgagaacccgcggcucggcacgagcugcgacaucuucaccaacucccgcgggaagcgggccagcaagggcuccaagaccugcggcuucguggacgagcgcgggcuguacaagagccugaagggcgccugcaagcucaagcugugcgggguccugggccuccggcugauggacggcaccuggguggccauccagacgagcgacgagaccaaguggugcccgcccgaccagcuggugaaccuccacgacuuccacuccgacgagaucgagcaccuggucguggaggagcuggugaagaagcgcgaggagugccucgacgcgcuggagagcaucaugaccaccaaguccgucagcuuccggcgccugucccaccuccggaagcuggugcccggguucggcaaggccuacacgaucuucaacaagacccugauggaggccgacgcccacuacaagagcgugcgcaccuggaacgagaucauccccuccaaggggugccuccgggucggcgggcgcugccacccccacgugaacggcgucuucuucaacggcaucauccuggggcccgacggccacgugcugauccccgagaugcagagcucccuccugcagcagcacauggagcugcucgagagcuccgugaucccgcugaugcacccccuggccgaccccagcaccgucuucaaggacggggacgaggcggaggacuucguggaggugcaccuccccgacguccacaagcaggucuccggcguggaccuggggcugccgagcuggggcaaguacgugcucauguccgccggcauccugacggcccugaugcucaugaucuuccugaugaccugcugccggcgcaccaaccgggccgagagcauccagcacucccugggggagaccggccgcaaggugagcgugacgucccagagcgggcgcgucaucagcuccugggagagcuacaaguccggcggggagaccaagcucuga

SEQ ID NO: 95182 - RNA, 1575 nt, Artificial Sequence; identical to SEQ ID NO: 94851
  derived and/or modified CDS sequence (opt1) from glycoprotein__RABV__JN936698.1

SEQ ID NO: 95183 - RNA, 1575 nt, Artificial Sequence
  derived and/or modified CDS sequence (opt1) from glycoprotein__RABV__JN936699.1
auggugccccagguccuccuguucgugccguuccugguguucagcuccugcuucggcaaguuccccaucuacaccauccccgacaagcuggggcccuggagcccgaucgacauccaccaccucuccugccccaacaaccuggucguggaggacgagggcugcaccaaccugagcggguucuccuacauggagcucaaggugggcuacaucagcgccaucaaggucaacggguucacgugcaccggcguggugaccgaggccgagaccuacacgaacuucgucggcuacgugaccaccaccuucaagcgcaagcacuuccggcccaugcccgacgcgugccgcgccgccuacaacuggaagauggccggggacccgcgguacgaggagucccugcacaaccccuaccccgacuaccacuggcugcgcacggugaagaccaccaaggagagccucgucaucaucucccccagcguggccgaccuggacccguacgacaagucccugcacagccggguguuccccggcgggaagugcuccggcaucaccgucagcuccacgugcugcagcaccaaccacgacuacaccaucuggaugcccgagaacccccgccucgggaccuccugcgacaucuucacgaacagccggggcaagcgcgcguccaagggcgggaagaccugcggcuucguggacgagcgggggcuguacaagagccugaagggcgccugcaagcucaagcugugcggcgugcuggggcuccgccugauggacggcaccugggucgccauccagaccagcgacgagaucaaguggugcuccccggaccagcuggugaaccuccacgacuuccacagcgacgagaucgagcaccugguggucgaggagcuggugaagaagcgggaggagugccucgacgcccuggagacgaucaugaccaccaaguccgugagcuuccgccggcugucccaccuccgcaagcugguccccggguucggcaaggcguacaccaucuucaacaagacgcugauggaggccgacgcccacuacaagagcauccggaccuggaacgagaucauccccuccaaggggugccuccgcgugggcggccggugccacccccacgucaacgggguguucuucaacggcaucauccuggggccggacggccacgugcugauccccgagaugcagagcucccuccugcaccagcacauggagcugcucgagagcuccgucaucccccugaugcacccccuggccgacccgagcaccguguucaaggacggggacgaggccgaggacuucguggagguccaccuccccgacgugcacaagcagaucuccggcguggaccugggccugcccaacugggggaaguacguccucaucagcgcgggcgcccugaccgcccugaugcucaugaucuuccugaugacgugcugccgcaaggccaaccgggccgaguccauccagcacaaccccggggagaccggccgcaaggugagcgugaccucccacaacgggcgggucaucagcuccugggagagcuacaagagcggcggcgagaccaagcuguga

SEQ ID NO: 95184 - RNA, 1575 nt, Artificial Sequence; identical to SEQ ID NO: 94550
  derived and/or modified CDS sequence (opt1) from glycoprotein__RABV__JN936700.1

SEQ ID NO: 95185 - RNA, 1575 nt, Artificial Sequence; identical to SEQ ID NO: 95183
  derived and/or modified CDS sequence (opt1) from glycoprotein__RABV__JN936701.1

SEQ ID NO: 95186 - RNA, 1575 nt, Artificial Sequence; identical to SEQ ID NO: 94550
  derived and/or modified CDS sequence (opt1) from glycoprotein__RABV__JN936702.1

SEQ ID NO: 95187 - RNA, 1575 nt, Artificial Sequence; identical to SEQ ID NO: 94550
  derived and/or modified CDS sequence (opt1) from glycoprotein__RABV__JN936703.1

SEQ ID NO: 95188 - RNA, 1575 nt, Artificial Sequence
  derived and/or modified CDS sequence (opt1) from glycoprotein__RABV__JN936704.1
auggugccccagguccugcuguucgugccgcugcuggccuucagcuccugcuucggcaaguuccccaucuacaccauccccgacaagcucgggcccuggagcccgaucgacauccaccaccuguccugccccaacaaccugguggucgaggacgagggcugcaccaaccucagcggguucuccuacauggagcugaaggugggcuacaucagcgccaucaaggugaacggguucacgugcaccggcgucgugaccgaggcggagaccuacacgaacuucgugggcuacgucaccaccaccuucaagcgcaagcacuuccggcccaugcccgacgccugccgcgccgccuacaacuggaagauggccggggacccgcgguacgaggagucccugcacaaccccuaccccgacuaccacuggcuccgcacggugaagaccaccaaggagagccuggugaucaucucccccagcgucgcggaccuggacccguacgacaagucccuccacagccggguguuccccggcgggaagugcuccggcaucaccgugagcuccacgugcugcagcaccaaccacgacuacaccaucuggaugcccgagaacccccgccuggggaccuccugcgacaucuucacgaacagccggggcaagcgcgccuccaagggcgggaagaccugcggcuucgucgacgagcgggggcuguacaagagccucaagggcgccugcaagcugaagcugugcggcgugcucgggcugcgccugauggacggcaccuggguggccauccagaccagcgacgagaucaaguggugcuccccggaccagcucgucaaccugcacgacuuccacagcgacgagaucgagcaccuggugguggaggagcucgucaagaagcgggaggagugccuggacgcgcuggagacgaucaugaccaccaaguccgugagcuuccgccggcucucccaccuccgcaagcuggugcccggguucggcaaggccuacaccaucuucaacaagacgcucauggaggccgacgcccacuacaagagcauccggaccuggaacgagaucauccccuccaaggggugccugcgcgucggcggccggugccacccccacgugaacggggucuucuucaacggcaucauccuggggccggacggccacgugcucauccccgagaugcagagcucccugcugcaccagcacauggagcuccuggagagcuccgugaucccccugaugcacccccucgccgacccgagcaccgucuucaaggacggggacgaggcggaggacuucguggaggugcaccuccccgacguccacaagcagaucuccggcguggaccugggccugcccaacugggggcgcuacgugcugaucagcgccggcgcccugaccgcccucaugcugaugaucuuccugaugacgugcugccggaaggccaaccgcgcggagcucauccagcacaaccccggggagaccggccggaaggucuccgugaccagccacaacgggcgcgugaucuccagcugggaguccuacaagagcggcggcgagaccaagcuguga

SEQ ID NO: 95189 - RNA, 1575 nt, Artificial Sequence
  derived and/or modified CDS sequence (opt1) from glycoprotein__RABV__JN936705.1
augaucccccaggugcuccuguucgucccgcugcugguguucagcuccugcuucggcaaguuccccaucuacaccauccccgacaagcucgggcccuggagcccgaucgacauccaccaccuguccugccccaacaacaugguggucgaggacgagggcugcaccaaccugagcggguucuccuacauggagcucaaggugggcuacaucagcgccaucaaggugaacggguucacgugcaccggcgucgugaccgaggccgagaccuacacgaacuucgugggcuacgucaccaccaccuucaagcgcaagcacuuccggcccaugcccgacgcgugccgcgccgccuacaacuggaagauggccggggacccgcgguacgaggagucccugcacaaccccuaccccgacuaccacuggcugcgcacggugaagaccaccaaggagagccucgugaucaucucccccagcgucgccgaccuggacccguacgacaagucccugcacagccggguguuccccggcgggaagugcuccggcaucaccgugagcuccacgugcugcagcaccaaccacgacuacaccaucuggaugcccgagaacccccgccucgggaccuccugcgacaucuucacgaacagccggggcaagcgcgcguccaagggcgggaagaccugcggcuucgucgacgagcgggggcuguacaagagccugaagggcgccugcaagcucaagcugugcggcgugcuggggcuccgccugauggacggcaccuggguggccauccagaccagcgacgagaucaaguggugcuccccggaccagcuggucaaccuccacgacuuccacagcgacgagaucgagcaccuggugguggaggagcuggucaagaagcgggaggagugccucgacgcccuggagacgaucaugaccaccaaguccgugagcuuccgccggcugucccaccuccgcaagcuggugcccggguucggcaaggcguacaccaucuucaacaagacgcugauggaggccgacgcccacuacaagagcauccggaccuggaacgagaucauccccuccaaggggugccuccgcgucggcggccggugccacccccacgugaacggggucuucuucaacggcaucauccuggggccggacggccacgugcugauccccgagaugcagagcucccuccugcaccagcacauggagcugcucgagagcuccgugaucccccugaugcacccccuggccgacccgagcaccgucuucaaggacggggacgaggccgaggacuucguggaggugcaccuccccgacguccacaagcagaucuccggcguggaccugggccugcccaacugggggaaguacgugcucaucagcgcgugcgcccugaccgcccugaugcucacgaucuuccugaugaccugcugccgcaagaccucccgggccgagagcauccagcacucccccggcgagaccgggcgcaaggucagcgugacgucccacaacggccgggugaucagcagcugggaguccuacaagagcgggggcgagaccaagcuguga

SEQ ID NO: 95190 - RNA, 1575 nt, Artificial Sequence
  derived and/or modified CDS sequence (opt1) from glycoprotein__RABV__JN936706.1
augaucccccaggugcuccuguucgucccguuccugguguucagcuccugcuucggcaaguuccccaucuacaccauccccgacaagcuggggcccuggagcccgaucgacauccaccaccucuccugccccaacaaccugguggucgaggacgagggcugcaccaaccugagcggguucuccuacauggagcucaaggugggcuacaucagcgccaucaaggugaacggguucacgugcaccggcgucgugaccgaggccgagaccuacacgaacuucgugggcuacgucaccaccaccuucaagcgcaagcacuuccggcccaugcccgacgcgugccgcgccgccuacaacuggaagauggccggggacccgcgguacgaggagucccugcacaaccccuaccccgacuaccacuggcugcgcacggugaagaccaccaaggagagccucgugaucaucucccccagcgucgccgaccuggacccguacgacaagucccugcacagccggguguuccccggcgggaagugcuccggcaucaccgugagcuccacgugcugcagcaccaaccacgacuacaccaucuggaugcccgagaacccccgccucgggaccuccugcgacaucuucacgaacagccggggcaagcgcgcguccaagggcgggaagaccugcggcuucgucgacgagcgggggcuguacaagagccugaagggcgccugcaagcucaagcugugcggcgugcuggggcuccgccugauggacggcaccuggguggccauccagaccagcgacgagaucaaguggugcuccccggaccagcuggucaaccuccacgacuuccacagcgacgagaucgagcaccuggugguggaggagcuggucaagaagcgggaggagugccucgacgcccuggagacgaucaugaccaccaaguccgugagcuuccgccggcugucccaccuccgcaagcuggugcccggguucggcaaggcguacaccaucuucaacaagacgcugauggaggccgacgcccacuacaagagcauccggaccuggaacgagaucauccccuccaaggggugccuccgcgucggcggccggugccacccccacgugaacggggucuucuucaacggcaucauccuggggccggacggccacgugcugauccccgagaugcagagcucccuccugcaccagcacauggagcugcucgagagcuccgugaucccccugaugcacccccuggccgacccgagcaccgucuucaaggacggggacgaggccgaggacuucguggaggugcaccuccccgacguccacaagcagaucuccggcguggaccugggccugcccaacugggggaaguacgugcucaucagcgcgggcgcccugaccgcccugaugcucaugacguuccugaugaccugcugccgcaagaccaaccgggccgaguccauccagcacagccccggggagaccggccgcaaggucuccgugacgagccacaacgggcgggugaucuccagcugggagagcuacaaguccggcggcgagaccaagcuguga

SEQ ID NO: 95191 - RNA, 1575 nt, Artificial Sequence
  derived and/or modified CDS sequence (opt1) from glycoprotein__RABV__JN936707.1
auggugccccaggccuuccuguucgucccgcuccuggccgugccccugugcuucggcaaguuccccaucuacaccauccccgacaagcucgggccguggagccccaucgacauccaccaccuguccugccccaacaaccugguggucgaggacgagggcugcaccaaccucagcggguucuccuacauggagcugaaggugggcuacaucagcgcgaucaaggugaacggguucacgugcaccggcgucgugaccgaggccgagaccuacacgaacuucgugggcuacgucaccaccaccuucaagcgcaagcacuuccggcccacgccggacgccugccgcuccgccuacaacuggaagauggccggggacccccgguacgaggagagccugcacaaccccuaccccgacuaccacuggcuccgcaccgugaagaccaccaaggaguccuucgugaucaucagcccguccgucgcggaccuggaccccuacgacaagagccugcacucccggguguucccccgcggcaagugcagcgggaucacgguguccagcaccuacugcuccaccaaccacgacuacaccaucuggaugcccgagaacccgcggcucggcacgagcugcgacaucuucaccaacucccgcgggaagcgggccagcaagggcuccaagaccugcggcuucgucgacgagcgcgggcuguacaagagccugaagggcgccugcaagcucaagcugugcggggugcugggccuccggcugauggacggcaccuggguggccauccagacgagcgacgagaccaaguggugcccgcccgaccagcuggucaaccuccacgacuuccacuccgacgagaucgagcaccuggugguggaggagcuggucaagaagcgcgaggagugccucgacgcgcuggagagcaucaugaccaccaaguccgugagcuuccggcgccugucccaccuccggaagcuggugcccggguucggcaaggccuacacgaucuucaacaagacccugauggaggccgacgcccacuacaagagcguccgcaccuggaacgagaucauccccuccaaggggugccuccgggugggcgggcgcugccacccccacgucaacggcguguucuucaacggcaucauccuggggcccgacggccacgugcugauccccgagaugcagagcucccuccugcagcagcacauggagcugcucgagagcuccgucaucccgcugaugcacccccuggccgaccccagcaccguguucaaggacggggacgaggcggaggacuucguggagguccaccuccccgacgugcacaagcaggucuccggcguggaccuggggcugccgagcuggggcaaguacgugcucauguccgccggcauccugacggcccugaugcucaccaucuuccugaugaccugcugccggcgcaccaaccgggccgagagcauccagcacucccugggggagacgggccgcaaggugagcgucaccucccagagcgggcgcgugaucagcuccugggagagcuacaaguccggcggggagaccaagcucuga

SEQ ID NO: 95192 - RNA, 1575 nt, Artificial Sequence; identical to SEQ ID NO: 94851
  derived and/or modified CDS sequence (opt1) from glycoprotein__RABV__JN936708.1

SEQ ID NO: 95193 - RNA, 1575 nt, Artificial Sequence
  derived and/or modified CDS sequence (opt1) from glycoprotein__RABV__JN936709.1
augaucccccaggugcugcuguucgucccguuccugguguucagccugugcuucggcaaguuccccaucuacaccauccccgacaagcucgggcccugguccccgaucgacauccaccaccugagcugccccaacaaccugguggucgaggacgagggcugcaccaaccucuccggguucagcuacauggagcugaaggugggcuacaucuccgccaucaaggugaacggguucacgugcaccggcgucgugaccgaggccgagaccuacacgaacuucgugggcuacgucaccaccaccuucaagcgcaagcacuuccggcccaugcccgacgcgugccgcgccgccuacaacuggaagauggccggggacccgcgguacgaggagagccugcacaaccccuaccccgacuaccacuggcuccgcacggugaagaccaccaaggagucccuggugaucaucagccccuccgucgccgaccuggacccguacgacaagagccuccacucccggguguuccccggcgggaagugcagcggcaucaccguguccagcacgugcugcuccaccaaccacgacuacaccaucuggaugcccgagaacccccgccuggggaccagcugcgacaucuucacgaacucccggggcaagcgcgcgagcaagggcgggaagaccugcggcuucgucgacgagcgggggcuguacaagucccucaagggcgccugcaagcugaagcugugcggcgugcucgggcugcgccugauggacggcaccuggguggccauccagaccagcgacgagaucaaguggugcagcccggaccagcucgucaaccugcacgacuuccacuccgacgagaucgagcaccuggugguggaggagcucgucaagaagcgggaggagugccuggacgcccuggagacgaucaugaccaccaagagcguguccuuccgccggcucagccaccuccgcaagcuggugcccggguucggcaaggcguacaccaucuucaacaagacgcucauggaggccgacgcccacuacaaguccauccggaccuggaacgagaucauccccagcaaggggugccugcgcgucggcggccggugccacccccacgugaacggggucuucuucaacggcaucauccuggggccggacggccacgugcucauccccgagaugcaguccagccugcugcaccagcacauggagcuccuggaguccagcgugaucccccugaugcacccccucgccgacccguccaccgucuucaaggacggggacgaggccgaggacuucguggaggugcaccuccccgacguccacaagcagaucagcggcguggaccugggccugcccaacugggggaaguacgugcugaucuccgcgggcgcccugaccgcccucaugcugaugaucuuccugaugacgugcugccgcaagaccaaccgggccgagagcauccagcacucccccggggagaccggccgcaaggucagcgugaccucccacaacgggcgggugaucagcuccugggagagcuacaagagcggcggcgagacgaagcucuga

SEQ ID NO: 95194 - RNA, 1575 nt, Artificial Sequence; identical to SEQ ID NO: 94851
  derived and/or modified CDS sequence (opt1) from glycoprotein__RABV__JN936710.1

SEQ ID NO: 95195 - RNA, 1575 nt, Artificial Sequence; identical to SEQ ID NO: 95174
  derived and/or modified CDS sequence (opt1) from glycoprotein__RABV__JN936711.1

SEQ ID NO: 95196 - RNA, 1575 nt, Artificial Sequence
  derived and/or modified CDS sequence (opt1) from glycoprotein__RABV__JN936712.1
augaucccccaggugcugcuguucgucccgcugcugguguucagccucugcuucggcaaguuccccaucuacaccauccccgacaagcuggggcccugguccccgaucgacauccaccaccugagcugccccaacaaccucguggucgaggacgagggcugcaccaaccuguccggguucagcuacauggagcugaaggugggcuacaucuccgccaucaaggugaacggguucacgugcaccggcgucgugaccgaggccgagaccuacacgaacuucgugggcuacgucaccaccaccuucaagcgcaagcacuuccggcccaugcccgacgcgugccgcgccgccuacaacuggaagauggccggggacccgcgguacgaggagagccuccacaaccccuaccccgacuaccacuggcugcgcacggugaagaccaccaaggagucccuggugaucaucagccccuccgucgccgaccucgacccguacgacaagagccugcacucccggguguuccccggcgggaagugcagcggcaucaccguguccagcacgugcugcuccaccaaccacgacuacaccaucuggaugcccgagaacccccgccuggggaccagcugcgacaucuucacgaacucccggggcaagcgcgcgagcaagggcgggaagaccugcggcuucgucgacgagcgggggcucuacaagucccugaagggcgccugcaagcugaagcucugcggcgugcuggggcugcgccucauggacggcaccuggguggccauccagaccagcgacgagaucaaguggugcagcccggaccagcuggucaaccugcacgacuuccacuccgacgagaucgagcaccucgugguggaggagcuggucaagaagcgggaggagugccuggacgcccucgagacgaucaugaccaccaagagcguguccuuccgccggcugagccaccuccgcaagcucgugcccggguucggcaaggcguacaccaucuucaacaagacgcugauggaggccgacgcccacuacaaguccauccggaccuggaacgagaucauccccagcaaggggugccugcgcgucggcggccggugccacccccacgugaacggggucuucuucaacggcaucauccucgggccggacggccacgugcugauccccgagaugcaguccagccugcuccaccagcacauggagcugcuggaguccagcgugaucccccucaugcacccccuggccgacccguccaccgucuucaaggacggggacgaggccgaggacuucguggaggugcaccuccccgacguccacaagcagaucagcggcguggaccugggccugcccaacugggggaaguacgugcugaucuccgcgggcgcccucaccgcccugaugcugaugaucuuccucaugacgugcugccgcaagaccaaccgggccgagagcauccagcacucccccggggagaccggccgcaaggucagcgugaccucccacaacgggcgggugaucagcuccugggagagcuacaagagcggcggcgagacgaagcuguga

SEQ ID NO: 95197 - RNA, 1575 nt, Artificial Sequence
  derived and/or modified CDS sequence (opt1) from glycoprotein__RABV__JN936713.1
auggugccccaggccguccuguucgugccgcuccuggccgugccccugugcuucggcaaguuccccaucuacaccauccccgacaagcucgggccguggagccccaucgacauccaccaccuguccugccccaacaaccuggucguggaggacgagggcugcaccaaccucagcggguucuccuacauggagcugaaggugggcuacaucagcgcgaucaaggucaacggguucacgugcaccggcguggugaccgaggccgagaccuacacgaacuucgucggcuacgugaccaccaccuucaagcgcaagcacuuccggcccacgccggacgccugccgcuccgccuacaacuggaagauggccggggacccccgguacgaggagagccugcacaaccccuaccccgacuaccacuggcuccgcaccgugcggaccaccaaggaguccuucgucaucaucagcccguccguggcggaccuggaccccuacgacaagagccugcacucccgcguguucccccggggcaagugcagcgggaucacggucuccagcaccuacugcuccaccaaccacgacuacaccaucuggaugcccgagaacccgcgccucggcacgagcugcgacaucuucaccaacucccgggggaagcgcgccagcaagggcuccaagaccugcggcuucguggacgagcgggggcuguacaagagccugaagggcgccugcaagcucaagcugugcggggugcugggccuccgccugauggacggcaccugggucgccauccagacgagcgacgagaccaaguggugcccgcccgaccagcuggugaaccuccacgacuuccacuccgacgagaucgagcaccugguggucgaggagcuggugaagaagcgggaggagugccucgacgcgcuggagagcaucaugaccaccaaguccgugagcuuccgccggcugucccaccuccgcaagcugguccccggguucggcaaggccuacacgaucuucaacaagacccugauggaggccgacgcccacuacaagagcgugcggaccuggaacgagaucauccccuccaaggggugccuccgcgucggcgggcggugccacccccacgugaacggcguguucuucaacggcaucauccuggggcccgacggccacguccugauccccgagaugcagagcucccuccugcagcagcacauggagcugcucgagagcuccgugaucccgcugaugcacccccuggccgaccccagcaccguguucaaggacggggacgaggcggaggacuucgucgaggugcaccuccccgacgugcacaagcaggucuccggcguggaccuggggcugccgagcuggggcaaguacgugcucauguccgccggcauccugacggcccugaugcucaugaucuuccugaugaccugcugccgccggaccaaccgcgccgagagcauccagcacucccugggggagaccggccgcaaggucagcgugacgucccagaacgggcgggugaucagcagcugggaguccuacaagagcggcggggagaccaagcucuga

SEQ ID NO: 95198 - RNA, 1575 nt, Artificial Sequence; identical to SEQ ID NO: 94863
  derived and/or modified CDS sequence (opt1) from glycoprotein__RABV__JN936714.1

SEQ ID NO: 95199 - RNA, 1575 nt, Artificial Sequence
  derived and/or modified CDS sequence (opt1) from glycoprotein__RABV__JN936715.1
auggugccccaggcccugcuguucgucccgcugcuggccgugccccucugcuucggcaaguuccccaucuacaccauccccgacaagcuggggccguggagccccaucgacauccaccaccuguccugccccaacaaccucguggucgaggacgagggcugcaccaaccugagcggguucuccuacauggagcugaaggugggcuacaucagcgcgaucaaggugaacggguucacgugcaccggcgucgugaccgaggccgagaccuacacgaacuucgugggcuacgucaccaccaccuucaagcgcaagcacuuccggcccacgccggacgccugccgcuccgccuacaacuggaagauggccggggacccccgguacgaggagagccuccacaaccccuaccccgacuaccacuggcugcgcaccgugaagaccaccaaggaguccuucgugaucaucagcccguccgucgcggaccuggaccccuacgacaagagccuccacucccggguguucccccgcggcaagugcagcgggaucacgguguccagcaccuacugcuccaccaaccacgacuacaccaucuggaugcccgagaacccgcggcugggcacgagcugcgacaucuucaccaacucccgcgggaagcgggccagcaagggcuccaagaccugcggcuucgucgacgagcgcgggcuguacaagagccucaagggcgccugcaagcugaagcugugcggggugcucggccugcggcugauggacggcaccuggguggccauccagacgagcgacgagaccaaguggugcccgcccgaccagcucgucaaccugcacgacuuccacuccgacgagaucgagcaccuggugguggaggagcucgucaagaagcgcgaggagugccuggacgcgcuggagagcaucaugaccaccaaguccgugagcuuccggcgccucucccaccuccggaagcuggugcccggguucggcaaggccuacacgaucuucaacaagacccucauggaggccgacgcccacuacaagagcguccgcaccuggaacgagaucauccccuccaaggggugccugcgggugggcgggcgcugccacccccacgucaacggcguguucuucaacggcaucauccuggggcccgacggccacgugcucauccccgagaugcagagcucccugcugcagcagcacauggagcuccuggagagcuccgucaucccgcugaugcacccccucgccgaccccagcaccguguucaaggacggggacgaggcggaggacuucguggagguccaccuccccgacgugcacaagcaggucuccggcguggaccuggggcugccgagcuggggcaaguacgugcugauguccgccggcauccugacggcccucaugcugaugaucuuccugaugaccugcugccggcgcaccaaccgggccgagagcauccagcacucccucggggagaccggccgcaaggugagcgucacgucccagaacgggcgcgugaucagcagcugggaguccuacaagagcggcggggagaccaagcuguga

SEQ ID NO: 95200 - RNA, 1575 nt, Artificial Sequence
  derived and/or modified CDS sequence (opt1) from glycoprotein__RABV__JN936716.1
augaucccccaggugcugcuccuggucccgcugcucguguucagcuccugcuucggcaaguuccccaucuacaccauccccgacaagcuggggcccuggagcccgaucgacauccaccaccuguccugccccaacaaccucguggucgaggacgagggcugcaccaaccugagcggguucuccuacauggagcugaaggugggcuacaucagcgccaucaaggugaacggguucacgugcaccggcgucgugaccgaggccgagaccuacacgaacuucgugggcuacgucaccaccaccuucaagcgcaagcacuuccggcccaugcccgacgcgugccgcgccgccuacaacuggaagauggccggggacccgcgguacgaggagucccuccacaaccccuaccccgacuaccacuggcugcgcacggugaagaccaccaaggagagccuggugaucaucucccccagcgucgccgaccucgacccguacgacaagucccugcacagccggguguuccccggcgggaagugcuccggcaucaccgugagcuccacgugcugcagcaccaaccacgacuacaccaucuggaugcccgagaacccccgccuggggaccuccugcgacaucuucacgaacagccggggcaagcgcgcguccaagggcgggaagaccugcggcuucgucgacgagcgggggcucuacaagagccugaagggcgccugcaagcugaagcucugcggcgugcuggggcugcgccucauggacggcaccuggguggccauccagaccagcgacgagaucaaguggugcuccccggaccagcuggucaaccugcacgacuuccacagcgacgagaucgagcaccucgugguggaggagcuggucaagaagcgggaggagugccuggacgcccucgagacgaucaugaccaccaaguccgugagcuuccgccggcugucccaccuccgcaagcuggugcccggguucggcaaggcguacaccaucuucaacaagacgcugauggaggccgacgcccacuacaagagcauccggaccuggaacgagaucauccccuccaaggggugccugcgcgucggcggccggugccacccccacgugaacggggucuucuucaacggcaucauccucgggccggacggccacgugcugauccccgagaugcagagcucccugcuccaccagcacauggagcugcuggagagcuccgugaucccccucaugcacccccuggccgacccgagcaccgucuucaaggacggggacgaggccgaggacuucguggaggugcaccuccccgacguccacaagcagaucuccggcguggaccugggccugcccaacugggggaaguacgugcugaucagcgcgggcgcccucaccgcccugauguccaugaucuuccugaugacgugcugccgcaagaccaaccgggccgagagcauccagcacucccccggggagaccggccgcaaggucagcgugaccucccacaacgggcgggugaucagcagcugggaguccuacaagagcggcggcgagacgaagcucuga

SEQ ID NO: 95201 - RNA, 1575 nt, Artificial Sequence
  derived and/or modified CDS sequence (opt1) from glycoprotein__RABV__JN936717.1
augaucccccaggcccugcuccuggugccgcugcucgucuucagcuccugcuucggcaaguuccccaucuacaccauccccgacaagcuggggcccuggagcccgaucgacauccaccaccuguccugccccaacaaccucgugguggaggacgagggcugcaccaaccugagcggguucuccuacauggagcugaaggucggcuacaucagcgccaucaaggugaacggguucacgugcaccggcguggucaccgaggcggagaccuacacgaacuucgugggcuacgugaccaccaccuucaagcgcaagcacuuccggcccaugcccgacgccugccgcgccgccuacaacuggaagauggccggggacccgcgguacgaggagucccuccacaaccccuaccccgacuaccacuggcugcgcacggucaagaccaccaaggagagccuggugaucaucucccccagcguggcggaccucgacccguacgacaagucccugcacagccgggucuuccccggcgggaagugcuccggcaucaccgugagcuccacgugcugcagcaccaaccacgacuacaccaucuggaugcccgagaacccccgccuggggaccuccugcgacaucuucacgaacagccggggcaagcgcgccuccaagggcgggaagaccugcggcuucguggacgagcgggggcucuacaagagccugaagggcgccugcaagcugaagcucugcggcguccuggggcugcgccucauggacggcaccuggguggccauccagaccagcgacgagaucaaguggugcuccccggaccagcuggugaaccugcacgacuuccacagcgacgagaucgagcaccucgucguggaggagcuggugaagaagcgggaggagugccuggacgcgcucgagacgaucaugaccaccaaguccgucagcuuccgccggcugucccaccuccgcaagcuggugcccggguucggcaaggccuacaccaucuucaacaagacgcugauggaggccgacgcccacuacaagagcauccggaccuggaacgagaucauccccuccaaggggugccugcgcgugggcggccggugccacccccacgucaacgggguguucuucaacggcaucauccucgggccggacggccacguccugauccccgagaugcagagcucccugcuccaccagcacauggagcugcuggagagcuccgugaucccccucaugcacccccuggccgacccgagcaccguguucaaggacggggacgaggcggaggacuucgucgaggugcaccuccccgacgugcacaagcagaucuccggcgucgaccugggccugcccaacugggggaaguacgugcugaucagcgccggcgcccucaccgcccugauguccaugaucuuccugaugacgugcugccgcaagaccaaccgggccgagagcauccagcacucccccggggagaccggccgcaaggugagcgucaccucccacaacgggcgggugaucagcagcugggaguccuacaagagcggcggcgagacgaagcucuga

SEQ ID NO: 95202 - RNA, 1575 nt, Artificial Sequence
  derived and/or modified CDS sequence (opt1) from glycoprotein__RABV__JN936718.1
augaucccccaggugcugcuccuggucccgcugcucguguucagcuccugcuucggcaaguuccccaucuacaccauccccgacaagcuggggcccuggagcccgaucgacauccaccaccuguccugccccaacaaccucguggucgaggacgagggcugcaccaaccugagcggguucuccuacauggagcugaaggugggcuacaucagcgccaucaaggugaacggguucacgugcaccggcgucgugaccgaggccgagaccuacacgaacuucgugggcuacgucaccaccaccuucaagcgcaagcacuuccggcccaugcccgacgcgugccgcgccgccuacaacuggaagauggccggggacccgcgguacgaggagucccuccacaaccccuaccccgacuaccacuggcugcgcacggugaagaccaccaaggagagccuggugaucaucucccccagcgucgccgaccucgacccguacgacaagucccugcacagccggguguuccccggcgggaagugcuccggcaucaccgugagcuccacgugcugcagcaccaaccacgacuacaccaucuggaugcccgagaacccccgccuggggaccuccugcgacaucuucacgaacagccggggcaagcgcgcguccaagggcgggcagaccugcggcuucgucgacgagcgggggcucuacaagagccugaagggcgccugcaagcugaagcucugcggcgugcuggggcugcgccucauggacggcaccuggguggccauccagaccagcgacgagaucaaguggugcuccccggaccagcuggucaaccugcacgacuuccacagcgacgagaucgagcaccucgugguggaggagcuggucaagaagcgggaggagugccuggacgcccucgagacgaucaugaccaccaaguccgugagcuuccgccggcugucccaccuccgcaagcuggugcccggguucggcaaggcguacaccaucuucaacaagacgcugauggaggccgacgcccacuacaagagcauccggaccuggaacgagaucauccccuccaaggggugccugcgcgucggcggccggugccacccccacgugaacggggucuucuucaacggcaucauccucgggccggacggccacgugcugauccccgagaugcagagcucccugcuccaccagcacauggagcugcuggagagcuccgugaucccccucaugcacccccuggccgacccgagcaccgucuucaaggacggggacgaggccgaggacuucguggaggugcaccuccccgacguccacaagcagaucuccggcguggaccugggccugcccaacugggggaaguacgugcugaucagcgcgggcgcccucaccgcccugauguccaugaucuuccugaugacgugcugccgcaagaccaaccgggccgagagcauccagcacucccccggggagaccggccgcaaggucagcgugaccucccacaacgggcgggugaucagcagcugggaguccuacaagagcggcggcgagacgaagcucuga

SEQ ID NO: 95203 - RNA, 1575 nt, Artificial Sequence
  derived and/or modified CDS sequence (opt1) from glycoprotein__RABV__JN936719.1
augaucccccaggcccugcuguucgugccgcugcuggccgucccccucugcuucggcaaguuccccaucuacaccauccccgacaagcuggggccguggagccccaucgacauccaccaccuguccugccccaacaaccucgugguggaggacgagggcugcaccaaccugagcggguucuccuacauggagcugaaggucggcuacaucagcgcgaucaaggugaacggguucacgugcaccggcguggucaccgaggccgagaccuacacgaacuucgugggcuacgugaccaccaccuucaagcgcaagcacuuccggcccacgccggacgccugccgcuccgccuacaacuggaagauggccggggacccccgguacgaggagagccuccacaaccccuaccccgacuaccacuggcugcgcaccgucaagaccaccaaggaguccuucgugaucaucagcccguccguggcggaccuggaccccuacgacaagagccuccacucccgggucuucccccgcggcaagugcagcgggaucacgguguccagcaccuacugcuccaccaaccacgacuacaccaucuggaugcccgagaacccgcggcugggcacgagcugcgacaucuucaccaacucccgcgggaagcgggccagcaagggcuccaagaccugcggcuucguggacgagcgcgggcuguacaagagccucaagggcgccugcaagcugaagcugugcgggguccucggccugcggcugauggacggcaccuggguggccauccagacgagcgacgagaccaaguggugcccgcccgaccagcucgugaaccugcacgacuuccacuccgacgagaucgagcaccuggucguggaggagcucgugaagaagcgcgaggagugccuggacgcgcuggagagcaucaugaccaccaaguccgucagcuuccggcgccucucccaccuccggaagcuggugcccggguucggcaaggccuacacgaucuucaacaagacccucauggaggccgacgcccacuacaagagcauccgcaccuggaacgagaucauccccuccaaggggugccugcgggugggcgggcgcugccacccccacgucaacggcguguucuucaacggcaucauccuggggcccgacggccacguccucauccccgagaugcagagcucccugcugcaccagcacauggagcuccuggagagcuccgugaucccgcugaugcacccccucgccgaccccagcaccguguucaaggacggggacgaggcggaggacuucgucgaggugcaccuccccgacgugcacaagcagaucuccggcgucgaccuggggcugccgagcuggggcaaguacgugcugauguccgccggcgcccugacggcccucaugcugaugaucuuccugaugaccugcugccggcgcaccaaccgggccgagagcauccagcacucccucggggagaccggccgcaaggugagcgucacgucccagaacgggcgcgugaucagcagcugggaguccuacaagagcggcggggagaccaagcuguga

SEQ ID NO: 95204 - RNA, 1575 nt, Artificial Sequence
  derived and/or modified CDS sequence (opt1) from glycoprotein__RABV__JN936720.1
augaucccccaggcccugcuguucgugccgcugcuggucuucccccucugcuucggcaaguuccccaucuacaccauccccgacaagcuggggccguggagccccaucgacauccaccaccuguccugccccaacaaccucgugguggaggacgagggcugcaccaaccugagcggguucuccuacauggagcugaaggucggcuacaucagcgccaucaaggugaacggguucacgugcaccggcguggucaccgaggcggagaccuacacgaacuucgugggcuacgugaccaccaccuucaagcgcaagcacuuccggcccacgccggacgccugccgcuccgccuacaacuggaagauggccggggacccccgguacgaggagagccuccacaaccccuaccccgacuaccacuggcugcgcaccgucaagaccaccaaggaguccguggugaucaucagcccguccgucgccgaccuggaccccuacgacaagagccuccacucccggguguucccccgcggcaagugcagcgggaucacgguguccagcgcguacugcuccaccaaccacgacuacaccaucuggaugcccgagaacccgcggcugggcaccagcugcgacaucuucacgaacucccgcgggaagcgggccagcaagggcuccaagaccugcggcuucgucgacgagcgcgggcuguacaagagccucaagggcgccugcaagcugaagcugugcggggugcucggccugcggcugauggacggcaccuggguggccauccagaccagcaacgagacgaaguggugcccgcccgaccagcucgucaaccugcacgacuuccacuccgacgagaucgagcaccuggugguggaggagcucgucgagaagcgcgaggagugccuggacgcgcuggagagcaucaugaccaccaaguccgugagcuuccggcgccucucccaccuccggaagcuggugcccggguucggcaaggccuacaccaucuucaacaagacgcucauggaggccgacgcccacuacaagagcguccgcaccuggaacgagaucauccccuccaaggggugccugcgggugggcgggcgcugccacccccacgucaacggcguguucuucaacggcaucauccuggggcccgacggccacgugcucauccccgagaugcagagcucccugcugcagcagcacauggagcuccuggagagcuccgucaucccgcugaugcacccccucgccgaccccagcaccguguucaaggacggggacgaggcggaggacuucguggagguccaccuccccgacgugcacaagcaggucuccggcguggaccuggggcugccgagcuggggcaaguacgugcugauguccgccggcauccugaccgcccucaugcugaugaucuuccugaugacgugcugccggcgcaccaaccgggccgagagcauccagcacucccucggggagaccggccgcaaggugagcgucaccucccagaacgggcgcgugaucagcagcugggaguccuacaagagcggcggggagacgaagcuguga

SEQ ID NO: 95205 - RNA, 1575 nt, Artificial Sequence
  derived and/or modified CDS sequence (opt1) from glycoprotein__RABV__JN936721.1
augaucccccaggcccugcuguucgugccgcugcuggucuucccccucugcuucggcaaguuccccaucuacaccauccccgacaagcuggggccguggagccccaucgacauccaccaccuguccugccccaacaaccucgugguggaggacgagggcugcaccaaccugagcggguucuccuacauggagcugaaggucggcuacaucagcgccaucaaggugaacggguucacgugcaccggcguggucaccgaggcggagaccuacacgaacuucgugggcuacgugaccaccaccuucaagcgcaagcacuuccggcccacgccggacgccugccgcuccgccuacaacuggaagauggccggggacccccgguacgaggagagccuccacaaccccuaccccgacuaccacuggcugcgcaccgucaagaccaccaaggaguccguggugaucaucagcccguccgucgccgaccuggaccccuacgacaagagccuccacucccggguguucccccgcggcaagugcagcgggaucacgguguccagcgcguacugcuccaccaaccacgacuacaccaucuggaugcccgagaacccgcggcugggcaccagcugcgacaucuucacgaacucccgcgggaagcgggccagcaagggcuccaagaccugcggcuucgucgacgagcgcgggcuguacaagagccucaagggcgccugcaagcugaagcugugcggggugcucggccugcggcugauggacggcaccuggguggccauccagaccagcaacgagacgaaguggugcccgcccgaccagcucgucaaccugcacgacuuccacuccgacgagaucgagcaccuggugguggaggagcucgucgagaagcgcgaggagugccuggacgcgcuggagaccaucaugaccaccaagagcguguccuuccggcgccucagccaccuccggaagcuggugcccggguucggcaaggccuacacgaucuucaacaagacccucauggaggccgacgcccacuacaaguccauccgcaccuggaacgagaucauccccagcaaggggugccugcgggucggcgggcgcugccacccccacgugaacggcgucuucuucaacggcaucauccuggggcccgacggccacgugcucauccccgagaugcaguccagccugcugcaccagcacauggagcuccuggaguccagcgugaucccgcugaugcacccccucgccgaccccuccaccgucuucaaggacggggacgaggcggaggacuucguggaggugcaccuccccgacguccacaagcagaucagcggcguggaccuggggcugccgaacuggggcaaguacgugcugaucuccgccggcgcccugacggcccucaugagcaugaucuuccugaugaccugcugccggaagaccaaccgcgccgaguccauccagcacagccccggggagaccggccggaaggucuccgugacgagccacaacgggcgcgugaucuccagcugggagagcuacaaguccggcggggagaccaagcuguga

SEQ ID NO: 95206 - RNA, 1575 nt, Artificial Sequence
  derived and/or modified CDS sequence (opt1) from glycoprotein__RABV__JN936722.1
augaucccccaggcccugcuguucgugccgcugcuggucuucccccucugcuucggcaaguuccccaucuacaccauccccgacaagcuggggccguggagccccaucgacauccaccaccuguccugccccaacaaccucgugguggaggacgagggcugcaccaaccugagcggguucuccuacauggagcugaaggucggcuacaucagcgccaucaaggugaacggguucacgugcaccggcguggucaccgaggcggagaccuacacgaacuucgugggcuacgugaccaccaccuucaagcgcaagcacuuccggcccacgccggacgccugccgcuccgccuacaacuggaagauggccggggacccccgguacgaggagagccuccacaaccccuaccccgacuaccacuggcugcgcaccgucaagaccaccaaggaguccguggugaucaucagcccguccgucgccgaccuggaccccuacgacaagagccuccacucccggguguucccccgcggcaagugcagcgggaucacgguguccagcgcguacugcuccaccaaccacgacuacaccaucuggaugcccgagaacccgcggcugggcaccagcugcgacaucuucacgaacucccgcgggaagcgggccagcaagggcuccaagaccugcggcuucgucgacgagcgcgggcuguacaagagccucaagggcgccugcaagcugaagcugugcggggugcucggccugcggcugauggacggcaccuggguggccauccagaccagcaacgagacgaaguggugcccgcccgaccagcucgucaaccugcacgacuuccacuccgacgagaucgagcaccuggugguggaggagcucgucgagaagcgcgaggagugccuggacgcgcuggagagcaucaugaccaccaaguccgugagcuuccggcgccucucccaccuccggaagcuggugcccggguucggcaaggccuacaccaucuucaacaagacgcucauggaggccgacgcccacuacaagagcauccgcaccuggaacgagaucauccccuccaaggggugccugcgggucggcgggcgcugccacccccacgugaacggcgucuucuucaacggcaucauccuggggcccgacggccacgugcucauccccgagaugcagagcucccugcugcaccagcacauggagcuccuggagagcuccgugaucccgcugaugcacccccucgccgaccccagcaccgucuucaaggacggggacgaggcggaggacuucguggaggugcaccuccccgacguccacaagcagaucuccggcguggaccuggggcugccgaacuggggcaaguacgugcugaucagcgccggcgcccugaccgcccucauguccaugaucuuccugaugacgugcugccggaagaccaaccgcgccgagagcauccagcacucccccggggagaccggccggaaggucagcgugaccucccacaacgggcgcgugaucagcagcugggaguccuacaagagcggcggggagacgaagcuguga

SEQ ID NO: 95207 - RNA, 1575 nt, Artificial Sequence
  derived and/or modified CDS sequence (opt1) from glycoprotein__RABV__JN936723.1
augaucccccaggcccugcuccuggugccgcugcucgccuucccccugugcuucggcaaguuccccaucuacaccauccccgacaagcuggggccguggagccccaucgacauccaccaccucuccugccccaacaaccuggucguggaggacgagggcugcaccaaccugagcggguucuccuacauggagcucaaggugggcuacaucagcgcgaucaaggucaacggguucacgugcaccggcguggugaccgaggccgagaccuacacgaacuucgucggcuacgugaccaccaccuucaagcgcaagcacuuccggcccacgccggacgccugccgcuccgccuacaacuggaagauggccggggacccccgguacgaggagagccugcacaaccccuaccccgacuaccacuggcugcgcaccgugaagaccaccaaggagucccucgucaucaucagcccguccguggcggaccuggaccccuacgacaagagccugcacucccggguguucccccgcggcaagugcagcgggaucacggucuccagcacgugcugcuccaccaaccacgacuacaccaucuggaugcccgagaacccgcggcucggcaccagcugcgacaucuucaccaacucccgcgggaagcgggccagcaagggcuccaagaccugcggcuucguggacgagcgcgggcuguacaagagccugaagggcgccugcaagcucaagcugugcggggugcugggccuccggcugauggacggcaccugggucgccauccagacgagcgacgagaucaaguggugcccgcccgaccagcuggugaaccuccacgacuuccacuccgacgagaucgagcaccugguggucgaggagcuggugaagaagcgcgaggagugccucgacgcgcuggagaccaucaugaccaccaagagcguguccuuccggcgccugagccaccuccggaagcugguccccggguucggcaaggccuacacgaucuucaacaagacccugauggaggccgacgcccacuacaaguccauccgcaccuggaacgagaucauccccagcaaggggugccuccgggugggcgggcgcugccacccccacgugaacggcgucuucuucaacggcaucauccuggggcccgacggccacgugcugauccccgagaugcaguccagccuccugcaccagcacauggagcugcucgaguccagcgucaucccgcugaugcacccccuggccgaccccuccaccguguucaaggacggggacgaggcggaggacuucguggagguccaccuccccgacgugcacaagcagaucagcggcguggaccuggggcugccgaacuggggcaaguacguccucaucuccgccggcgcccugacggcccugaugagcaugaucuuccucaugaccugcugccggaagaccaaccgcgccgaguccauccagcacagccccggggagaccggccggaagguguccgugacgagccacaacgggcgcgucaucuccagcugggagagcuacaaguccggcggggagaccaagcuguga

SEQ ID NO: 95208 - RNA, 1575 nt, Artificial Sequence
  derived and/or modified CDS sequence (opt1) from glycoprotein__RABV__JN936724.1
augaucccccaggcccugcuguucgugccgcugcuggucuucccccucugcuucggcaaguuccccaucuacaccauccccgacaagcuggggccguggagccccaucgacauccaccaccuguccugccccaacaaccucgugguggaggacgagggcugcaccaaccugagcggguucuccuacauggagcugaaggucggcuacaucagcgccaucaaggugaacggguucacgugcaccggcguggucaccgaggcggagaccuacacgaacuucgugggcuacgugaccaccaccuucaagcgcaagcacuuccggcccacgccggacgccugccgcuccgccuacaacuggaagauggccggggacccccgguacgaggagagccuccacaaccccuaccccgacuaccacuggcugcgcaccgucaagaccaccaaggaguccguggugaucaucagcccguccgucgccgaccuggaccccuacgacaagagccuccacucccggguguucccccgcggcaagugcagcgggaucacgguguccagcgcguacugcuccaccaaccacgacuacaccaucuggaugcccgagaacccgcggcugggcaccagcugcgacaucuucacgaacucccgcgggaagcgggccagcaagggcuccaagaccugcggcuucgucgacgagcgcgggcuguacaagagccucaagggcgccugcaagcugaagcugugcggggugcucggccugcggcugauggacggcaccuggguggccauccagaccagcaacgagacgaaguggugcccgcccgaccagcucgucaaccugcacgacuuccacuccgacgagaucgagcaccuggugguggaggagcucgucgagaagcgcgaggagugccuggacgcgcuggagaccaucaugaccaccaagagcguguccuuccggcgccucagccaccuccggaagcuggugcccggguucggcaaggccuacacgaucuucaacaagacccucauggaggccgacgcccacuacaaguccauccgcaccuggaacgagaucauccccagcaaggggugccugcgggucggcgggcgcugccacccccacgugaacggcgucuucuucaacggcaucauccuggggcccgacggccacgugcucauccccgagaugcaguccagccugcugcaccagcacauggagcuccuggaguccagcgugaucccgcugaugcacccccucgccgaccccuccaccgucuucaaggacggggacgaggcggaggacuucguggaggugcaccuccccgacguccacaagcagaucagcggcguggaccuggggcugccgaacuggggcaaguacgugcugaucuccgccggcgcccugacggcccucaugcugaccaucuuccugaugaccugcugccggaagaccagccgcgccgaguccauccagcacagccccggggagacgggccggaaggucuccgugaccagccacaacgggcgcgugaucuccagcugggagagcuacaaguccggcggggagaccaagcucuga

SEQ ID NO: 95209 - RNA, 1575 nt, Artificial Sequence; identical to SEQ ID NO: 94870
  derived and/or modified CDS sequence (opt1) from glycoprotein__RABV__JN936725.1

SEQ ID NO: 95210 - RNA, 1575 nt, Artificial Sequence; identical to SEQ ID NO: 95091
  derived and/or modified CDS sequence (opt1) from glycoprotein__RABV__JN936726.1

SEQ ID NO: 95211 - RNA, 1575 nt, Artificial Sequence; identical to SEQ ID NO: 94870
  derived and/or modified CDS sequence (opt1) from glycoprotein__RABV__JN936727.1

SEQ ID NO: 95212 - RNA, 1575 nt, Artificial Sequence; identical to SEQ ID NO: 94870
  derived and/or modified CDS sequence (opt1) from glycoprotein__RABV__JN936728.1

SEQ ID NO: 95213 - RNA, 1575 nt, Artificial Sequence; identical to SEQ ID NO: 94870
  derived and/or modified CDS sequence (opt1) from glycoprotein__RABV__JN936729.1

SEQ ID NO: 95214 - RNA, 1575 nt, Artificial Sequence; identical to SEQ ID NO: 94869
  derived and/or modified CDS sequence (opt1) from glycoprotein__RABV__JN936731.1

SEQ ID NO: 95215 - RNA, 1575 nt, Artificial Sequence; identical to SEQ ID NO: 94869
  derived and/or modified CDS sequence (opt1) from glycoprotein__RABV__JN936732.1

SEQ ID NO: 95216 - RNA, 1575 nt, Artificial Sequence
  derived and/or modified CDS sequence (opt1) from glycoprotein__RABV__JN936733.1
augaucccccaggugcugcuguucgucccgcugcugguguucagcuccugcuucggcaaguuccccaucuacaccauccccgacaagcucgggcccuggagcccgaucgacauccaccaccuguccugccccaacaaccugguggucgaggacgagggcugcaccaaccucagcggguucuccuacauggagcugaaggugggcuacaucagcgccaucaaggugaacggguucacgugcaccggcgucgugaccgaggccgagaccuacacgaacuucgugggcuacgucaccaccaccuucaagcgcaagcacuuccggcccaugcccgacgcgugccgcgccgccuacaacuggaagauggccggggacccgcgguacgaggagucccugcacaaccccuaccccgacuaccacuggcuccgcacggugaagaccaccaaggagagccuggugaucaucucccccagcgucgccgaccuggacccguacgacaagucccuccacagccggguguuccccggcgggaagugcuccggcaucaccgugagcuccacgugcugcagcaccaaccacgacuacaccaucuggaugcccgagaacccccgccuggggaccuccugcgacaucuucacgaacagccggggcaagcgcgcguccaagggcgggaagaccugcggcuucgucgacgagcgggggcuguacaagagccucaagggcgccugcaagcugaagcugugcggcgugcucgggcugcgccugauggacggcaccuggguggccauccagaccagcgacgagaucaaguggugcuccccggaccagcucgucaaccugcacgacuuccacagcgacgagaucgagcaccuggugguggaggagcucgucaagaagcgggaggagugccuggacgcccuggagacgaucaugaccaccaaguccgugagcuuccgccggcucucccaccuccgcaagcuggugcccggguucggcaaggcguacaccaucuucaacaagacgcucauggaggccgacgcccacuacaagagcauccggaccuggaacgagaucauccccuccaaggggugccugcgcgucggcggccggugccacccccacgugaacggggucuucuucaacggcaucauccuggggccggacggccacgugcucauccccgagaugcagagcucccugcugcaccagcacauggagcuccuggagagcuccgugaucccccugaugcacccccucgccgacccgagcaccgucuucaaggacggggacgaggccgaggacuucguggaggugcaccuccccgacguccacaagcagaucuccggcguggaccugggccugcccaacugggggaaguacgugcugaucagcgcgggcgcccugaccgcccucaugcugacgaucuuccugaugaccugcugccgcaagaccaaccgggccgaguccauccaccacagccccggggagaccggccgcaaggucuccgugacgagccacaacgggcgggugaucuccagcugggagagcuacaaguccggcagcgagaccaagcucuga

SEQ ID NO: 95217 - RNA, 1575 nt, Artificial Sequence; identical to SEQ ID NO: 95216
  derived and/or modified CDS sequence (opt1) from glycoprotein__RABV__JN936734.1

SEQ ID NO: 95218 - RNA, 1575 nt, Artificial Sequence; identical to SEQ ID NO: 94870
  derived and/or modified CDS sequence (opt1) from glycoprotein__RABV__JN936735.1

SEQ ID NO: 95219 - RNA, 1575 nt, Artificial Sequence; identical to SEQ ID NO: 94870
  derived and/or modified CDS sequence (opt1) from glycoprotein__RABV__JN936736.1

SEQ ID NO: 95220 - RNA, 1575 nt, Artificial Sequence
  derived and/or modified CDS sequence (opt1) from glycoprotein__RABV__JN936737.1
augaucccccaggugcugcuguucgucccgcugcugguguucagcuccugcuucggcaaguuccccaucuacaccauccccgacaagcucgggcccuggagcccgaucgacauccaccaccuguccugccccaacaaccugguggucgaggacgagggcugcaccaaccucagcggguucuccuacauggagcugaaggugggcuacaucagcgccaucaaggugaacggguucacgugcaccggcgucgugaccgaggccgagaccuacacgaacuucgugggcuacgucaccaccaccuucaagcgcaagcacuuccggcccaugcccgacgcgugccgcgccgccuacaacuggaagauggccggggacccgcgguacgaggagucccugcacaaccccuaccccgacuaccacuggcuccgcacggugaagaccaccaaggagagccuggugaucaucucccccagcgucgccgaccuggacccguacgacaagucccuccacagccggguguuccccggcgggaagugcuccggcaucaccgugagcuccacgugcugcagcaccaaccacgacuacaccaucuggaugcccgagaacccccgccuggggaccuccugcgacaucuucacgaacagccggggcaagcgcgcguccaagggcgggaagaccugcggcuucgucgacgagcgggggcuguacaagagccucaagggcgccugcaagcugaagcugugcggcgugcucgggcugcgccugauggacggcaccuggguggcccuccagaccagcgacgagaucaaguggugcuccccggaccagcuggucaaccugcacgacuuccacagcgacgagaucgagcaccucgugguggaggagcuggucaagaagcgggaggagugccuggacgcccucgagacgaucaugaccaccaaguccgugagcuuccgccggcugucccaccuccgcaagcucgugcccggguucggcaaggcguacaccaucuucaacaagacgcugauggaggccgacgcccacuacaagagcauccggaccuggaacgagaucauccccuccaaggggugccugcgcgucggcggccggugccacccccacgugaacggggucuucuucaacggcaucauccucgggccggacggccacgugcugauccccgagaugcagagcucccugcuccaccagcacauggagcugcuggagagcuccgugaucccccucaugcacccccuggccgacccgagcaccgucuucaaggacggggacgaggccgaggacuucguggaggugcaccuccccgacguccacaagcagaucuccggcguggaccugggccugcccaacugggggaaguacgugcugaucagcgcgggcgcccucaccgcccugaugcugacgaucuuccucaugaccugcugccgcaagaccaaccgggccggguccauccagcacagccccggcgagaccgggcgcaaggucuccgugacgagccacaacggccgggugaucuccagcugggagagcuacaaguccggcagcgagaccaagcuguga

SEQ ID NO: 95221 - RNA, 1575 nt, Artificial Sequence; identical to SEQ ID NO: 94869
  derived and/or modified CDS sequence (opt1) from glycoprotein__RABV__JN936738.1

SEQ ID NO: 95222 - RNA, 1575 nt, Artificial Sequence; identical to SEQ ID NO: 94869
  derived and/or modified CDS sequence (opt1) from glycoprotein__RABV__JN936739.1

SEQ ID NO: 95223 - RNA, 1575 nt, Artificial Sequence; identical to SEQ ID NO: 94869
  derived and/or modified CDS sequence (opt1) from glycoprotein__RABV__JN936740.1

SEQ ID NO: 95224 - RNA, 1575 nt, Artificial Sequence; identical to SEQ ID NO: 94869
  derived and/or modified CDS sequence (opt1) from glycoprotein__RABV__JN936741.1

SEQ ID NO: 95225 - RNA, 1575 nt, Artificial Sequence; identical to SEQ ID NO: 94869
  derived and/or modified CDS sequence (opt1) from glycoprotein__RABV__JN936742.1

SEQ ID NO: 95226 - RNA, 1575 nt, Artificial Sequence; identical to SEQ ID NO: 94869
  derived and/or modified CDS sequence (opt1) from glycoprotein__RABV__JN936743.1

SEQ ID NO: 95227 - RNA, 1575 nt, Artificial Sequence
  derived and/or modified CDS sequence (opt1) from glycoprotein__RABV__JN936744.1
augauccuccaggugcugcuguucgucccccugcucguguucagcuccugcuucggcaaguucccgaucuacaccauccccgacaagcuggggcccuggagccccaucgacauccaccaccuguccugcccgaacaaccucguggucgaggacgagggcugcaccaaccugagcggguucuccuacauggagcugaaggugggcuacaucagcgccaucaaggugaacggguucacgugcaccggcgucgugaccgaggccgagaccuacacgaacuucgugggcuacgucaccaccaccuucaagcgcaagcacuuccggcccaugcccgacgcgugccgcgccgccuacaacuggaagauggccggggacccccgguacgaggagucccuccacaacccguaccccgacuaccacuggcugcgcacggugaagaccaccaaggagagccuggugaucaucucccccagcgucgccgaccucgaccccuacgacaagucccugcacagccggguguucccgggcgggaagugcuccggcaucaccgugagcuccacgugcugcagcaccaaccacgacuacaccaucuggaugcccgagaacccccgccuggggaccuccugcgacaucuucacgaacagccggggcaagcgcgcguccaagggcgggaagaccugcggcuucgucgacgagcgggggcucuacaagagccugaagggcgccugcaagcugaagcucugcggcgugcuggggcugcgccucauggacggcaccuggguggccauccagaccagcgacgagaucaaguggugcccgcccgaccagcuggucaaccugcacgacuuccacuccgacgagaucgagcaccucgugguggaggagcuggucaagaagcgggaggagugccuggacgcccucgagacgaucaugaccaccaagagcguguccuuccgccggcugagccaccuccgcaagcuggugcccggguucggcaaggcguacaccaucuucaacaagacgcugauggaggccgacgcccacuacaaguccauccggaccuggaacgagaucauccccagcaaggggugccugcgcgucggcggccggugccacccccacgugaacggggucuucuucaacggcaucauccucgggccggacggccacgugcugauccccgagaugcaguccagccugcuccaccagcacauggagcugcuggaguccagcgugaucccccucaugcacccccuggccgacccguccaccgucuucaaggacggggacgaggccgaggacuucguggaggugcaccuccccgacguccacaagcagaucagcggcguggaccugggccugcccaacugggggaaguacgugcugaucuccgcgggcgcccucaccgcccugaugcugaugaucuuccucaugacgugcugccgcaagaacaaccgggccgagagcauccagcacucccccggggagaccggccgcaaggucagcgugaccucccacaacgggcgggugaucagcuccugggagagcuacaagagcggcggcgagaccaagcuguga

SEQ ID NO: 95228 - RNA, 1575 nt, Artificial Sequence; identical to SEQ ID NO: 95108
  derived and/or modified CDS sequence (opt1) from glycoprotein__RABV__JN936745.1

SEQ ID NO: 95229 - RNA, 1575 nt, Artificial Sequence
  derived and/or modified CDS sequence (opt1) from glycoprotein__RABV__JN936746.1
augaucccccaggugcugcuguucgucccgcugcugguguucagcuccugcuucggcaaguuccccaucuacaccauccccgacaagcucgggcccuggagcccgaucgacauccaccaccuguccugccccaacaaccugguggucgaggacgagggcugcaccaaccucagcggguucuccuacauggagcugaaggugggcuacaucagcgccaucaaggugaacggguucacgugcaccggcgucgugaccgaggccgagaccuacacgaacuucgugggcuacgucaccaccaccuucaagcgcaagcacuuccggcccaugcccgacgcgugccgcgccgccuacaacuggaagauggccggggacccgcgguacgaggagucccugcacaaccccuaccccgacuaccacuggcuccgcacggugaagaccaccaaggagagccuggugaucaucucccccagcgucgccgaccuggacccguacgacaagucccuccacagccggguguuccccggcgggaagugcuccggcaucaccgugagcuccacgugcugcagcaccaaccacgacuacaccaucuggaugcccgagaacccccgccuggggaccuccugcgacaucuucacgaacagccggggcaagcgcgcguccaagggcgggaagaccugcggcuucgucgacgagcgggggcuguacaagagccucaagggcgccugcaagcugaagcugugcggcgugcucgggcugcgccugauggacggcaccuggguggccauccagaccagcgacgagaucaaguggugcuccccggaccagcucgucaaccugcacgacuuccacagcgacgagaucgagcaccuggugguggaggagcucgucaagaagcgggaggagugccuggacgcccuggagacgaucaugaccaccaaguccgugagcuuccgccggcucucccaccuccgcaagcuggugcccggguucggcaaggcguacaccaucuucaacaagacgcucauggaggccgacgcccacuacaagagcauccggaccuggaacgagaucauccccuccaaggggugccugcgcgucggcggccggugccacccccacgugaacggggucuucuucaacggcaucauccuggggccggacggccacgugcucauccccgagaugcagagcucccugcugcaccagcacauggagcuccuggagagcuccgugaucccccugaugcacccccucgccgacccgagcaccgucuucaaggacggggacgaggccgaggacuucguggaggugcaccuccccgacguccacaagcagaucuccggcguggaccugggccugcccaacugggggaaguacgugcugaucagcgcgggcgcccugaccgcccucaugcugaugaucuuccugaugacgugcugccgcaacaccaaccgggccgaguccauccagcacagccccggggagaccggccgcaaggucuccgugaccagccacaacgggcgggugaucuccagcugggagagcuacaaguccggcggcgagacgaagcucuga

SEQ ID NO: 95230 - RNA, 1575 nt, Artificial Sequence
  derived and/or modified CDS sequence (opt1) from glycoprotein__RABV__JN936747.1
augauccuccaggugcugcuguucgucccccugcucguguucagcuccugcuucggcaaguucccgaucuacaccauccccgacaagcuggggcccuggagccccaucgacauccaccaccuguccugcccgaacaaccucguggucgaggacgagggcugcaccaaccugagcggguucuccuacauggagcugaaggugggcuacaucagcgccaucaaggugaacggguucacgugcaccggcgucgugaccgaggccgagaccuacacgaacuucgugggcuacgucaccaccaccuucaagcgcaagcacuuccggcccaugcccgacgcgugccgcgccgccuacaacuggaagauggccggggacccccgguacgaggagucccuccacaacccguaccccgacuaccacuggcugcgcacggugaagaccaccaaggagagccuggugaucaucucccccagcgucgccgaccucgaccccuacgacaagucccugcacagccggguguucccgggcgggaagugcuccggcaucaccgugagcuccacgugcugcagcaccaaccacgacuacaccaucuggaugcccgagaacccccgccuggggaccuccugcgacaucuucacgaacagccggggcaagcgcgcguccaagggcgggaagaccugcggcuucgucgacgagcgggggcucuacaagagccugaagggcgccugcaagcugaagcucugcggcgugcuggggcugcgccucauggacggcaccuggguggccauccagaccagcgacgagaucaaguggugcccgcccgaccagcuggucaaccugcacgacuuccacuccgacgagaucgagcaccucgugguggaggagcuggucaagaagcgggaggagugccuggacgcccucgagacgaucaugaccaccaagagcguguccuuccgccggcugagccaccuccgcaagcuggugcccggguucggcaaggcguacaccaucuucaacaagacgcugauggaggccgacgcccacuacaaguccauccggaccuggaacgagaucauccccagcaaggggugccugcgcgucggcggccggugccacccccacgugaacggggucuucuucaacggcaucauccucgggccggacggccacgugcugauccccgagaugcaguccagccugcuccaccagcacauggagcugcuggaguccagcgugaucccccucaugcacccccuggccgacccguccaccgucuucaaggacggggacgaggccgaggacuucguggaggugcaccuccccgacguccacaagcagaucagcggcguggaccugggccugcccaacugggggaaguacgugcugaucuccgcgggcgcccucaccgcccugaugcugaugaucuuccucaugacgugcugccgcaagaacaaccgggccgagagcauccagcacucccccggggagaccggccgcaaggucagcgugaccucccacaacgggcgggugaccagcuccugggagagcuacaagagcggcggcgagacgaagcuguga

SEQ ID NO: 95231 - RNA, 1575 nt, Artificial Sequence; identical to SEQ ID NO: 95108
  derived and/or modified CDS sequence (opt1) from glycoprotein__RABV__JN936748.1

SEQ ID NO: 95232 - RNA, 1575 nt, Artificial Sequence; identical to SEQ ID NO: 95108
  derived and/or modified CDS sequence (opt1) from glycoprotein__RABV__JN936749.1

SEQ ID NO: 95233 - RNA, 1575 nt, Artificial Sequence; identical to SEQ ID NO: 95108
  derived and/or modified CDS sequence (opt1) from glycoprotein__RABV__JN936750.1

SEQ ID NO: 95234 - RNA, 1575 nt, Artificial Sequence; identical to SEQ ID NO: 95108
  derived and/or modified CDS sequence (opt1) from glycoprotein__RABV__JN936751.1

SEQ ID NO: 95235 - RNA, 1575 nt, Artificial Sequence
  derived and/or modified CDS sequence (opt1) from glycoprotein__RABV__JN936753.1
augaucccccaggugcugcuguucgucccgcugcugguguucagcuccugcuucggcaaguuccccaucuacaccauccccgacaagcucgggcccuggagcccgaucgacauccaccaccuguccugccccaacaaccugguggucgaggacgagggcugcaccaaccucagcggguucuccuacauggagcugaaggugggcuacaucagcgccaucaaggugaacggguucacgugcaccggcgucgugaccgaggccgagaccuacacgaacuucgugggcuacgucaccaccaccuucaagcgcaagcacuuccggcccacgcccgacgcgugccgcgccgccuacaacuggaagauggccggggacccgcgguacgaggagucccugaacaaccccuaccccgacuaccacuggcuccgcaccgugaagaccagcaaggagucccuggugaucaucagccccuccgucgccgaccuggacccguacgacaagagccuccacucccggguguuccccggcgggaagugcagcggcaucaccguguccagcacgugcugcuccaccaaccacgacuacaccaucuggaugcccgagaacccccgccuggggaccagcugcgacaucuucacgaacucccggggcaagcgcgcgagcaagggcgggaagaccugcggcuucgucgacgagcgggggcuguacaagagccucaagggcgccugcaagcugaagcugugcggcgugcucgggcugcgccugauggacggcaccuggguggccauccagaccuccgacgagaucaaguggugcagcccggaccagcucgucaaccugcacgacuuccacuccgacgagaucgagcaccuggugguggaggagcucgucaagaagcgggaggagugccuggacgcccuggagacgaucaugaccaccaagagcguguccuuccgccggcucagccaccuccgcaagcuggugcccggguucggcaaggcguacaccaucuucaacaagacgcucauggaggccgacgcccacuacaaguccauccggaccuggaacgagaucauccccagcaaggggugccugcgcgucggcggccggugccacccccacgugaacggggucuucuucaacggcaucauccuggggccggacggccacgugcucauccccgagaugcaguccagccugcugcaccagcacauggagcuccuggaguccagcgugaucccccugaugcacccccucgccgacccguccaccgucuucaaggacggggacgaggccgaggacuucguggaggugcaccuccccgacguccacaagcagaucagcggcguggaccugggccugcccaacugggggaaguacgugcuggucuccgcgggcgcccugaccgcccucaugcugaugaucuuccugaugacgugcugccgcaagaccaaccgggccgagagcauccagcacucccccggggagaccggccgcaaggugagcgugaccucccacaacgggcgggucaucagcagcugggaguccuacaagagcggcggcgagacgaagcucuga

SEQ ID NO: 95236 - RNA, 1575 nt, Artificial Sequence; identical to SEQ ID NO: 94851
  derived and/or modified CDS sequence (opt1) from glycoprotein__RABV__JN936754.1

SEQ ID NO: 95237 - RNA, 1575 nt, Artificial Sequence
  derived and/or modified CDS sequence (opt1) from glycoprotein__RABV__JN936755.1
augaucccccaggugcugcuguucgucccgcugcuggugagcuccagcugcuucggcaaguuccccaucuacaccauccccgacaagcucgggcccugguccccgaucgacauccaccaccugagcugccccaacaaccugguggucgaggacgagggcugcaccaaccucuccggguucagcuacauggagcugaaggugggcuacaucuccgccaucaaggugaacggguucacgugcaccggcgucgugaccgaggccgagaccuacacgaacuucgugggcuacgucaccaccaccuucaagcgcaagcacuuccggcccacgcccgacgcgugccgcgccgccuacaacuggaagauggccggggacccgcgguacgaggagagccugcacaaccccuaccccgacuaccacuggcuccgcaccgugaagaccuccaaggagagccuggugaucaucucccccagcgucgccgaccuggacccguacgacaagucccuccacagccggguguuccccggcgggaagugcuccggcaucaccgugagcuccacgugcugcagcaccaaccacgacuacaccaucuggaugcccgagaacccccgccuggggaccuccugcgacaucuucacgaacagccggggcaagcgcgcgagcaagggcgggaagaccugcggcuucgucgacgagcgggggcuguacaagucccucaagggcgccugcaagcugaagcugugcggcgugcucgggcugcgccugauggacggcaccuggguggccauccagaccagcgacgagaucaaguggugcuccccggaccagcucgucaaccugcacgacuuccacagcgacgagaucgagcaccuggugguggaggagcucgucaagaagcgggaggagugccuggacgcccuggagacgaucaugaccaccaaguccgugagcuuccgccggcucucccaccuccgcaagcuggugcccggguucggcaaggcguacaccaucuucaacaagacgcucauggaggccgacgcccacuacaagagcauccggaccuggaacgagaucauccccuccaaggggugccugcgcgucggcggccggugccacccccacgugaacggggucuucuucaacggcaucauccuggggccggacggccacgugcucauccccgagaugcagagcucccugcugcaccagcacauggagcuccuggagagcuccgugaucccccugaugcacccccucgccgacccgagcaccgucuucaaggacggggacgaggccgaggacuucguggaggugcaccuccccgacguccacaagcagaucuccggcguggaccugggccugcccaacugggggaaguacgugcuggucagcgcgggcgcccugaccgcccucaugcugaugaucuuccugaugacgugcugccgcaagaccaaccgggccgaguccauccagcacagccccggggagaccggccgcaagguguccgugaccagccacaacgggcgggucaucagcuccugggagagcuacaaguccggcggcgagacgaagcucuga

SEQ ID NO: 95238 - RNA, 1575 nt, Artificial Sequence; identical to SEQ ID NO: 95108
  derived and/or modified CDS sequence (opt1) from glycoprotein__RABV__JN936756.1

SEQ ID NO: 95239 - RNA, 1575 nt, Artificial Sequence
  derived and/or modified CDS sequence (opt1) from glycoprotein__RABV__JN936757.1
augaucccccaggugcugcuguucgucccgcugcugguguucagcuccugcuucggcaaguuccccaucuacaccauccccgacaagcucgggcccuggagcccgaucgacauccaccaccuguccugccccaacaaccugguggucgaggacgagggcugcaccaaccucagcggguucuccuacauggagcugaaggugggcuacaucagcgccaucaaggugaacggguucacgugcaccggcgucgugaccgaggccgagaccuacacgaacuucgugggcuacgucaccaccaccuucaagcgcaagcacuuccggcccacgcccgacgcgugccgcgccgccuacaacuggaagauggccggggacccgcgguacgaggagucccugcacaaccccuaccccgacuaccacuggcuccgcaccgugaagaccagcaaggagucccuggugaucaucagccccuccgucgccgaccuggacccguacgacaagagccuccacucccggguguuccccggcgggaagugcagcggcaucaccguguccagcacgugcugcuccaccaaccacgacuacaccaucuggaugcccgagaacccccgccuggggaccagcugcgacaucuucacgaacucccggggcaagcgcgcgagcaagggcgggaagaccugcggcuucgucgacgagcgggggcuguacaagagccucaagggcgccugcaagcugaagcugugcggcgugcucgggcugcgccugauggacggcaccuggguggccauccagaccuccgacgagaucaaguggugcagcccggaccagcucgucaaccugcacgacuuccacuccgacgagaucgagcaccuggugguggaggagcucgucaagaagcgggaggagugccuggacgcccuggagacgaucaugaccaccaagagcguguccuuccgccggcucagccaccuccgcaagcuggugcccggguucggcaaggcguacaccaucuucaacaagacgcucauggaggccgacgcccacuacaaguccauccggaccuggaacgagaucauccccagcaaggggugccugcgcgucggcggccggugccacccccacgugaacggggucuucuucaacggcaucauccuggggccggacggccacgugcucauccccgagaugcaguccagccugcugcaccagcacauggagcuccuggaguccagcgugaucccccugaugcacccccucgccgacccguccaccgucuucaaggacggggacgaggccgaggacuucguggaggugcaccuccccgacguccacaagcagaucagcggcguggaccugggccugcccaacugggggaaguacgugcuggucuccgcgggcgcccugaccgcccucaugcugaugaucuuccugaugacgugcugccgcaagaccgaccgggccgagagcauccagcacucccccggggagacccgccggaaggugagcgugaccucccacaacggccgcgucaucagcagcugggaguccuacaagagcgggggcgagacgaagcucuga

SEQ ID NO: 95240 - RNA, 1575 nt, Artificial Sequence
  derived and/or modified CDS sequence (opt1) from glycoprotein__RABV__JN936758.1
augaucccccaggugcugcuguucgucccgcugcugguguucagcuccugcuucggcaaguuccccaucuacaccauccccgacaagcucgggcccuggagcccgaucgacauccaccaccuguccugccccaacaaccugguggucgaggacgagggcugcaccaaccucagcggguucuccuacauggagcugaaggugggcuacaucagcgccaucaaggugaacggguucacgugcaccggcgucgugaccgaggccgagaccuacacgaacuucgugggcuacgucaccaccaccuucaagcgcaagcacuuccggcccaugcccgacgcgugccgcgccgccuacaacuggaagauggccggggacccgcgguacgaggagucccugcacaaccccuaccccgacuaccacuggcuccgcacggugaagaccaccaaggagagccuggugaucaucucccccagcgucgccgaccuggacccguacgacaagucccuccacagccggguguuccccggcgggaagugcuccggcaucaccgugagcuccacgugcugcagcaccaaccacgacuacaccaucuggaugcccgagaacccccgccuggggaccuccugcgacaucuucacgaacagccggggcaagcgcgcguccaagggcgggaagaccugcggcuucgucgacgagcgggggcuguacaagagccucaagggcgccugcaagcugaagcugugcggcgugcucgggcugcgccugauggacggcaccuggguggccauccagaccagcgacgagaucaaguggugcuccccggaccagcucgucaaccugcacgacuuccacagcgacgagaucgagcaccuggugguggaggagcucgucaagaagcgggaggagugccuggacgcccuggagacgaucaugaccaccaaguccgugagcuuccgccggcucucccaccuccgcaagcuggugcccggguucggcaaggcguacaccaucuucaacaagacgcucauggaggccgacgcccacuacaagagcauccggaccuggaacgagaucauccccuccaaggggugccugcgcgucggcggccggugccacccccacgugaacggggucuucuucaacggcaucauccuggggccggacggccacgugcucauccccgagaugcagagcucccugcugcaccagcacauggagcuccuggagagcuccgugaucccccugaugcacccccucgccgacccgagcaccgucuucaaggacggggacgaggccgaggacuucguggaggugcaccuccccgacguccacaagcagaucuccggcguggaccugggccugcccaacugggggaaguacgugcugaucggcgcgggggcccugaccgcccucaugcugacgaucuuccugaugaccugcugccgcaagaccaaccgggccgagagcauccagcacucccccggcgagaccgggcgcaaggucagcgugacgucccacaacggccgggugaucagcuccugggagagcuacaagagcggcuccgagaccaagcucuga

SEQ ID NO: 95241 - RNA, 1575 nt, Artificial Sequence
  derived and/or modified CDS sequence (opt1) from glycoprotein__RABV__JN936759.1
augaucccccaggugcugcuguucgucccgcugcugguguucagcuccugcuucggcaaguuccccaucuacaccauccccgacaagcucgggcccuggagcccgaucgacauccaccaccuguccugccccaacaaccugguggucgaggacgagggcugcaccaaccucagcggguucuccuacauggagcugaaggugggcuacaucagcgccaucaaggugaacggguucacgugcaccggcgucgugaccgaggccgagaccuacacgaacuucgugggcuacgucaccaccaccuucaagcgcaagcacuuccggcccaugcccgacgcgugccgcgccgccuacaacuggaagauggccggggacccgcgguacgaggagucccugcacaaccccuaccccgacuaccacuggcuccgcacggugaagaccaccaaggagagccuggugaucaucucccccagcgucgccgaccuggacccguacgacaagucccuccacagccggguguuccccggcgggaagugcuccggcaucaccgugagcuccacgugcugcagcaccaaccacgacuacaccaucuggaugcccgagaacccccgccuggggaccuccugcgacaucuucacgaacagccggggcaagcgcgcguccaagggcgggaagaccugcggcuucgucgacgagcgggggcuguacaagagccuccgcggcgccugcaagcugaagcugugcggcgugcucgggcugcggcugauggacggcaccuggguggccauccagaccagcgacgagaucaaguggugcuccccggaccagcucgucaaccugcacgacuuccacagcgacgagaucgagcaccuggugguggaggagcucgucaagaagcgcgaggagugccuggacgcccuggagacgaucaugaccaccaaguccgugagcuuccggcgccucucccaccuccggaagcuggugcccggguucggcaaggcguacaccaucuucaacaagacgcucauggaggccgacgcccacuacaagagcauccgcaccuggaacgagaucauccccuccaaggggugccugcgggucggcggccgcugccacccccacgugaacggggucuucuucaacggcaucauccuggggccggacggccacgugcucauccccgagaugcagagcucccugcugcaccagcacaucgagcuccuggagagcuccgugaucccccugaugcacccccucgccgacccgagcaccgucuucaaggacggggacgaggccgaggacuucguggaggugcaccuccccgacguccacaagcagaucuccggcguggaccugggccugcccaacugggggaaguacgugcugaucagcgcgggcgcccugaccgcccucaugcugacgaucuuccugaugaccugcugccggaagaccaaccgcgccgaguccauccagcacagccccggggagaccggccggaaggucuccgugacgagccacaacgggcgcgugaucuccagcugggagagcuacaaguccggcagcgagaccaagcucuga

SEQ ID NO: 95242 - RNA, 1575 nt, Artificial Sequence
  derived and/or modified CDS sequence (opt1) from glycoprotein__RABV__JN936760.1
augaucccccaggugcugcuguucgucccgcugcugguguucagccucugcuucggcaaguuccccaucuacaccauccccgacaagcuggggcccugguccccgaucgacauccaccaccugagcugccccaacaaccucguggucgaggacgagggcugcaccaaccuguccggguucagcuacauggagcugaaggugggcuacaucuccgccaucaaggugaacggguucacgugcaccggcgucgugaccgaggccgagaccuacacgaacuucgugggcuacgucaccaccaccuucaagcgcaagcacuuccggcccaugcccgacgcgugccgcgccgccuacaacuggaagauggccggggacccgcgguacgaggagagccuccacaaccccuaccccgacuaccacuggcugcgcacggugaagaccaccaaggagucccuggugaucaucagccccuccgucgccgaccucgacccguacgacaagagccugcacucccggguguuccccggcgggaagugcagcggcaucaccguguccagcacgugcugcuccaccaaccacgacuacaccgucuggaugcccgagaacccccgccuggggaccagcugcgacaucuucacgaacucccggggcaagcgcgcgagcaagggcgggaagaccugcggcuucguggacgagcgggggcucuacaagucccugaagggcgccugcaagcugaagcucugcggcgugcuggggcugcgccucauggacggcaccugggucgccauccagaccagcgacgagaucaaguggugcagcccggaccagcuggugaaccugcacgacuuccacuccgacgagaucgagcaccucguggucgaggagcuggugaagaagcgggaggagugccuggacgcccucgagacgaucaugaccaccaagagcguguccuuccgccggcugagccaccuccgcaagcucguccccggguucggcaaggcguacaccaucuucaacaagacgcugauggaggccgacgcccacuacaaguccauccggaccuggaacgagaucauccccagcaaggggugccugcgcgugggcggccggugccacccccacgucaacgggguguucuucaacggcaucauccucgggccggacggccacgugcugauccccgagaugcaguccagccugcuccaccagcacauggagcugcuggaguccagcgucaucccccucaugcacccccuggccgacccguccaccguguucaaggacggggacgaggccgaggacuucguggagguccaccuccccgacgugcacaagcagaucagcggcguggaccugggccugcccaacugggggaaguacguccugaucuccgcgggcgcccucaccgcccugaugcugacgaucuuccucaugaccugcugccgcaagaccaaccgggccgagagcauccagcacucccccggggagaccggccgcaaggugagcgugacgucccacaacgggcgggucaucagcuccugggagagcuacaagagcggcuccgagaccaagcuguga

SEQ ID NO: 95243 - RNA, 1575 nt, Artificial Sequence
  derived and/or modified CDS sequence (opt1) from glycoprotein__RABV__JN936761.1
augaucccccaggugcugcuguucgucccgcugcugguguucagcuccugcuucggcaaguuccccaucuacaccauccccgacaagcucgggcccuggagcccgaucgacauccaccaccuguccugccccaacaaccugguggucgaggacgagggcugcaccaaccucagcggguucuccuacauggagcugaaggugggcuacaucagcgccaucaaggugaacggguucacgugcaccggcgucgugaccgaggccgagaccuacacgaacuucgugggcuacgucaccaccaccuucaagcgcaagcacuuccggcccaugcccgacgcgugccgcgccgccuacaacuggaagauggccggggacccgcgguacgaggagucccugcacaaccccuaccccgacuaccacuggcuccgcacggugaagaccaccaaggagagccuggugaucaucucccccagcgucgccgaccuggacccguacgacaagucccuccacagccggguguuccccggcgggaagugcuccggcaucaccgugagcuccacgugcugcagcaccaaccacgacuacaccaucuggaugcccgagaacccccgccuggggaccuccugcgacaucuucacgaacagccggggcaagcgcgcguccaagggcgggaagaccugcggcuucgucgacgagcgggggcuguacaagagccucaagggcgccugcaagcugaagcugugcggcgugcucgggcugcgccugauggacggcaccuggguggccauccagaccagcgacgagaucaaguggugcuccccggaccagcucgucaaccugcacgacuuccacagcgacgagaucgagcaccuggugguggaggagcucgucaagaagcgggaggagugccuggacgcccuggagacgaucaugaccaccaaguccgugagcuuccgccggcucucccaccuccgcaagcuggugcccggguucggcaaggcguacaccaucuucaacaagacgcucauggaggccgacgcccacuacaagagcauccggaccuggaacgagaucauccccuccaaggggugccugcgcgucggcggccggugccacccccacgugaacggggucuucuucaacggcaucauccuggggccggacggccacgugcucauccccgagaugcagagcucccugcugcaccagcacauggagcuccuggagagcuccgugaucccccugaugcacccccucgccgacccgagcaccgucuucaaggacggggacgaggccgaggacuucguggaggugcaccuccccgacguccacaagcagaucuccggcguggaccugggccugcccaacugggggaaguacgugcugaucagcgcgggcgcccugaccgcccucaugcugaugaucuuccugaugacgugcugccgcaagaccaaccgggccgaguccauccagcacagccccggggagaccggccgcaaggucuccgugaccagccacaacgggcgggugaucuccagcugggagagcuacaaguccggcagcgagacgaagcucuga

SEQ ID NO: 95244 - RNA, 1575 nt, Artificial Sequence; identical to SEQ ID NO: 95108
  derived and/or modified CDS sequence (opt1) from glycoprotein__RABV__JN936762.1

SEQ ID NO: 95245 - RNA, 1575 nt, Artificial Sequence; identical to SEQ ID NO: 94851
  derived and/or modified CDS sequence (opt1) from glycoprotein__RABV__JN936763.1

SEQ ID NO: 95246 - RNA, 1575 nt, Artificial Sequence
  derived and/or modified CDS sequence (opt1) from glycoprotein__RABV__JN936764.1
augaucccccaggugcuccuguucgucccguuccugguguucagcuccugcuucggcaaguuccccaucuacaccauccccgacaagcuggggcccuggagcccgaucgacauccaccaccucuccugccccaacaaccugguggucgaggacgagggcugcaccaaccugagcggguucuccuacauggagcucaaggugggcuacaucagcgccaucaaggugaacggguucacgugcaccggcgucgugaccgaggccgagaccuacacgaacuucgugggcuacgucaccaccaccuucaagcgcaagcacuuccggcccaugcccgacgcgugccgcgccgccuacaacuggaagauggccggggacccgcgguacgaggagucccugcacaaccccuaccccgacuaccacuggcugcgcacggugaagaccaccaaggagagccucgugaucaucucccccagcgucgccgaccuggacccguacgacaagucccugcacagccggguguuccccggcgggaagugcuccggcaucaccgugagcuccacgugcugcagcaccaaccacgacuacaccaucuggaugcccgagaacccccgccucgggaccuccugcgacaucuucacgaacagccggggcaagcgcgcguccaagggcgggaagaccugcggcuucgucgacgagcgggggcuguacaagagccugaagggcgccugcaagcucaagcugugcggcgugcuggggcuccgccugauggacggcaccuggguggccauccagaccagcgacgagaucaaguggugcuccccggaccagcuggucaaccuccacgacuuccacagcgacgagaucgagcaccuggugguggaggagcuggucaagaagcgggaggagugccucgacgcccuggagacgaucaugaccaccaaguccgugagcuuccgccggcugucccaccuccgcaagcuggugcccggguucggcaaggcguacaccaucuucaacaagacgcugauggaggccgacgcccacuacaagagcauccggaccuggaacgagaucauccccuccaaggggugccuccgcgucggcggccggugccacccccacgugaacggggucuucuucaacggcaucauccuggggccggacggccacgugcugauccccgagaugcagagcucccuccugcaccagcacauggagcugcucgagagcuccgugaucccccugaugcacccccuggccgacccgagcaccgucuucaaggacggggacgaggccgaggacuucguggaggugcaccuccccgacguccacaagcagaucuccggcguggaccugggccugcccaacugggggaaguacgugcucaucagcgcgggcgcccugaccgcccugaugcucacgaucuuccugaugaccugcugccgcaagaccaaccgggccgaguccauccagcacagccccggggagaccggccgcaaggucuccgugacgagccacaacgggcgggugaucuccagcugggagagcuacaaguccggcagcgagaccaagcuguga

SEQ ID NO: 95247 - RNA, 1575 nt, Artificial Sequence; identical to SEQ ID NO: 94869
  derived and/or modified CDS sequence (opt1) from glycoprotein__RABV__JN936765.1

SEQ ID NO: 95248 - RNA, 1575 nt, Artificial Sequence; identical to SEQ ID NO: 94869
  derived and/or modified CDS sequence (opt1) from glycoprotein__RABV__JN936766.1

SEQ ID NO: 95249 - RNA, 1575 nt, Artificial Sequence; identical to SEQ ID NO: 94869
  derived and/or modified CDS sequence (opt1) from glycoprotein__RABV__JN936767.1

SEQ ID NO: 95250 - RNA, 1575 nt, Artificial Sequence; identical to SEQ ID NO: 95091
  derived and/or modified CDS sequence (opt1) from glycoprotein__RABV__JN936768.1

SEQ ID NO: 95251 - RNA, 1575 nt, Artificial Sequence; identical to SEQ ID NO: 94870
  derived and/or modified CDS sequence (opt1) from glycoprotein__RABV__JN936769.1

SEQ ID NO: 95252 - RNA, 1575 nt, Artificial Sequence
  derived and/or modified CDS sequence (opt1) from glycoprotein__RABV__JN936770.1
augaucccccaggugcugcuguucgucccgcugcugguguucagcuccugcuucggcaaguuccccaucuacaccauccccgacaagcucgggcccuggagcccgaucgacauccaccaccuguccugccccaacaaccugguggucgaggacgagggcugcaccaaccucagcggguucuccuacauggagcugaaggugggcuacaucagcgccaucaaggugaacggguucacgugcaccggcgucgugaccgaggccgagaccuacacgaacuucgugggcuacgucaccaccaccuucaagcgcaagcacuuccggcccaugcccgacgcgugccgcuccgccuacaacuggaagauggccggggacccgcgguacgaggagagccugcacaaccccuaccccgacuaccacuggcuccgcacggugaagaccaccaaggagucccuggugaucaucagccccuccgucgccgaccuggacccguacgacaagagccuccacucccggguguuccccggcgggaagugcagcggcaucaccguguccagcacgugcugcuccaccaaccacgacuacaccaucuggaugcccgagaacccccgccuggggaccagcugcgacaucuucacgaacucccggggcaagcgcgccagcaagggcgggaagaccugcggcuucgucgacgagcgggggcuguacaagagccucaagggcgcgugcaagcugaagcugugcggcgugcucgggcugcgccugauggacggcaccuggguggccauccagaccuccgacgagaucaaguggugcagcccggaccagcucgucaaccugcacgacuuccacuccgacgagaucgagcaccuggugguggaggagcucgucaagaagcgggaggagugccuggacgcccuggagacgaucaugaccaccaagagcguguccuuccgccggcucagccaccuccgcaagcuggugcccggguucggcaaggccuacaccaucuucaacaagacgcucauggaggcggacgcccacuacaaguccauccggaccuggaacgagaucauccccagcaaggggugccugcgcgucggcggccggugccacccccacgugaacggggucuucuucaacggcaucauccuggggccggacggccacgugcucauccccgagaugcaguccagccugcugcaccagcacauggagcuccuggaguccagcgugaucccccugaugcacccccucgccgacccguccaccgucuucaaggacggggacgaggccgaggacuucguggaggugcaccuccccgacguccacaagcagaucagcggcguggaccugggccugcccaacugggggaaguacgugcugaucuccgccggcgcgcugaccgcccucaugcugacgaucuuccugaugaccugcugccgcaagaccaaccgggccgagagcauccagcacucccccggggagaccggccgcaaggucagcgugacgucccacaacgggcgggugaucagcagcugggaguccuacaagagcggcuccgagaccaagcucuga

SEQ ID NO: 95253 - RNA, 1575 nt, Artificial Sequence; identical to SEQ ID NO: 94851
  derived and/or modified CDS sequence (opt1) from glycoprotein__RABV__JN936771.1

SEQ ID NO: 95254 - RNA, 1575 nt, Artificial Sequence; identical to SEQ ID NO: 95216
  derived and/or modified CDS sequence (opt1) from glycoprotein__RABV__JN936772.1

SEQ ID NO: 95255 - RNA, 1575 nt, Artificial Sequence
  derived and/or modified CDS sequence (opt1) from glycoprotein__RABV__JN936773.1
augaucccccaggugcugcuguucgucccgcugcugguguucagcuccugcuucggcaaguuccccaucuacaccauccccgacaagcucgggcccuggagcccgaucgacauccaccaccuguccugccccaacaaccugaucguggaggacgagggcugcaccaaccucagcggguucuccuacauggagcugaaggucggcuacaucagcgccaucaaggugaacggguucacgugcaccggcguggucaccgaggccgagaccuacacgaacuucgugggcuacgugaccaccaccuucaagcgcaagcacuuccggcccaugcccgacgcgugccgcgccgccuacaacuggaagauggccggggacccgcgguacgaggagucccugcacaaccccuaccccgacuaccacuggcuccgcacggucaagaccaccaaggagagccuggugaucaucucccccagcguggccgaccuggacccguacgacaagucccuccacagccgggucuuccccggcgggaagugcuccggcaucaccgugagcuccacgugcugcagcaccaaccacgacuacaccaucuggaugcccgagaacccccgccuggggaccuccugcgacaucuucacgaacagccggggcaagcgcgcguccaagggcgggaagaccugcggcuucguggacgagcgggggcuguacaagagccucaagggcgccugcaagcugaagcugugcggcguccucgggcugcgccugauggacggcaccuggguggccauccagaccagcgacgagaucaaguggugcuccccggaccagcucgugaaccugcacgacuuccacagcgacgagaucgagcaccuggucguggaggagcucgugaagaagcgggaggagugccuggacgcccuggagacgaucaugaccaccaaguccgucagcuuccgccggcucucccaccuccgcaagcuggugcccggguucggcaaggcguacaccaucuucaacaagacgcucauggaggccgacgcccacuacaagagcauccggaccuggaacgagaucauccccuccaaggggugccugcgcgugggcggccggugccacccccacgucaacgggguguucuucaacggcaucauccuggggccggacggccacguccucauccccgagaugcagagcucccugcugcaccagcacauggagcuccuggagagcuccgugaucccccugaugcacccccucgccgacccgagcaccguguucaaggacggggacgaggccgaggacuucgucgaggugcaccuccccgacgugcacaagcagaucuccggcgucgaccugggccugcccaacugggggaaguacgugcugaucagcgcgggcgcccugaccgcccucaugcugacgaucuuccugaugaccugcugccgcaagaccaaccgggccggguccauccagcacagccccggcgagaccgggcgcaagguguccgucacgagccacaacggccgggugaucuccagcugggagagcuacaaguccggcagcgagaccaagcucuga

SEQ ID NO: 95256 - RNA, 1575 nt, Artificial Sequence; identical to SEQ ID NO: 94869
  derived and/or modified CDS sequence (opt1) from glycoprotein__RABV__JN936774.1

SEQ ID NO: 95257 - RNA, 1575 nt, Artificial Sequence; identical to SEQ ID NO: 94870
  derived and/or modified CDS sequence (opt1) from glycoprotein__RABV__JN936775.1

SEQ ID NO: 95258 - RNA, 1575 nt, Artificial Sequence; identical to SEQ ID NO: 94851
  derived and/or modified CDS sequence (opt1) from glycoprotein__RABV__JN936776.1

SEQ ID NO: 95259 - RNA, 1575 nt, Artificial Sequence; identical to SEQ ID NO: 94870
  derived and/or modified CDS sequence (opt1) from glycoprotein__RABV__JN936777.1

SEQ ID NO: 95260 - RNA, 1575 nt, Artificial Sequence; identical to SEQ ID NO: 94870
  derived and/or modified CDS sequence (opt1) from glycoprotein__RABV__JN936778.1

SEQ ID NO: 95261 - RNA, 1575 nt, Artificial Sequence; identical to SEQ ID NO: 95091
  derived and/or modified CDS sequence (opt1) from glycoprotein__RABV__JN936779.1

SEQ ID NO: 95262 - RNA, 1575 nt, Artificial Sequence
  derived and/or modified CDS sequence (opt1) from glycoprotein__RABV__JN936780.1
augaucccccaggugcugcuguucgucccgcugcugguguucagcuccugcuucggcaaguuccccaucuacaccauccccgacaagcucgggcccuggagcccgaucgacauccaccaccuguccugccccaacaaccugguggucgaggacgagggcugcaccaaccucagcggguucuccuacauggagcugaaggugggcuacaucagcgccaucaaggugaacggguucacgugcaccggcgucgugaccgaggccgagaccuacacgaacuucgugggcuacgucaccaccaccuucaagcgcaagcacuuccggcccaugcccgacgcgugccgcgccgccuacaacuggaagauggccggggacccgcgguacgaggagucccugcacaaccccuaccccgacuaccacuggcuccgcacggugaagaccaccaaggagagccuggugaucaucucccccagcgucgccgaccuggacccguacgacaagucccuccacagccggguguuccccggcgggaagugcuccggcaucaccgugagcuccacgugcugcagcaccaaccacgacuacaccaucuggaugcccgagaacccccgccuggggaccuccugcgacaucuucacgaacagccggggcaagcgcgcguccaagggcgggaagaccugcggcuucgucgacgagcgggggcuguacaagagccucaagggcgccugcaagcugaagcugugcggcgugcucgggcugcgccugauggacggcaccuggguggccauccagaccagcgacgagaucaaguggugcuccccggaccagcucgucaaccugcacgacuuccacagcgacgagaucgagcaccuggugguggaggagcucgucaagaagcgggaggagugccuggacgcccuggagacgaucaugaccaccaaguccgugagcuuccgccggcucucccaccuccgcaagcuggugcccggguucggcaaggcguacaccaucuucaacaagacgcucauggaggccgacgcccacuacaagagcauccggaccuggaacgagaucauccccuccaaggggugccugcgcgucggcggccggugccacccccacgugaacggggucuucuucaacggcaucauccuggggccggacggccacgugcucauccccgagaugcagagcucccugcugcaccagcacauggagcuccuggagagcuccgugaucccccugaugcacccccucgccgacccgcugaccgucuucaaggacggggacgaggccgaggacuucguggaggugcaccuccccgacguccacaagcagaucagcggcguggaccugggccugcccaacugggggaaguacgugcugaucuccgcgggcgcccucaccgcccugaugcugacgaucuuccucaugaccugcugccgcaagaccaaccgggccgagagcauccagcacucccccggggagaccggccgcaaggucagcgugacgucccacaacgggcgggugaucagcuccugggagagcuacaagagcggcuccgagaccaagcuguga

SEQ ID NO: 95263 - RNA, 1575 nt, Artificial Sequence; identical to SEQ ID NO: 94869
  derived and/or modified CDS sequence (opt1) from glycoprotein__RABV__JN936781.1

SEQ ID NO: 95264 - RNA, 1575 nt, Artificial Sequence; identical to SEQ ID NO: 94869
  derived and/or modified CDS sequence (opt1) from glycoprotein__RABV__JN936782.1

SEQ ID NO: 95265 - RNA, 1575 nt, Artificial Sequence
  derived and/or modified CDS sequence (opt1) from glycoprotein__RABV__JN936783.1
augaucccccaggugcugcuguucgucccgcugcugguguucagcuccugcuucggcaaguuccccaucuacaccauccccgacaagcucgggcccuggagcccgaucgacauccaccaccuguccugccccaacaaccugguggucgaggacgagggcugcaccaaccucagcggguucuccuacauggagcugaaggugggcuacaucagcgccaucaaggugaacggguucacgugcaccggcgucgugaccgaggccgagaccuacacgaacuucgugggcuacgucaccaccaccuucaagcgcaagcacuuccggcccaugcccgacgcgugccgcgccgccuacaacuggaagauggccggggacccgcgguacgaggagucccugcacaaccccuaccccgacuaccacuggcuccgcacggugaagaccaccaaggagagccuggugaucaucucccccagcgucgccgaccuggacccguacgacaagucccuccacagccggguguuccccggcgggaagugcuccggcaucaccgugagcuccacgugcugcagcaccaaccacgacuacaccaucuggaugcccgagaacccccgccuggggaccuccugcgacaucuucacgaacagccggggcaagcgcgcguccaagggcgggaagaccugcggcuucgucgacgagcgggggcuguacaagagccucaagggcgccugcaagcugaagcugugcggcgugcucgggcugcgccugauggacggcaccuggguggccauccagaccagcgacgagaucaaguggugcuccccggaccagcucgucaaccugcacgacuuccacagcgacgagaucgagcaccuggugguggaggagcucgucaagaagcgggaggagugccuggacgcccuggagacgaucaugaccaccaaguccgugagcuuccgccggcucucccaccuccgcaagcuggugcccggguucggcaaggcguacaccaucuucaacaagacgcucauggaggccgacgcccacuacaagagcauccggaccuggaacgagaucauccccuccaaggggugccugcgcgucggcggccggugccacccccacgugaacggggucuucuucaacggcaucauccuggggccggacggccacgugcucauccccgagaugcagagcucccugcugcaccagcacaucgagcuccuggagagcuccgugaucccccugaugcacccccucgccgacccgagcaccgucuucaaggacggggacgaggccgaggacuucguggaggugcaccuccccgacguccacaagcagaucuccggcguggaccugggccugcccaacugggggaaguacgugcugaucagcgcgggcgcccugaccgcccucaugcugacgaucuuccugaugaccugcugccgcaagaccaaccgggccgaguccauccagcacagccccggggagaccggccgcaaggucuccgugacgagccacaacgggcgggugaucuccagcugggagagcuacaaguccggcagcgagaccaagcucuga

SEQ ID NO: 95266 - RNA, 1575 nt, Artificial Sequence
  derived and/or modified CDS sequence (opt1) from glycoprotein__RABV__JN936784.1
augaucccccaggugcugcuguucgucccgcugcugguguucagcuccugcuucggcaaguuccccaucuacaccauccccgacaagcucgggcccuggagcccgaucgacauccaccaccuguccugccccaacaaccugguggucgaggacgagggcugcaccaaccucagcggguucuccuacauggagcugaaggugggcuacaucagcgccaucaaggugaacggguucacgugcaccggcgucgugaccgaggccgagaccuacacgaacuucgugggcuacgucaccaccaccuucaagcgcaagcacuuccggcccaugcccgacgcgugccgcgccgccuacaacuggaagauggccggggacccgcgguacgaggagucccugcacaaccccuaccccgacuaccacuggcuccgcacggugaagaccaccaaggagagccuggugaucaucucccccagcgucgccgaccuggacccguacgacaagucccuccacagccggguguuccccggcgggaagugcuccggcaucaccgugagcuccacgugcugcagcaccaaccacgacuacaccaucuggaugcccgagaacccccgccuggggaccuccugcgacaucuucacgaacagccggggcaagcgcgcguccaagggcgggaagaccugcggcuucgucgacgagcgggggcuguacaagagccucaagggcgccugcaagcugaagcugugcggcgugcucgggcugcgccugauggacgggaccugcguggccauccagaccagcgacgagaucaaguggugcuccccggaccagcucgucaaccugcacgacuuccacagcgacgagaucgagcaccuggugguggaggagcucgucaagaagcgggaggagugccuggacgcccuggagacgaucaugaccaccaaguccgugagcuuccgccggcucucccaccuccgcaagcuggugcccggcuucggcaaggcguacaccaucuucaacaagacgcucauggaggccgacgcccacuacaagagcauccggaccuggaacgagaucauccccuccaaggggugccugcgcgucggcggccggugccacccccacgugaacggggucuucuucaacggcaucauccuggggccggacggccacgugcucauccccgagaugcagagcucccugcugcaccagcacaucgagcuccuggagagcuccgugaucccccugaugcacccccucgccgacccgagcaccgucuucaaggacggggacgaggccgaggacuucguggaggugcaccuccccgacguccacaagcagaucuccggcguggaccugggccugcccaacugggggaaguacgugcugaucagcgcgggcgcccugaccgcccucaugcugacgaucuuccugaugaccugcugccgcaagaccaaccgggccgaguccauccagcacagccccggggagaccggccgcaaggucuccgugacgagccacaacgggcgggugaucuccagcugggagagcuacaaguccggcagcgagaccaagcucuga

SEQ ID NO: 95267 - RNA, 1575 nt, Artificial Sequence; identical to SEQ ID NO: 95108
  derived and/or modified CDS sequence (opt1) from glycoprotein__RABV__JN936786.1

SEQ ID NO: 95268 - RNA, 1575 nt, Artificial Sequence
  derived and/or modified CDS sequence (opt1) from glycoprotein__RABV__JN936788.1
augaucccccaggcccugcuguucgugccgcugcuggucgugagccucugcuucggcaaguuccccaucuacaccauccccgacaagcuggggcccugguccccgaucgacauccaccaccugagcugccccaacaaccucguggucgaggacgagggcugcaccaaccuguccggguucagcuacauggagcugaaggugggcuacaucuccgccaucaaggugaacggguucacgugcaccggcgucgugaccgaggcggagaccuacacgaacuucgugggcuacgucaccaccaccuucaagcgcaagcacuuccggcccacgcccgacgccugccgcagcgccuacaacuggaagauggccggggacccgcgguacgaggagucccuccacaaccccuaccccgacuaccacuggcugcgcaccgugaagaccaccaaggagagcuucgugaucaucucccccagcgucgccgaccuggacccguacgacaagucccuccacagccggguguucccccgcggcaagugcuccgggaucacggugagcuccaccuacugcagcaccaaccacgacuacaccaucuggaugcccgagaacccccggcugggcacguccugcgacaucuucaccaacagccgcgggaagcgggcguucaagggcuccaagaccugcggcuucgucgacgagcgcgggcuguacaagagccucaagggcgccugcaagcugaagcugugcggggugcucggccugcggcugauggacggcaccuggguggccauccagacgagcgacgagaccaaguggugcccgcccgaccagcucgucaaccugcacgacuuccacuccgacgagaucgagcaccuggugguggaggagcucgucaagaagcgcgaggagugccuggacgcccuggagagcaucaugaccaccaaguccgugagcuuccggcgccucucccaccuccggaagcuggugcccggguucggcaaggcguacacgaucuucaacaagacccucauggaggccgacgcccacuacaagagcguccgcaccuggaacgagaucauccccuccaaggggugccugcgggugggcgggcgcugccacccgcacgucaacggcguguucuucaacggcaucauccuggggcccgacggccacgugcucauccccgagaugcagagcucccugcugcagcagcacauggagcuccuggagagcuccgucaucccccugaugcacccgcucgccgaccccagcaccguguucaagaacggggacgaggccgaggacuucguggagguccaccuccccgacgugcacaagcaggucuccggcguggaccuggggcugcccagcuggggcaaguacgugcugauguccgcgggcgugcugacggcccucaugcugaugaucuuccugaugaccugcugccggcgcaccaaccggccggagagcauccagcacucccucggggagaccggccgcaaggucagcgugacgucccagaacgggcgcgugaucagcagcugggaguccuacaagagcggcggggagaccaagcuguga

SEQ ID NO: 95269 - RNA, 1575 nt, Artificial Sequence; identical to SEQ ID NO: 95246
  derived and/or modified CDS sequence (opt1) from glycoprotein__RABV__JN936790.1

SEQ ID NO: 95270 - RNA, 1575 nt, Artificial Sequence; identical to SEQ ID NO: 95108
  derived and/or modified CDS sequence (opt1) from glycoprotein__RABV__JN936791.1

SEQ ID NO: 95271 - RNA, 1575 nt, Artificial Sequence; identical to SEQ ID NO: 94869
  derived and/or modified CDS sequence (opt1) from glycoprotein__RABV__JN936793.1

SEQ ID NO: 95272 - RNA, 1575 nt, Artificial Sequence
  derived and/or modified CDS sequence (opt1) from glycoprotein__RABV__JQ595307.1
augaucccccaggcccuccuguucgugccgcugcugauccccagccucugccugggcgaguuccccaucuacaccauccccgacaagcuggggccguggacccccaucgacauccaccaccucuccugccccaacaaccuggucgccgagaacgacggcugcacgagccuguccggguucagcuacauggagcucaaggugggcuacaucuccgcgaucaaggugaacggguucacgugcaccggcgucgugaccgaggccgagaccuacaccaacuucgugggcuacgucaccaccacguucaagcgcaagcacuuccggcccaugccggacgccugccgcgccgcccacgacuggaagauggcgggggacccccgguacgaggacagccugcagaaccccuaccccgacuaccacuggcugcgcaccgugaagaccaccaaggagucccucgugaucaucagcccguccgucgccgaccuggaccccuacgacaagagccugcacucccggguguuccccagcggcaagugccucgggaucacgguguccagcaccuacugcuccaccaaccacgacuacaccaucuggaugcccgucgagccgcgccugggcacgagcugcgacaucuucaccaacucccgggggaagcgcgccagcaagggcggccgggugugcggguucguggacgagcgcggccuguacaagucccucaagggggccugcaagcugaagcugugcggcguccccggcauccggcucauggacgggaccugggugagcauccagaccagcgaggacaucaaguggugcccgcccgaccgccuggugaaccugcacgacuuccacuccgacgagcucgagcaccuggucguggaggagcugaucaagcggcgcgagaacugccucgacgcgcuggagagcaucaugacgaccaaguccgugagcuuccggcgccugucccaccuccggaagcugguccccggcuucgggaaggccuacaccaucuucaacaagacccugauggaggccgacgcccacuacaagagcgugaagacguggaacgaggugauccccuccaagggcugccucgaggucgggggcaagugccacccgcccgugaacggcgucuucuucaacgggaucauccugggccccgacgggaacgugcugauccccgagaugcagagcucccuccugcagcagcacauggagcugcucgagagcuccgugaucccccugaugcacccccuggccgacccgagcaccgucuucaaggagggcgacgaggcggaggacuucguggaggugcaccuccccgacguccacaagcaggucuccgacguggaccuggggcugcccagcuggggcaaguaccuccugauguccgccggcgcccuggccauccucauccuggccaucgugcugaucaucugcugccgccgggugaacaagaccgggagcacccagcgcggccaccgggagucccgcgggaagaugagcguggcgccgcagaacggcaagaucaucuccagcugggagcuguacaagagcgaguccgagacggggcucuga

SEQ ID NO: 95273 - RNA, 1575 nt, Artificial Sequence
  derived and/or modified CDS sequence (opt1) from glycoprotein__RABV__JQ595308.1
augaucccccaggcccuccuguucgugccgcugcugauccccagccucugccugggcgaguuccccaucuacaccauccccgacaagcuggggccguggucccccaucgacauccaccaccucagcugccccaacaaccuggucgccgagaacgacggcugcaccucccugagcggguucuccuacauggagcucaaggugggcuacaucagcgcgaucaaggugaacggguucacgugcaccggcgucgugaccgaggccgagaccuacacgaacuucgugggcuacgucaccaccaccuucaagcgcaagcacuuccggcccacgccggacgccugccgcgccgcccacgacuggaagauggcgggggacccccgguacgaggccucccugcagaaccccuaccccgacuaccacuggcugcgcaccgugaagaccaccaaggagagccucgugaucaucuccccgagcgucgccgaccuggaccccuacgacaagucccugcacagccggguguuccccuccggcaagugccucgggaucacggugagcuccaccuacugcagcaccaaccacgacuacaccaucuggaugcccgucgagccgcgccugggcacguccugcgacaucuucaccaacagccgggggaagcgcgccuccaagggcggccgggugugcggguucguggacgagcgcggccuguacaagagccucaagggggcgugccggcugaagcugugcggcguccccggcauccgccuccuggacgggaccugggugagcauccagaccuccgaggacaucaaguggugcccgcccgaccggcuggugaaccuccacgacuuccacagcgacgagaucgagcaccuggucguggccgagcugaucaagcgccgggagaacugccucgacgcccuggaguccaucaugacgaccaagagcguguccuuccgccggcugagccaccuccgcaagcugguccccggcuucgggaaggccuacaccaucuucaacaagacccugauggaggccgacgcgcacuacaaguccgugaagacguggaacgaggugauccccagcaagggcugccucgaggucgggggccggugccacccccacgugaacggcgucuucuucaacgggaucauccugggccccgacgggaacgugcugaucccggagaugcaguccagccuccugcagcagcacauggagcugcucgaguccagcgugaucccccugaugcacccccuggccgaccccuccaccgucuucaaggagggcgacgaggccgaggacuucguggaggugcaccucccggacguccacaagcaggucagcgacguggaccuggggcugcccuccuggggcaaguaccuccugaucagcgccggcgcccuggcgauccucauccuggccaucgugcugaucaucugcugccgccgggugaacaagaccggguccacccagcgcggccaccgcgagagcgggggcaagauguccguggucccccagaacgggaagaucaucagcagcugggagcuguacaaguccgagagcgagacgggccucuga

SEQ ID NO: 95274 - RNA, 1575 nt, Artificial Sequence
  derived and/or modified CDS sequence (opt1) from glycoprotein__RABV__JQ595309.1
augaucccccaggcccuccuguucgugccgcugcugauccccagccucugccugggcgaguuccccaucuacaccauccccgacaagcuggggccguggucccccaucgacauccaccaccucagcugccccaacaaccuggucgccgagaacgacggcugcaccucccugagcggguucuccuacauggagcucaaggugggcuacaucagcgcgaucaaggugaacggguucacgugcaccggcgucgugaccgaggccgagaccuacacgaacuucgugggcuacgucaccaccaccuucaagcgcaagcacuuccggcccacgccggacgccugccgcgccgcccacgacuggaagauggcgggggacccccgguacgaggccucccugcagaaccccuaccccgacuaccacuggcugcgcaccgugaagaccaccaaggagagccucgugaucaucuccccgagcgucgccgaccuggaccccuacgacaagucccugcacagccggguguuccccuccggcaagugccucgggaucacggugagcuccaccuacugcagcaccaaccacgacuacaccaucuggaugcccgucgagccgcgccugggcacguccugcgacaucuucaccaacagccgggggaagcgcgccuccaagggcggccgggugugcggguucguggacgagcgcggccuguacaagagccucaagggggcgugccggcugaagcugugcggcguccccggcauccgccuccuggacgggaccugggugagcauccagaccuccgaggacaucaaguggugcccgcccgaccggcuggugaaccuccacgacuuccacagcgacgagaucgagcaccuggucguggccgagcugaucaagcgccgggagaacugccucgacgcccuggaguccaucaugacgaccaagagcguguccuuccgccggcugagccaccuccgcaagcugguccccggcuucgggaaggccuacaccaucuucaacaagacccugauggaggccgacgcgcacuacaaguccgugaagacguggaacgaggugauccccagcaagggcugccucgaggucgggggccggugccacccccacgugaacggcgucuucuucaacgggaucauccugggccccgacgggaacgugcugaucccggagaugcaguccagccuccugcagcagcacauggagcugcucgaguccagcgugaucccccugaugcacccccuggccgaccccuccaccgucuucaaggagggcgacgaggccgaggacuucguggaggugcaccucccggacguccacaagcaggucagcgacguggaccuggggcugcccuccuggggcaaguaccuccugaucagcgccggcgcccuggcgauccucauccuggccaucgugcugaucaucugcugccgccgggugaagaagaccggguccacccagcgcggccaccgcgagagcgggggcaagauguccguggucccccagaacgggaagaucaucagcagcugggagcuguacaaguccgagagcgagacgggccucuga

SEQ ID NO: 95275 - RNA, 1575 nt, Artificial Sequence
  derived and/or modified CDS sequence (opt1) from glycoprotein__RABV__JQ595310.1
augaucccccaggcccuccuguucgugccgcugcugaucccccuccugugccgcggcgaguuccccaucuacaccauccccgacaagcuggggccguggagccccaucgacauccaccaccucuccugccccaacaaccuggucgccgagaacgacggcugcaccagccuguccggguucagcuacauggagcucaaggugggcuacaucuccgcgaucaaggugaacggguucacgugcaccggcgucgugaccgaggccgagaccuacacgaacuucgugggcuacgucaccaccaccuucaagcggaagcacuuccgccccacgccggacgccugccgggccgcccacgacuggaagauggcgggggacccccgcuacgaggacagccugcagaaccccuaccccgacuaccacuggcugcggaccgugaagaccaccaaggagucccucgugaucaucagcccguccgucgccgaccuggaccccuacgacaagagccugcacucccgcguguuccccagcggcaagugccucgggaucacgguguccagcaccuacugcuccaccaaccacgacuacaccaucuggaugcccgucgagccgcggcugggcacgagcugcgacaucuucaccaacucccgcgggaagcgggccagcaagggcggccgcgugugcggguucguggacgagcggggccuguacaagucccucaagggggccugcaagcugaagcugugcggcguccccggcauccgccuccuggacgggaccugggugagcauccagaccagcgaggacaucaaguggugcccgcccgaccggcuggugaaccuccacgacuuccacuccgacgagaucgagcaccuggucguggaggagcugaucaagcgccgggagaacugccucgacgcgcuggagagcaucaugacgaccaaguccgugagcuuccgccggcugucccaccuccgcaagcugguccccggcuucgggaaggccuacaccaucuucaacaacacccugauggaggccgacgcccacuacaagagcgugaagacguggaacgaggugauccccuccaagggcugccucgaggucgggggccggugccacccgcccgugaacggcgucuucuucaacgggaucauccugggccccgacgggaacgugcugauccccgagaugcagagcucccuccugcagcagcacauggagcugcucgagagcuccgugaucccccugaugcacccccuggccgacccgagcaccgucuucaaggagggcgacgaggcggaggacuucguggaggugcaccuccccgacguccacaagcaggucuccgacguggaccuggggcugcccagcuggggcaaguaccuccugauguccgccggcgcccuggccauccucauccuggccaucgugcugaucaucugcugccgccgggugaacaagacccgcagcucccagcgcgggcaccgggagagcggcgggaagauguccguggcgccgcagaacggcaagaucaucagcagcugggagcuguacaaguccgagagcgagaccgggcucuga

SEQ ID NO: 95276 - RNA, 1575 nt, Artificial Sequence
  derived and/or modified CDS sequence (opt1) from glycoprotein__RABV__JQ595312.1
augaucccccaggcccugcuguucgugccgcugcugauccccagccucugccugggcgaguuccccuucuacaccauccccgacaagcuggggccguggucccccaugcacauccaccaccucagcugccccaacaaccuggucgccgaggacgacggcugcaccucccugagcggguucuccuacauggagcucaaggugggcuacaucagcgcgaucaaggugaacggguucacgugcaccggcgucgugaccgaggccgagaccuacacgaacuucgugggcuacgucaccaccaccuucaagcgcaagcacuuccggcccaugccggacgccugccgcgccgcccacgacuggaagauggcgggggacccccgguacgaggacucccugcagaaccccuaccccgacagccacuggcugcgcacggugaagaccaccaaggagucccucgugaucaucagcccguccgucgccgaccuggaccccuacgacaagagccugcacucccggguguuccccagcggcaagugccucgggaucaccguguccagcacguacugcuccaccaaccacgacuacaccaucuggaugcccgucgagccgcgccugggcaccagcugcgacaucuucacgaacucccgggggaagcgcgccagcaagggcggccgggugugcggguucguggacgagcgcggccuguacaagagccucaagggggccugcaagcugaagcugugcggcguccccggcauccggcucauggacgggaccuggguguccauccagaccagcgaggacaucaaguggugcccgcccgaccgccuggugaaccugcacgacuuccacuccgacgagaucgagcaccucgucguggaggagcugaucaagcggcgcgagaacugccuggacgcgcucgagagcaucaugaccacgaaguccgugagcuuccggcgccugucccaccuccggaagcucguccccggcuucgggaaggccuacaccaucuucaacaagacccugauggaggccgacgcccacuacaagagcgugaagaacuggaacgaggugauccccuccaagggcugccuggaggucgggggccgcugccacccgcccgugaacggcgucuucuucaacgggaucauccucggccccgacgggaacgugcugauccccgagaugcagagcucccugcuccagcagcacauggagcugcuggagagcuccgugaucccccucaugcacccccuggccgacccgagcaccgucuucaaggagggcgacgaggcggaggacuucguggaggugcaccuccccgacguccacaagcaggucuccgacguggaccuggggcugcccagcuggggcaaguaccugcucauguccgccggcgcccuggccauccugcuccuggccaucgugagcaucaucugcugccggcgcguguccaagacgcggagcacccagcgcgggcaccgcgagagcggcgggcggauguccguggcgccgcagaacggcaagaucaucagcuccugggagcuguacaagagcgaguccgagaccgggcuguga

SEQ ID NO: 95277 - RNA, 1575 nt, Artificial Sequence
  derived and/or modified CDS sequence (opt1) from glycoprotein__RABV__JQ595313.1
augaucccccaggcccuccuguucgugccgcugcugauccccagccucggccuggggaaguuccccaucuacaccauccccgacaagcugggcccguggucccccaucgacauccaccaccucagcugccccaacaaccuggucguggaggacgaggggugcaccucccugagcggcuucuccuacauggagcucaaggugggguacaucagcuccaucaaggucaacggcuucacgugcaccggcguggugaccgaggccgagaccuacacgaacuucgucggguacgugaccaccaccuucaagcgcaagcacuuccggcccaugccggacgcgugccgcgccgcccacgacuggaagaucgccggcgacccccgguacgaggacagccugcagaaccccuaccccgacuaccacuggcugcgcacggugaagaccaccaaggagucccucgucaucaucagcccguccguggccgagcuggaccccuacgacaagagccugcacucccggguguuccccagcgggaagugccucggcaucaccgucuccagcacguacugcuccaccaaccacgacuacaccaucuggaugcccguggaggcgcgccuggggaccagcugcgacaucuucacgaacucccggggcaagaaggccagcaagggcgggcggaccugcggcuucguggacgagcgcgggcuguacaagagccucaagggcgccugcaagcugaagcugugcggcgucccggggcuccgccugauggacggcaccuggguguccauccagaccagcgacgacaucaaguggugcccgcccgaccagcuggugaaccuccacgacuuccacuccgacgagaucgagcaccuggucguggaggagcugaucaagaagcgggaggggugccucgacgcccuggagagcaucaugacgaccaaguccgugagcuuccgccggcugucccaccuccgcaagcugguccccggcuucgggaaggcguacaccaucuucaacaacacccugauggaggccgacgcccacuacaagagcgugcggacguggaacgaggugauccccuccaagggcugccucaaggucggcgggcgcugccacccgcccgugaacggcgucuucuucaacgggaucauccugggccccgacgggaacgugcugauccccgagaugcagagcucccuccugcagcagcacauggagcugcucgagagcuccgugaucccccugaugcacccccuggccgaccccagcaccgucuucaaggacggcgacgaggccgaggacuucguggaggugcaccucccggacguccacaagcaggucuccgacguggaccugggccugcccagcugggggaaguaccuccugauguccgcgggcgcccuggccacccucauccuggccaucuuccugaucacgugcugccggcgcgccaaccggaccgagagcacccagcgcgggcaccgggaguccggcgggaaggugagcguggcgccccagaacggcaagaucaucagcuccugggagcuguacaagagcgaguccgagaccggcauguga

SEQ ID NO: 95278 - RNA, 1575 nt, Artificial Sequence
  derived and/or modified CDS sequence (opt1) from glycoprotein__RABV__JQ595315.1
augaucccccaggcccuccuguucgugccgcugcugauccccagccucugccugggcaaguuccccaucuacaccauccccgacaagcuggggccguggucccccaucgacauccaccaccucagcugccccaacaaccuggucgccgaggacgagggcugcaccucccugagcggguucuccuacauggagcucaaggugggcuacaucagcgccaucaaggugaacggguucacgugcaccggcgucgugaccgaggccgagaccuacacgaacuucgugggcuacgucaccaccaccuucaagcgcaagcacuuccggcccaugccggacgccugccgcgccgcccacgacuggaagauggcgggggacccccgguacgaggacucccugcagaaccccuaccccgacuaccacuggcugcgcacggugaagaccaccaaggagagccucgugaucaucuccccgagcgucgccgaccuggaccccuacgacaagucccugcacagccggguguuccccuccggcaagugccucgggaucaccgugagcuccacguacugcagcaccaaccacgacuacaccaucuggaugcccgucgaggcccgccugggcaccuccugcgacaucuucacgaacagcaaggggaagaaggccuccaagggcggccggaccugcggguucguggacgagcgcggccuguacaagagccucaagggggcgugcaagcugaagcugugcggcgugccgggccuccggcugauggacgggaccugggucagcauccagaccuccgacgacaucaaguggugcccgcccgaccagcuggugaaccuccacgacuuccacagcgacgagaucgagcaccugguggucgaggagcugaucaagaagcgcgagggcugccucgacgcccuggaguccaucaugacgaccaagagcguguccuuccggcgccugagccaccuccggaagcuggugcccggguucggcaaggccuacaccaucuucaacaacacccugauggaggccgacgcccacuacaaguccguccgcacguggaacgaggugauccccagcaaggggugccucaaggugggcggccggugccacccgcccgucaacgggguguucuucaacggcaucauccuggggcccgacggcaacguccugauccccgagaugcaguccagccuccugcagcagcacauggagcugcucgaguccagcgugaucccccugaugcacccccuggcggaccccuccaccguguucaaggacggggacgaggccgaggacuucgucgaggugcaccucccggacgugcacaagcaggucagcgagaucgaccugggccugcccuccuggggcaaguaccuccugaugagcgccggggugcuggccacccucauccuggccaucuuccugaucacgugcugccgccgggcgaaccgcaccgaguccacccagcggggccgccgggagagcgggggcaagguguccgucgcgccccagaacgugaagaucaucagcagcugggagcuguacaaguccgagagcgagaccgggcucuga

SEQ ID NO: 95279 - RNA, 1575 nt, Artificial Sequence
  derived and/or modified CDS sequence (opt1) from glycoprotein__RABV__JQ595316.1
augaucccccaggcccuccuguucgugccgcugcugauccccagccucugccugggcaacuuccccaucuacaccauccccgacaagcuggggccguggucccccaucgacauccaccaccucagcugccccaacaaccuggucgccgaggacgagggcugcaccucccugagcggguucuccuacauggagcucaaggugggcuacaucagcgccaucaaggugaacggguucacgugcaccggcgucgugaccgaggccgagaccuacacgaacuucgugggcuacgucaccaccaccuucaagcgcaagcacuuccggcccaugccggacgccugccgcgccgcccacgacuggaagauggcgggggacccccgguacgaggacucccugcagaaccccuaccccgacuaccacuggcugcgcacggugaagaccaccaaggagagccucgugaucaucuccccgagcgucgccgaccuggaccccuacgacaagucccugcacagccggguguuccccuccggcaagugccucgggaucaccgugagcuccacguacugcagcaccaaccacgacuacaccaucuggaugcccgucgaggcccgccugggcaccuccugcgacaucuucacgaacagcaaggggaagaaggccuccaagggcggccggaccugcggguucguggacgagcgcggccuguacaagagccucaagggggcgugcaagcugaagcugugcggcgugccgggccuccggcugauggacgggaccugggucagcauccagaccuccgacgacaucaaguggugcccgcccgaccagcuggugaaccuccacgacuuccacagcgacgagaucgagcaccugguggucgaggagcugaucaagaagcgcgagggcugccucgacgcccuggaguccaucaugacgaccaagagcguguccuuccggcgccugagccaccuccggaagcuggugcccggguucggcaaggccuacaccaucuucaacaacacccugauggaggccgacgcccacuacaaguccguccgcacguggaacgaggugauccccagcaaggggugccucaaggugggcggccggugccacccgcccgucaacgggguguucuucaacggcaucauccuggggcccgacggcaacguccugauccccgagaugcaguccagccuccugcagcagcacauggagcugcucgaguccagcgugaucccccugaugcacccccuggcggaccccuccaccguguucaaggacggggacgaggccgaggacuucgucgaggugcaccucccggacgugcacaagcaggucagcgagaucgaccugggccugcccuccuggggcaaguaccuccugaugagcgccggggugcuggccacccucauccuggccaucuuccugaucacgugcugccgccgggcgaaccgcaccgaguccacccagcggggccgccgggagagcgggggcaagguguccgucgcgccccagaacgggaagaucaucagcagcugggagcuguacaaguccgagagcgagaccggccucuga

SEQ ID NO: 95280 - RNA, 1575 nt, Artificial Sequence
  derived and/or modified CDS sequence (opt1) from glycoprotein__RABV__JQ595317.1
augaucccccaggcccugcuguucgugccgcugcugaucagcucccucugcuucggcaaguuccccaucuacaccauccccgacaagcuggggcccuggagcccgaucgacauccaccaccugugcugccccaacaaccucgucgccgaggaggagggcugcaccucccugagcggguucuccuacauggagcugaaggugggcuacaucagcgcgaucaaggugaacggguucacgugcaccggcgucgugaccgaggccgagaccuacacgaacuucgugggcuacgucaccaccaccuucaagcgcaagcacuuccggcccaugcccgacgccugccgcgccgccuacgacuggaagauggcgggggacccgcgguacgaggacucccuccagaaccccuaccccgacuaccacuggcugcgcacggugaagaccaccaaggagagccugaucaucaucucccccagcguggccgaccucgacccguacgacaagucccugcacagccgggucuuccccggcgggaagugccugggcaucaccaucuccagcacguacugcuccaccaaccacgacuacaccaucuggaugcccgaggaggcccgccucgggaccagcugcaacaucuucacgaacucccggggcaagaaggccagcaagggcgggcggaccugcggcuucguggacgagcgcgggcuguacaagucccugaagggcgcgugcaagcucaagcugugcggcgugcccgggcugcgccucauggacggcaccugggucagcauccagaccagcaacgagacgaaguggugcccgcccgaccagcuggugaaccugcacgacuuccacuccgacgagaucgagcaccucguggucgaggagcuggugaagaagcgggaggagugccuggacgcccucgagagcaucaugaccaccaaguccgugagcuuccgccggcugucccaccuccgcaagcucguccccggguucggcaaggccuacaccaucuucaacaagacgcugauggaggccgacgcccacuacaagagcgugcggaccuggaacgagaucauccccuccaaggggugccugaaggugggcggccgcugccacccgcacgucgacgggguguucuucaacggcaucauccucgggcccgacggccacgugcugauccccgagaugcagagcucccugcuccagcagcacauggagcugcuggagagcuccgucaucccccucauccacccgcuggcggaccccagcaccguguucaaggacggggacgaggccgacgacuucgucgaggugcaccuccccgacgugcacaagcaggucuccggcguggaccugggccugcccggguggggcaaguaccugcucaugagcgccggggcccuggccacccugauccucacgaucuuccugaucaagugcugccggggcgugaaccgcaccgaguccguccagcggagccugcgcgacuccgggggcaaggugagcgugccgccccagaacggcaaggucaucuccagcugggagcuguacaagagcgggggcgagaccgggcucuga

SEQ ID NO: 95281 - RNA, 1575 nt, Artificial Sequence
  derived and/or modified CDS sequence (opt1) from glycoprotein__RABV__JQ595319.1
augaucccccaggcccugcucagcgugccgcugcugaucuccagccucugccugggcaaguuccccaucuacaccauccccgacaagcuggggcccugguccccgaucgacauccaccaccucagcugccccaacaaccuggucguggaggacgagggcugcaccucccugagcggguucuccuacauggagcucaaggugggcuacaucagcgccaucaaggucaacggguucacgugcaccggcguggugaccgaggcggagaccuacaccaacuucgucggcuacgugaccaccaccuucaagcgcaagcacuuccggcccaugcccgacgccugccgcgccgcccacgaguggaagauggccggggacccgcgguacgaggacucccugcagaaccccuaccccgacuaccacuggcugcgcacggugaagaccaccaaggagagccucaucaucaucucccccagcgucgcggaccuggacccguacgacaagucccugcacagccggguguuccccggcgggaacugccucggcaucaccaucuccagcacguacugcuccaccaaccacgacuacaccaucuggaugcccgaggaggcccgccuggggaccagcugcgacaucuucacgaacucccggggcaagcgcgccagcaagggcgggaagaucugcggcuucguggacgagcgggggcuguacaagagccucaagggcgccugcaagcugaagcugugcggcguccccgggcuccgccugauggacggcaccuggguguccauccagaccagcgacgagaccaaguggugcccgcccgaccagcuggugaacguccacgacuuccacuccgacgagaucgagcaccucaucguggaggagcuggugaagaagcgggaggagugccuggacgcgcucgagagcaucaugacgaccaaguccgucagcuuccgccggcugucccaccuccgcaagcuggugcccggguucggcaaggccuacaccaucuucaacaacacccugauggaggccgacgcccacuacaagagcgugcggacguggaacgagaucauccccuccaaggggugccugaaggucggcggcaugugccacccgcacgucgggggcguguucuucaacgggaucauccucggccccgacgggaccgugcugauccccgagaugcagagcucccugcuccagcagcacauggagcugcuggagagcuccgugaucccccucaugcacccgcuggccgaccccagcaccgucuucaaggagggcgacgaggcggaggacuucguggagauccaccuccccgacgugcacaagcagaucuccggcgucgaccuggggcugcccagcuggggcaaguaccugcucaucuccgccggggcccuggccacccugauccucacgaucuuccugaucacgugcugccgcaaggugaaccggaccgagagcauccagcgcggccacggggaguccgagcggaaggugagcgucagcccgcagaacggccgcgugaucuccagcugggagcuguacaaguccggcggggagaccaaccuguga

SEQ ID NO: 95282 - RNA, 1575 nt, Artificial Sequence
  derived and/or modified CDS sequence (opt1) from glycoprotein__RABV__JQ595320.1
augaucuuccaggcccugcuguucgugccccugcugaucagcucccucugccugggcaaguucccgaucuacaccauccccgacaagcuggggcccuggagccccaucgacauccaccaccucuccugcccgaacaaccuggucguggaggacgagggcugcaccagccuguccggguucagcuacauggagcucaaggugggcuacaucuccgccaucaaggucaacggguucacgugcaccggcguggugaccgaggcggagaccuacacgaacuucgucggcuacgugaccaccaccuucaagcgcaagcacuuccggcccauccccgacgccugccgcgccgccuacaacuggaagaucgccggggacccccgguacgaggagagccugcagaacccguaccccgacuaccacuggcugcgcacggugaagaccaccaaggagucccucaucaucaucagccccuccgucgcggaccuggaccccuacgacaagagccugcacucccgccucuucccgggcgggaagugccugggcaucaccaucagcuccacguacugcagcaccaaccacgacuacaccaucuggaugcccgaggagccccggcuggggaccuccugcgacaucuucacgaacagcaagggcaagaaggccuccaagggcgggaaggugugcggcuucguggacgagcgggggcucuacaagagccugaagggcgccugcaagcugaagcucugcggcgucagcgggcugcgccugauggacggcaccugggugaccauccagaccuccgacgagacgaaguggugcccgcccgaccagcucgugaaccugcacgacuuccacagcgacgagaucgagcaccuggucguggaggagcucgugaagaagcgggaggagugccuggacgcccuggaguccaucaugaccaccaagagcgucuccuuccgccggcucagcuaccugcgcaagcuggugcccggguucggcaaggcguacaccaucuucaacaagacgcucauggaggccgacgcccacuacaaguccgugcggaccuggaacgagaucauccccagcaaggggugccugaaggucuccgaccgcugccacccccacguggacggcguguucuucaacggcaucauccuggggccggacggcaacguccucauccccgagaugcagagcucccugcugcagcagcacauggagcuccuggagagcuccgugaucccccugaugcacccccucgccgacccgagcaccgucuucaaggacggggacgaggccgaggacuucguggaggugcaccuccccgacguccacaagcagaucuccggcguggaccuggggcuccccagcuggggcaaguaccugcugaugaucgcgggcgggcucgccacccuggugcugaucaucuuccugauggccugcugccggcgcacgaagcggaccgagucccgcccccggggcagcggggaguccggcgagaagguccucgccaccccgcagcccaagaagguggugagcagcugggagcuguacaagcgcgagggggacgcccggcuguga

SEQ ID NO: 95283 - RNA, 1575 nt, Artificial Sequence
  derived and/or modified CDS sequence (opt1) from glycoprotein__RABV__JQ595321.1
augaucuuccaggcccugcuguucgugccccugcugaucagcucccucugccugggcaaguucccgaucuacaccauccccgacaagcuggggcccuggagccccaucgacauccaccaccucuccugcccgaacaaccuggucguggaggacgagggcugcaccagccuguccggguucagcuacauggagcucaaggugggcuacaucuccgccaucaaggucaacggguucacgugcaccggcguggugaccgaggcggagaccuacacgaacuucgucggcuacgugaccaccaccuucaagcgcaagcacuuccggcccauccccgacgccugccgcgccgccuacaacuggaagaucgccggggacccccgguacgaggagagccugcagaacccguaccccgacuaccacuggcugcgcacggugaagaccaccaaggagucccucaucaucaucagccccuccgucgcggaccuggaccccuacgacaagagccugcacucccgccucuucccgggcgggaagugccugggcaucaccaucagcuccacguacugcagcaccaaccacgacuacaccaucuggaugcccgaggagccccggcuggggaccuccugcgacaucuucacgaacagcaagggcaagaaggccuccaagggcgggaaggugugcggcuucguggacgagcgggggcucuacaagagccugaagggcgccugcaagcugaagcucugcggcgucagcgggcugcgccugauggacggcaccugggugaccauccagaccuccgacgagacgaaguggugcccgcccgaccagcucgugaaccugcacgacuuccacagcgacgagaucgagcaccuggucguggaggagcucgugaagaagcgggaggagugccuggacgcccuggaguccaucaugaccaccaagagcgucuccuuccgccggcucagcuaccugcgcaagcuggugcccggguucggcaaggcguacaccaucuucaacaagacgcucauggaggccgacgcccacuacaaguccgugcggaccuggaacgagaucauccccagcaaggggugccugaaggucuccgaccgcugccacccccacguggacggcguguucuucaacggcaucauccuggggccggacggcaacguccucauccccgagaugcagagcucccugcugcagcagcacauggagcuccuggagagcuccgugaucccccugaugcacccccucgccgacccgagcaccgucuucaaggacggggacgaggccgaggacuucguggaggugcaccuccccgacguccacaagcagaucuccggcguggaccuggggcuccccagcuggggcaaguaccugcugaugaucgcgggcgggcucgccacccuggugcugaucaucuuccugauggccugcugccggcgcacgaagcggaccgagucccgccggcgcgcccucggcgagagcggggagaagguccuggccaccccgcagcccaagaaggugguguccagcugggagcuguacaagcgggagggcgacgcgcgccucuga

SEQ ID NO: 95284 - RNA, 1575 nt, Artificial Sequence
  derived and/or modified CDS sequence (opt1) from glycoprotein__RABV__JQ595322.1
augaucccccaggcccugcucagcgugccgcugcugaucuccagccucugcuucggcaaguuccccaucuacaccauccccgagaagcuggggcccugguccccgaucgacauccaccaccugagcugccccaacaaccucgucguggaggacgagggcugcaacucccugagcggguucuccuacauggagcugaaggugggcuacaucagcgccaucaaggucaacggguucacgugcaccggcguggugaccgaggcggagaccuacaccaacuucgucggcuacgugacgaccaccuucaagcgcaagcacuuccggcccaugcccgacgccugccgcgccgccuacaacuggaagaccgccggggacccgcgguacgaggagucccuccacaaccccuaccccgacuaccacuggcugcgcacggugaagaccaccaaggagagccugaucaucaucucccccagcgucgcggaccucgacccguacgacaagucccugcacagccggaucuuccccggcgggaagugccugggcaucaccaucuccagcacguacugcuccaccaaccacgacuacaccaucuggaugcccgaggaggcccgccucgggaccagcugcgacaucuucacgaacuccaagggcaagcgggccagcaagggcgggcggaccugcggcuucguggacgagcgcgggcuguacaagagccugaagggcgccugcaagcucaagcugugcggcgugcccgggcugcgccucauggacggcaccugggucgcgauccagaccccgaacgagacgaaguggugcucccccgaccagcuggugaacgugcacgacuuccggagcgacgagaucgagcaccuggucguggaggagcucauccgcaagcgggaggagugccuggacgcccuggaguccaucaugaccaccaagagcguguccuuccgccggcucagcaaccugcgcaagcugguccccggguucggcaaggccuacaccaucuucaacaagacgcucauggaggccgacgcccacuacaaguccgugcggaccuggaacgagaucauccccagccgcgggugccugaaggugggcggccggugccacccgcacgucaacgggguguucuucaacggcaucauccuggggcccgacggccacauccucauccccgagaugcaguccagccugcugcagcagcacauggagcuccuggaguccagcgugaucccccugauccacccgcucgcggaccccuccaccgucuucaaggacggggacgaggccgaggacuucguggagguccaccuccccgacgugcaccagcaggucagcggcguggaccugggccugcccgacugggggaaguacgugcugauguccgccggcgcccuggccaccgugaugcucacgaucuuccugaucacgugcugccgccgggucaagcgcaccgagagcauccaccaggggcugggcgaguccgggcgcaaggugagcgugaccccgcagaacggcaaggucauguccagcugggaguacuacaagagcgagggcgggacccggcucuga

SEQ ID NO: 95285 - RNA, 1575 nt, Artificial Sequence
  derived and/or modified CDS sequence (opt1) from glycoprotein__RABV__JQ595323.1
augaucagccaggccgugcuguacgucccccuccugauccccucccugugcaucggcgaguuccccaucuacaccauccccgacaagaucgggcccuggagcccgaucgacauccaccaccucuccugccccaacaaccuggugguggaggacgagggcugcaccagccuguccggguucagcuacauggagcucaaggucggcuacaucuccgccaucaaggugaacggguucacgugcaccggcguggucaccgaggcggagaccuacacgaacuucgugggcuacgugaccaccaccuucaagcgcaagcacuuccggcccaugcccgacgccugccgcgccgccuacaacuggaagauggccggggacccgcgguacgaggagagccugcagaaccccuaccccgacuacaacuggcugcgcacggucaagaccaccaaggagucccucaucaucaucagccccuccguggcggaccuggacccguacgacaagagccugcacucccggguguuccccaacggcaagugccucggggucaccaucagcuccacguacugcagcaccaaccacgacuacaccaucuggaugcccgaggaggcccgccugggcaccuccugcgacaucuucacgaacagcaaggggaagcgggccuccaagggcggccggaccugcggguucguggacgagcgcggccuguacaagagccuccgcggggccugcaagcugaagcugugcggcgugcccggccuccggcugauggacgggaccugggucagcauccagaccuccgacgacacgaaguggugcccgcccgaccagcuggugaacgugcacgacuuccacagcgacgagaucgagcaccucgucguggaggagcuggugaagaagcgcgaggagugccuggacgcgcucgaguccaucaugaccaccaagagcgucuccuuccggcgccugagccaccuccggaagcuggugcccggcuucgggaaggccuacaccaucuucaacaagacgcugauggaggccgacgcccacuacaaguccauccagaccuggaacgagaucauccccagcaagggcugccugaaggucgggggcaugugccacccgcacguggacggcguguucuucaacgggaucauccucggccccgacgggaacguccugauccccgagaugcaguccagccugcuccagcagcacauggagcugcuggaguccagcgugaucccccucaugcacccgcuggccgaccccuccaccguguucaaggacggcgacgaggcggaggacuucgucgaggugcaccuccccgacauccacaagcaggucagcgggaucgaccugggccugcccgacuggggcaaguaccugcucauguccgccggggcccuggccauccugcuccugaccaucuuccugaugacgugcugccgccgggugaaccgcaccaagagcgcccagcgggacccgggcgagcucgggcgcaagguguccgcgaccccgcagaaccggaaggugaucagcuccugggagcuguacaagagcggcggggacacccgccuguga

SEQ ID NO: 95286 - RNA, 1575 nt, Artificial Sequence
  derived and/or modified CDS sequence (opt1) from glycoprotein__RABV__JQ595324.1
augaucccccaggcccugcucagcgugccgcugcugaucuccagccucugcuucggcaaguuccccaucuacaccauccccgagaagcuggggcccugguccccgaucgacauccaccaccugagcugccccaacaaccucgucguggaggacgagggcugcaacucccugagcggguucuccuacauggagcugaaggugggcuacaucagcgccaucaaggucaacggguucacgugcaccggcguggugaccgaggcggagaccuacaccaacuucgucggcuacgugaccaccaccuucaagcgcaagcacuuccggcccaugcccgacgccugccgcgccgccuacaacuggaagaccgccggggacccgcgguacgaggagucccuccacaaccccuaccccgacuaccacuggcugcgcacggugaagaccaccaaggagagccugaucaucaucucccccagcgucgcggaccucgacccguacgacaagucccugcacagccggaucuuccccggcgggaagugccugggcaucaccaucuccagcacguacugcuccaccaaccacgacuacaccaucuggaugcccgaggaggcccgccucgggaccagcugcgacaucuucacgaacuccaagggcaagcgggccagcaagggcgggcggaccugcggcuucguggacgagcgcgggcuguacaagagccugaagggcgccugcaagcucaagcugugcggcgugcccgggcugcgccucauggacggcaccugggucgcgauccagaccccgaacgagacgaaguggugcucccccgaccagcuggugaacgugcacgacuuccggagcgacgagaucgagcaccuggucguggaggagcucauccgcaagcgggaggagugccuggacgcccuggaguccaucaugaccaccaagagcguguccuuccgccggcucagcaaccugcgcaagcugguccccggguucggcaaggccuacaccaucuucaacaagacgcucauggaggccgacgcccacuacaaguccgugcggaccuggaacgagaucauccccagccgcgggugccugaaggugggcggccggugccacccgcacgucaacgggguguucuucaacggcaucauccuggggcccgacggccacauccucauccccgagaugcaguccagccugcugcagcagcacauggagcuccuggaguccagcgugaucccccugauccacccgcucgcggaccccuccaccgucuucaaggacggggacgaggccgaggacuucguggagguccaccuccccgacgugcaccagcaggucagcggcguggaccugggccugcccgacugggggaaguacgugcugauguccgccggcgcccuggccaccgugaugcucacgaucuuccugaucacgugcugccgccgggucaagcgcaccgagagcgugcaccaggggcugggcgaguccgggcgcaaggugagcgucgcgccgcagaacggcaaggugauguccagcugggaguacuacaagagcggcgggggcacccggcucuga

SEQ ID NO: 95287 - RNA, 1575 nt, Artificial Sequence
  derived and/or modified CDS sequence (opt1) from glycoprotein__RABV__JQ595325.1
augaucccccaggcccugcucagcgugccgcugcugaucuccagccucugcuucggcaaguuccccaucuacaccauccccgagaagcuggggcccugguccccgaucgacauccaccaccugagcugccccaacaaccucgucguggaggacgagggcugcaacucccugagcggguucuccuacauggagcugaaggugggcuacaucagcgccaucaaggucaacggguucacgugcaccggcguggugaccgaggcggagaccuacaccaacuucgucggcuacgugacgaccaccuucaagcgcaagcacuuccggcccauggccgacgccugccgcgccgccuacaacuggaagaccgcgggggacccccgguacgaggagucccuccacaacccguaccccgacuaccacuggcugcgcacggugaagaccaccaaggagagccugaucaucaucucccccagcgucgccgaccucgaccccuacgacaagucccugcacagccggaucuucccgggcgggaagugccugggcaucaccaucuccagcacguacugcuccaccaaccacgacuacaccaucuggaugcccgaggaggcccgccucgggaccagcugcgacaucuucacgaacuccaagggcaagcgggccagcaagggcgggcggaccugcggcuucguggacgagcgcgggcuguacaagagccugaagggcgcgugcaagcucaagcugugcggcgugcccgggcugcgccucauggacggcaccugggucgccauccagacccccaacgagacgaaguggugcuccccggaccagcuggugaacgugcacgacuuccggagcgacgagaucgagcaccuggucguggaggagcucauccgcaagcgggaggagugccuggacgcccuggaguccaucaugaccaccaagagcguguccuuccgccggcucagcaaccugcgcaagcugguccccggguucggcaaggccuacaccaucuucaacaagacgcucauggaggccgacgcgcacuacaaguccgugcggaccuggaacgagaucauccccagccgcgggugccugaaggugggcggccggugccacccccacgucaacgggguguucuucaacggcaucauccuggggccggacggccacauccucauccccgagaugcaguccagccugcugcagcagcacauggagcuccuggaguccagcgugaucccccugauccacccccucgccgacccguccaccgucuucaaggacggggacgaggccgaggacuucguggagguccaccuccccgacgugcaccagcaggucagcggcguggaccugggccugcccgacugggggaaguacgugcugauguccgccggcgcccuggcgaccgugaugcucacgaucuuccugaucacgugcugccgccgggucaagaagaccgagagcauccaccaggggcccggcgaguccgggcgcaaggugagcgugaccccgcagaacggcaaggucauguccagcugggaguacuacaagagcggcgggggcacccgccuguga

SEQ ID NO: 95288 - RNA, 1575 nt, Artificial Sequence
  derived and/or modified CDS sequence (opt1) from glycoprotein__RABV__JQ595326.1
augaucccccaggcccuccuguucgugccgcugcuguuccccagccucugccugggcaaguuccccaucuacaccauccccgagaagcuggggccguggucccccaucgacauccaccaccucagcugccccaacaaccuggucguggaggacgagggcugcgacucccugagcggguucuccuacaucgagcucaaggugggcuacaucagcgccaucaaggucaacggguucacgugcaccggcguggugaccgaggcggagaccuacaccaacuucgucggcuacgugacgaccaccuucaagcgcaagcacuuccggcccaugccggacgccugccgcgccgccuacaacuggaagaccgccggggacccccgguacgaggagucccugcacaaccccuaccccgacuaccacuggcugcgcacggugaagaccaccaaggagagccucaucaucaucuccccgagcgucgcggaccuggaccccuacgacaagucccugcacagccggguguuccccggcgggaagugccucggcaucaccguguccagcacguacugcuccaccaaccacgacuacaccaucuggaugcccgaggaggcccgccuggggaccagcugcgacaucuucacgaacuccaagggcaagcgggccagcaagggcgggcggaccugcggcuucgucgacgagcgcgggcuguacaagucccucaagggcgccugcaagcugaagcugugcggcgugccggggcuccgccugauggacggcaccuggguggcgauccagacccccggggagacgaaguggugcagccccgaccagcuggucaaccuccacgacuuccggagcgacgagaucgagcaccuggugguggaggagcugaucaagaagcgcgaggagugccucgacgcccuggaguccaucaugaccaccaagagcgucuccuuccggcgccugagcaaccuccggaagcuggugcccggcuucgggaaggccuacaccaucuucaacaagacgcugauggaggccgacgcccacuacaaguccgugcgcaccugggacgagaucaucccgagcaagggcugccuccgggucggcgggcgcugccacccccacgugaacggcguguucuucaacgggaucauccugggccccgacgggcacguccugauccccgagaugcaguccagccuccugcagcagcacauggagcugcucgaguccagcgugaucccgcugauccacccccuggcggaccccuccaccgucuucaaggacggcgacgaggccgaggacuucguggaggugcaccuccccgacguccacaagcaggucagcggcguggaccuggggcugccgaacuggggcaaguacgugcucauguccgccggggugcuggccaccgugauccugacgaucuuccuccugaccugcugccggcgcgucaaccggaccaagcccaagcagcagagccuggaggaguccggccgcaaggugagcgugacgccccagaacgggaaggucauguccagcugggaguacuacaaguccgagggccgcaccagccuguga

SEQ ID NO: 95289 - RNA, 1575 nt, Artificial Sequence
  derived and/or modified CDS sequence (opt1) from glycoprotein__RABV__JQ595327.1
augauccugcaggcccuccuguucgugccccugcucaucagcucccugugcuucggcgacuucccgaucuacaccauccccgagaagcuggggcccuggagccccaucgacauccaccaccucuccugcccgaacaaccuggucguggaggacgagggcugcagcucccugagcggguucuccuacauggagcucaaggugggcuacaucagcgccaucaaggucaacggguucacgugcaccggcguggugaccgaggcggagaccuacaccaacuucgucggcuacgugacgaccaccuucaagcgcaagcacuuccggcccaugcccgacgccugccgcgccgccuacaacuggaagaccgccggggacccccgguacgaggagucccugcagaacccguaccccgacuaccacuggcugcgcacggugaagaccaccaaggagagccucgucaucaucucccccagcguggcggaccuggaccccuacgacaagucccugcacagccggguguucuccgacggcaagugccucgggaucaccaucagcuccacguacugcagcaccaaccacgacuacaccaucuggaugccggaggaggcccgccugggcaccuccugcgacaucuucacgaccagccgggggaagcgcgccagcaagggcggcaagaccugcggguucgucgacgagcggggccuguacaagucccucaagggggccugcaagcugaagcugugcggcgugagcggccuccgccugauggacgggaccuggguguccauccaggcgcccgacgaggccaaguggugcagcacggaccagcuggucaacauccacgacauccgguccgacgagaucgagcaccucgugguggaggagcuggucaagaagcgcgaggagugccuggacgcccucgagagcaucaugaccaccaaguccgugagcuuccggcgccugucccaccuccggaagcuggugcccggcuucgggaaggccuacaccaucuucaacaagacgcugauggaggccgacgcgcacuacaagagcguccgcaccugguccgaggugauccccagcaagggcugccuguccgucgggggccggugccacccgcacgagaacggcguguucuucaacgggaucauccucggccccgacgggagcgugcugauccccgagaugcaguccagccugcuccagcagcacauggagcugcuggaguccagcgucaucccccucaugcacccgcuggccaaccccuccaccguguucaaggacggcgacgaggccgaggacuucguggagguccaccuccccgacgugcaggagcagaucagcgggguggaccugggccugcccaacuggggcaaguacgucaugaugagcgccggggcccuggcgauccucaugcugaccaucuuccugaugacgugcugccgccgggccaaccgcacccgguccacccagcgcgaccucggcgggcuggagcgcaaggugagcgugccgcccaaggacggccgggucauguccagcugggaguccuacaagagcgggggcgagaccucccuguga

SEQ ID NO: 95290 - RNA, 1575 nt, Artificial Sequence
  derived and/or modified CDS sequence (opt1) from glycoprotein__RABV__JQ595328.1
augaucacccaggcccugcuguucgugccccugcugaucagcucccucugccugggccaguucccgaucuacaccauccccgacaagcuggggcccuggagccccaucgacauccaccaccucuccugcccgaacaaccuggucguggaggacgagggcugcaacagccuguccggguucagcuacauggagcucaaggugggcuacaucuccagcaucaaggucaacggguucacgugcaccggcguggugaccgaggccgagaccuacacgaacuucgucggcuacgugaccaccaccuucaagcgcaagcacuuccggcccaugcccgacgcgugccgcgccgccuacuccuggaagauggccggggacccccgguacgaggagagccugcacacgccguaccccgacuaccacuggcugcgcaccgugaagaccaccaaggagucccucgucaucaucagccccuccguggccgaccuggaccccuacgacaagagccugcacucccggguguucagcggcgggaagugccucggcaucacgaucuccagcaccuacugcuccaccaaccacgacuacaccaucuggaugccggaggaggcgcgccuggggacgagcugcgacaucuucaccaacagcaagggcaagcgggccuccaagggcgggcggaccugcggcuucgucgacgagcgcgggcuguacaagagccucaagggcgccugcaagcugaagcugugcggcgugcccgggcuccgccugauggacggcaccuggguguccauccagacgagcgacgagaccaaguggugcccgcccgaccagcuggucaacauccacgacuuccgguccgacgagaucgagcaccucgugguggaggagcuggucaagaagcgcgaggagugccuggacgcccucgagagcaucaugaccaccaaguccgugagcuuccggcgccugucccaccuccggaagcucgugcccggguucggcaaggcguacacgaucuucaacaagacccugauggaggccgacgcccacuacaagagcguccgcaccuggaacgagaucauccccuccaaggggugccugagcgugggcggccggugccacccccacgugaacggggucuucuucaacggcaucauccucgggcccgacggcuccgugcugaucccggagaugcagagcucccugcuccagcagcacauggagcugcuggagagcuccgucaucccccucaugcacccccuggccaaccccagcaccguguucaaggacggggacgaggccgaggacuucguggagguccaccucccggacgugcaggagcaggucuccggcguggaccugggccugcccaacugggggaaguacgugcugaugagcgcgggcgugcucgccauccugauccugacgaucuuccucaugaucugcugccgccgggccaaccgcaccaagagcauccagcaggggcccggcgaguccgggcggaaggucagcgugcccccgcagaacggcaaggugaucuccagcugggaguccuucaagagcggcggggagacccgccuguga

SEQ ID NO: 95291 - RNA, 1575 nt, Artificial Sequence
  derived and/or modified CDS sequence (opt1) from glycoprotein__RABV__JQ647510.1
augaucccccaggugcugcuguucgucccgcugcugguguucagcuccugcuucggcaaguuccccaucuacaccauccccgacaagcucgggcccuggagcccgaucgacauccaccaccuguccugccccaacaaccugguggucgaggacgagggcugcaccaaccucagcggguucuccuacauggagcugaaggugggcuacaucagcgccaucaaggugaacggguucacgugcaccggcgucgugaccgaggccgagaccuacacgaacuucgugggcuacgucaccaccaccuucaagcgcaagcacuuccggcccaugcccgacgcgugccgcacggccuacaacuggaagauggccggggacccgcgguacgaggagucccugcacaaccccuaccccgacuaccacuggcuccgcaccgugaagaccaccaaggagagccuggugaucaucucccccagcgucgccgaccuggacccguacgacaagucccuccacagccggguguuccccggcgggaagugcuccggcaucacggugagcuccacccgcugcagcaccaaccacgacuacaccaucuggaugcccgagaacccccggcuggggacguccugcgacaucuucaccaacagccgcggcaagcgggccuccaagggcgggaagaccugcggcuucgucgacgagcgcgggcuguacaagagccucaagggcgcgugcaagcugaagcugugcggcgugcucgggcugcggcugauggacggcaccuggguggccauccagacgagcgacgagaucaaguggugcuccccggaccagcucgucaaccugcacgacuuccacagcgacgagaucgagcaccuggugguggaggagcucgucaagaagcgcgaggagugccuggacgcccuggagaccaucaugaccaccaaguccgugagcuuccggcgccucucccaccuccggaagcuggugcccggguucggcaaggccuacacgaucuucaacaagacccucauggaggcggacgcccacuacaagagcauccgcaccuggaacgagaucauccccuccaaggggugccugcgggucggcggccgcugccacccccacgugaacggggucuucuucaacggcaucauccuggggccggacggccacgugcucauccccgagaugcagagcucccugcugcaccagcacauggagcuccuggagagcuccgugaucccccugaugcacccccucgccgacccgagcaccgucuucaaggacggggacgaggccgaggacuucguggaggugcaccuccccgacguccacaagcagaucuccggcguggaccugggccugcccaacugggggaaguacgugcugaucagcgccggcucccugacggcgcucaugcugaugaucuuccugaugaccugcugccggaagaccaaccgcgccgagagcauccagcacucccccggggagaccggccggaaggucagcgugacgucccacaacgggcgcgugaucagcagcugggaguccuacaagagcggcggcgagaccaagcucuga

SEQ ID NO: 95292 - RNA, 1575 nt, Artificial Sequence
  derived and/or modified CDS sequence (opt1) from glycoprotein__RABV__JQ685892.1
augaucccccaggcccugcucuacgugccgcugcugaucagcucccucugcuucggcggguuccccaucuacaccauccccgacaagcugggccccuggagcccgaucgacauccaccaccuguccugccccaacaaccucgucguggaggacgaggggugcaccagccuguccggcuucagcuacauggagcugaaggugggguacaucuccgccaucaaggucaacggcuucacgugcaccggcguggugaccgaggcggagaccuacacgaacuucgucggguacgugaccaccaccuucaagcgcaagcacuuccggcccaugcccgacgccugccgcgccgccuacaacuggaagauggccggcgacccgcgguacgaggagagccuccagaaccccuaccccgacuacuccuggcugcgcacggugaagaccaccaaggagagccugaucaucaucucccccagcgucgcggaccucgacccguacgacaagucccugcacagccggguguuccccgggggcaagugccuggggaucaccaucuccagcacguacugcuccaccaaccacgacuacaccaucuggaugcccgaggaggcccgccucggcaccagcugcgacaucuucacgaacucccggggcaagcgcgccagcaagggcgggaagaccugcggguucguggacgagcggggccuguacaagagccugaagggcgccugcaagcucaagcugugcgggguccccggccugcgccucauggacgggaccugggugaccauccagacguccgacgagaccaaguggugcccgagcgaccagcuggugaaccugcacgacuuccacuccgacgagaucgagcaccucgucguggaggagcuggugaagaagcgggaggagugccuggacgcgcucgagagcaucaugaccaccaaguccgucagcuuccgccggcugucccaccuccgcaagcuggugcccggcuucgggaaggccuacacgaucuucaacaagacccugauggaggccgacgcccacuacaagagcauccggaccuggaacgagaucauccccuccaagggcugccugaaggugggcgggcgcugccacccccacgucgacggcguguucuucaacgggaucauccucggcccggacgggaacgugcugauccccgagaugcagagcucccugcuccagcagcacgucgagcugcuggagagcuccgugaucccccucaugcacccccuggccgacccgagcaccgucuucaaggacggcgacgaggcggaggacuucguggaggugcaccuccccgacauccacaagcaggucuccggcguggaccuggggcugcccaacuggggcaaguaccugcucaugagcgccggggcccuggccacgcugaugcucaucaucuuccugauggccugcugccggcgcgcgaaccggaccgaguccauccagcgcgaccccggcgagagcgggcggaagguguccaucccgagccaggacggcaaggucaucagcuccugggagcuguacaagagcggcggggagacccgccuguga

SEQ ID NO: 95293 - RNA, 1575 nt, Artificial Sequence
  derived and/or modified CDS sequence (opt1) from glycoprotein__RABV__JQ685893.1
augaucccccaggcccugcucuacgugccgcugcugauccccagccucugcuucggcggguuccccaucuacaccauccccgacaagcugggcccguggucccccaucgacauccaccaccugagcugccccaacaaccucgucguggaggacgaggggugcaccucccugagcggcuucuccuacauggagcugaaggugggguacaucagcgccaucaaggucaacggcuucacgugcaccggcguggugaccgaggcggagaccuacacgaacuucgucggguacgugaccaccaccuucaagcgcaagcacuuccggcccaugccggacgccugccgcgccgccuacaacuggaagguggccggcgacccccgguacgaggagucccuccagaaccccuaccccgacuacagcuggcugcgcacggucaagaccaccaaggagucccugaucaucaucagcccguccguggcggaccucgaccccuacgacaagagccugcacucccggguguuccccgggggcaagugccuggggaucaccaucagcuccacguacugcagcaccaaccacgacuacaccaucuggaugcccgaggaggcccgccucggcaccuccugcgacaucuucacgaacagccggggcaagcgcgccuccaagggcgggaagaccugcggguucgucgacgagcggggccuguacaagagccugaagggcgccugcaagcucaagcugugcggggugccgggccugcgccucauggacgggaccugggugaccauccagacgagcgacgagaccaaguggugccccuccgaccagcuggucaaccugcacgacuuccacagcgacgagaucgagcaccucgugguggaggagcuggucaagaagcgggaggagugccuggacgcgcucgaguccaucaugaccaccaagagcguguccuuccgccggcugagccaccuccgcaagcuggugcccggcuucgggaaggccuacacgaucuucaacaagacccugauggaggccgacgcccacuacaaguccauccggaccuggaacgagaucauccccagcaagggcugccugaaggucggcgggcgcugccacccgcacguggacggcguguucuucaacgggaucauccucggccccgacgggaacguccugauccccgagaugcaguccagccugcuccagcagcacguggagcugcuggaguccagcgucaucccccucaugcacccgcuggccgaccccuccaccguguucaaggacggcgacgaggcggaggacuucguggagguccaccuccccgacauccacaagcaggucagcggcguggaccuggggcugcccaacuggggcaaguaccugcucauguccgccggggcccuggccacgcugaugcucaccaucuuccugaugaccugcugccggcgcgccaaccggaccgagagcauccagcgcgacccgggcgaguccgggaagaaggugagcaucacgucccaggacggcaaggugaucagcagcugggagcuguacaaguccggcggggagacccggcuguga

SEQ ID NO: 95294 - RNA, 1575 nt, Artificial Sequence
  derived and/or modified CDS sequence (opt1) from glycoprotein__RABV__JQ685894.1
auguucccccaggcccuccuguucgugagccugcugaucuccagccucugcuucggcaaguuccccaucuacaccauccccgacaagcuggggcccuggucccccaucgacauccaccaccugagcugcccgaacaaccucgucguggaggacgagggcugcaccaaccuguccggguucagcuacauggagcugaaggugggcuacaucuccgccaucaaggucaacggguucacgugcaccggcguggugaccgaggcggagaccuacacgaacuucaucggcuacgucaccaccguguucaagcgcaagcacagccggcccacccccgacgccugccgcgccgccuacaacuggaagauggccggggacccccgguacgaggagucccuccacaacccguaccccgacuaccacuggcugcgcacggugaagaccaccaaggagagccuggucaucaucucccccagcguggcggaccucgaccccuacgacaagucccugcacagccggguguucccguccggcaagugcagcgggaucaccgucuccagcacguacugccugaccaaccacgaguacaccaucuggaugcccgagaaccuccgccugggcaccuccugcgacaucuucacgaacagccgggggaagcgcgccagccggggcuccaagaccugcggcuucguggacgagcgcgggcuguacaagagccucaagggcgccugcaagcugaagcugugcggggugcucggccugcggcugauggacggcaccugggucgccaugcagaccuccgacgagacgaaguggugcccgcccgaccagcucgugaaccugcacgacuuccgcagcgacgagaucgagcaccugguggucgaggagcucgugaagaagcgggaggagugccuggacgcgaucgaguccaucaugaccaccaagagcguguccuuccgccggcugagccaccuccgcaagcugguccccggguucggcaaggccuacaccaucuucaacaagacgcugauggaggccgacgcccacuacaaguccgugcggaccuggaacgagaucauccccagcaaggggugccuccgcgugggcgggcggugccacccccacgucaagggcguguucuucaacggcaucauccuggggcccgacggccacguccugaucccggagaugcaguccagccuccugcagcagcacauggagcugcucgaguccagcaucaucccccugaugcacccccuggccgaccccuccgcgguguucaaggacggggacgaggccgaggacuucguggagguccaccucccggacgugcacaagcaggucagcggcguggaccuggggcugcccaacuggggcaaguacauccucguguccgccggcgcccugaucgcccugaugcucaucaucuuccugaugaccugcuuccgcggguucaaccugcccaagagcacccagcacucccugggcgagacggagcggaagaugagcgugaccccgcagagcgggaagaucaucuccagcugggaguccuacaagagcggcggggagacccgccucuga

SEQ ID NO: 95295 - RNA, 1575 nt, Artificial Sequence
  derived and/or modified CDS sequence (opt1) from glycoprotein__RABV__JQ685896.1
augaucccccaggcccugcucuacgugccgcugcugaucagcucccucugcuucggcggguuccccaucuacaccauccccgacaagcugggccccuggagcccgaucgacauccaccaccuguccugccccaacaaccucgucguggaggacgaggggugcaccagccuguccggcuucagcuacauggagcugaaggugggguacaucuccgccaucaaggucaacggcuucacgugcaccggcguggugaccgaggcggagaccuacacgaacuucgucggguacgugaccaccaccuucaagcgcaagcacuuccggcccaugcccgacgccugccgcgccgccuacaacuggaagauggccggcgacccgcgguacgaggagagccuccagaaccccuaccccgacuacuccuggcugcgcacggugaagaccaccaaggagagccugaucaucaucucccccagcgucgcggaccucgacccguacgacaagucccugcacagccggguguuccccgggggcaagugccuggggaucaccaucuccagcacguacugcuccaccaaccacgacuacaccaucuggaugcccgaggaggcccgccucggcaccagcugcgacaucuucacgaacucccggggcaagcgcgccagcaagggcgggaagaccugcggguucguggacgagcggggccuguacaagagccugaagggcgccugcaagcucaagcugugcgggguccccggccugcgccucauggacgggaccugggugaccauccagacguccgacgagaccaaguggugcccgagcgaccagcuggugaaccugcacgacuuccacuccgacgagaucgagcaccucguccuggaggagcuggugaagaagcgggaggagugccucgacgcgcuggagagcaucaugaccaccaaguccgugagcuuccgccggcugucccaccuccgcaagcugguccccggcuucgggaaggccuacacgaucuucaacaagacccugauggaggccgacgcccacuacaagagcauccggaccuggaacgagaucauccccuccaagggcugccucaaggugggcgggcgcugccacccccacguggacggcgucuucuucaacgggaucauccugggcccggacgggaacgugcugauccccgagaugcagagcucccuccugcagcagcacguggagcugcucgagagcuccgucaucccccugaugcacccccuggccgacccgagcaccguguucaaggacggcgacgaggcggaggacuucgucgaggugcaccuccccgacauccacaagcaggucuccggcguggaccuggggcugcccaacuggggcaaguaccuccugaugagcgccggggcccuggccacgcucaugcugaucaucuuccugauggccugcugccggcgcgcgaaccccaccgaguccauccagcgggacccgggcgagagcgggcgcaagguguccauccccagccaggacggcaaggugaucagcuccugggagcuguacaagagcggcggggagacccggcucuga

SEQ ID NO: 95296 - RNA, 1575 nt, Artificial Sequence
  derived and/or modified CDS sequence (opt1) from glycoprotein__RABV__JQ685897.1
augaucccccaggcccugcucuacgugccgcugcugaucagcucccucugcuucggcggguuccccaucuacaccauccccgacaagcugggccccuggagcccgaucgacauccaccaccuguccugccccaacaaccucgucguggaggacgaggggugcaccagccuguccggcuucagcuacauggagcugaaggugggguacaucuccgccaucaaggucaacggcuucacgugcaccggcguggugaccgaggcggagaccuacacgaacuucgucggguacgugaccaccaccuucaagcgcaagcacuuccggcccaugcccgacgccugccgcgccgccuacaacuggaagguggccggcgacccgcgguacgaggagagccuccagaaccccuaccccgacuacuccuggcugcgcacggucaagaccaccaaggagagccugaucaucaucucccccagcguggcggaccucgacccguacgacaagucccugcacagccggguguuccccgggggcaagugccuggggaucaccaucuccagcacguacugcuccaccaaccacgacuacaccaucuggaugcccgaggaggcccgccucggcaccagcugcgacaucuucacgaacucccggggcaagcgcgccagcaagggcgggaagaccugcggguucgucgacgagcggggccuguacaagagccugaagggcgccugcaagcucaagcugugcggggugcccggccugcgccucauggacgggaccugggugaccauccagacguccgacgagaccaaguggugcccgagcgaccagcuggucaaccugcacgacuuccacuccgacgagaucgagcaccucgugguggaggagcuggucaagaagcgggaggagugccuggacgcgcucgagagcaucaugaccaccaaguccgugagcuuccgccggcugucccaccuccgcaagcuggugcccggcuucgggaaggccuacacgaucuucaacaagacccugauggaggccgacgcccacuacaagagcauccggaccuggaacgagaucauccccuccaagggcugccugaaggucggcgggcgcugccacccccacguggacggcguguucuucaacgggaucauccucggcccggacgggaacguccugauccccgagaugcagagcucccugcuccagcagcacguggagcugcuggagagcuccgucaucccccucaugcacccccuggccgacccgagcaccguguucaaggacggcgacgaggcggaggacuucguggagguccaccuccccgacauccacaagcaggucuccggcguggaccuggggcugcccaacuggggcaaguaccugcucaucagcgccggggcccuggccacgcugaugcucaccaucuuccugaugaccugcugccggcgcgccaaccggaccgaguccauccagcgcgaccccggcgagccggggaagaaggugagcaucacgucccaggacggcaaggugaucagcagcugggagcuguacaaguccggcggggagacccggcuguga

SEQ ID NO: 95297 - RNA, 1575 nt, Artificial Sequence; identical to SEQ ID NO: 95292
  derived and/or modified CDS sequence (opt1) from glycoprotein__RABV__JQ685898.1

SEQ ID NO: 95298 - RNA, 1575 nt, Artificial Sequence
  derived and/or modified CDS sequence (opt1) from glycoprotein__RABV__JQ685899.1
auggugccccaggcccugcuguucgucccgcugcugguguuccccagcugccugggcaaguuccccaucuacaccauccccgacaagcuggggccguggucccccaucgacauccaccaccugagcugccccaacaaccucguggucgaggacgagggcugcaacaaccuguccggguucagcuacauggagcugaaggugggcuacaucuccgccaucaaggugaacggguucacgugcaccggcgucgugaccgaggcggagaccuacaccaacuucgugggcuacgucacgaccaccuucaagcgcaagcacuuccggcccaccccggacgccugccgcgccgccuacaacuggaagauggccggggacccccgguacgaggagagccuccacacgcccuaccccgacuaccacuggcugcgcaccgugaagaccaccaaggagucccuggugaucaucagcccguccgucgcggaccucgaccccuacgacaagagccugcacucccggguguuccccagcggcaagugcuccgggaugacggugagcuccacgugcugcagcaccaaccacgacuacaccaucuggaugcccgagaacccgcgccugggcaccuccugcgacaucuucaccaacagccgggggaagcgcgccuccaagggcagcaagaccugcggcuucgucgacgagcgggggcucuacaagagccugaagggcgccugcaagcugaagcucugcggggugcugggccugcgccucauggacggcaccuggguggccaugcagaucuccgacgagacgaaguggugcccgcccgaccagcuggucaaccugcacgacuuccggagcgacgagaucgagcaccucgugguggaggagcuggucaagaagcgcgaggagugccuggacgcgcucgaguccaucaugaccaccaagagcguguccuuccggcgccugagccaccuccggaagcucgugcccggguucggcaaggccuacaccaucuucaaccgcacgcugauggaggccgacgcccacuacaaguccguccggaccuggaacgaggugauccccagcaaggggugccugcgcgucggcgggcggugccacccccacgugaacggcguguucuucaacggcaucauccucgggcccgacggccacguccugauccccgagaugcaguccagccugcuccagcagcacauggagcugcuggaguccagcgugaucccgcucaugcacccccuggccaaccccuccaccguguucaaggagggggacgaggcggaggacuucgucgaggugcaccuccccgacgugcacaagcaggucagcggcguggaccuggggcugccgaacuggggcaaguacgugcugauguccgccggcgcccucaucgcccugaugcugaucaucuuccucaugaccugcugccgccgggucagccgccccgaguccaugcagcgcagccucgggggcacggggcggaagguguccgccgcgagccagagcggcaaggugaucuccagcugggaguccuacaagagcgggggcgagacccgccuguga

SEQ ID NO: 95299 - RNA, 1575 nt, Artificial Sequence
  derived and/or modified CDS sequence (opt1) from glycoprotein__RABV__JQ685900.1
augaucccccaggcccugcuguucgugccgcugcugauccccagccucugccugggcgaguuccccaucuacaccauccccgacaagcuggggccguggauccccaucgacauccaccaccucuccugccccaacaaccuggucgccgagaacgacggcugcaacagccuguccggguucagcuacauggagcucaaggugggcuacaucuccgcgaucaaggugaacggguucacgugcaccggcgucgugaccgaggccgagaccuacaccaacuucgugggcuacgucacgaccaccuucaagcgcaagcacuuccggcccaugccggacgccugccgcgccgcccacgacuggaagauggcgggggacccccgguacgaggacagccugcagaaccccuaccccgacuaccacuggcugcgcaccgugaagacgaccaaggagucccucgugaucaucagcccguccgucgccgaccuggaccccuacgacaagagccugcacucccggguguuccccagcggcaagugccucgggaucaccguguccagcaccuacugcuccacgaaccacgacuacaccaucuggaugcccgucgagccgcgccugggcaccagcugcgacaucuucaccaacucccgggggaagcgcgccagcaagggcggcaaggugugcggguucguggacgagcggggccuguacaagucccucaagggggccugcaagcugaagcugugcggcguccccggcauccgccucauggacgggacgugggugagcauccagaccagcgaggacaucaaguggugcccgcccgaccggcuggugaaccugcacgacuuccacuccgacgagaucgagcaccucgucguggaggagcugaucaagcgccgggagaacugccuggacgcgcucgagagcaucaugaccaccaaguccgugagcuuccgccggcugucccaccuccgcaagcucguccccggcuucgggaaggccuacacgaucuucaacaagacccugauggaggccgacgcccacuacaagagcgugaagaccuggaacgaggugauccccuccaagggcugccuggaggucgggggccggugccacccgcccgugaacggcgucuucuucaacgggaucauccucggccccgacgggaacgugcugauccccgagaugcagagcucccugcuccagcagcacauggagcugcuggagagcuccgugaucccccucaugcacccccuggccgacccgagcaccgucuucaaggagggcgacgaggcggaggacuucguggaggugcaccuccccgacguccacaagcaggucuccgacguggaccuggggcugcccagcuggggcaaguaccugcucauguccgccggcgcccuggccauccugauccucgccaucgugcugaucaucugcugccgccgggugaacaagacggggagcacccagcgcggccaccgggaguccgggggcaagaugagcguggcgccgcagaacgggaagaucaucuccagcugggagcuguacaagagcgaguccgagaccggccuguga

SEQ ID NO: 95300 - RNA, 1575 nt, Artificial Sequence
  derived and/or modified CDS sequence (opt1) from glycoprotein__RABV__JQ685901.1
auggugcccuggguccuccucuucgugccguuccugaucagcucccugugcuucggcaaguuccccaucuacaccauccccgacaagcucgggcccuggagcccgaucgacauccaccaccuguccugccccaacaaccugguggucgaggacgagggcugcaacagccucuccggguucagcuacauggagcugaaggugggcuacaucuccgccaucaaggugaacggguucacgugcaccggcgucgugaccgaggccgagaccuacaccaacuucgugggcuacgucaccaccaccuucaagcgcaagcacuuccggcccaugcccgacgcgugccgcagcgccuacaacuggaagauggccggggacccgcgguacgaggagucccugcacaaccccuaccccgacuaccacuggcuccgcaccgugaagacgaccaaggagagccugaucaucaucucccccagcguggccgaccuggacccguacgacaagucccuccacagccggaucuuccccggcgggaagugcaccggccugaccgucuccagcacguacugcuccaccaaccacgacuacaccaucuggaugcccgagaaggccgggcugggcaccagcugcgacaucuucacgaacuccaagggcaagcgcgcgagcaagggcgggaagaccugcggguucguggacgagcggggccucuacaagagccugaagggcgccugcaagcugaagcucugcgggguguccggccugcgccugauggacgggaccugggucgccauccagacccucgacgagacgaaguggugcagccccgaccagcuggugaaccugcacgacuuccacuccgacgagcucgagcaccugguggucgaggagcuggugcggaagcgcgaggagugccucgacgcccuggagagcaucaugaccaccaaguccgugagcuuccggcgccugucccaccuccggaagcuggucccgggcuucgggaaggcguacaccaucuucaacaagacgcugauggaggccgacgcccacuacaagagcgugcgcaccugguccgagaucauccccagcaagggcugccuccgggugggcgggcgcugccacccccacgucaacggcguguucuucaacgggaucauccugggccccgacgggcacguccugaucccggagaugcaguccagccuccugcagcagcacguggagcugcucgaguccagcgugaucccccugaugcacccccuggccgaccccuccgccgucuucaaggacggcgacgaggcggaggacuucguggaggugcaccucccggacguccacaagcagaucagcggcguggaccuggggcugcccuccuggggcaaguacaugcucaugaucgccggggcccugaugacccugaugcuguucaucuuccugaugaccugcugccggcgcgugaaccggacggagagcauccgccagggcccccgggagcuggaguccaaggucagcgugacgccccagaaccgcaaggugaucagcuccugggagagcuacaaguccgggggcgagaccaagcuguga

SEQ ID NO: 95301 - RNA, 1575 nt, Artificial Sequence
  derived and/or modified CDS sequence (opt1) from glycoprotein__RABV__JQ685902.1
augaucccccaggcccuccuguucgugccgcugcugauccccagccucugccugggcgaguuccccaucuacaccauccccgacaagcuggggccguggucccccaucgacauccaccaccucagcugccccaacaaccuggucgccgagaacgacggcugcaccucccugagcggguucuccuacauggagcucaaggugggcuacaucagcgcgaucaaggugaacggguucacgugcaccggcgucgugaccgaggccgagaccuacacgaacuucgugggcuacgucaccaccaccuucaagcgcaagcacuuccggcccacgccggacgccugccgcgccgcccacgacuggaagauggcgggggacccccgguacgaggccucccugcagaaccccuaccccgacuaccacuggcugcgcaccgugaagaccaccaaggagagccucgugaucaucuccccgagcgucgccgaccuggaccccuacgacaagucccugcacagccggguguuccccuccggcaagugccucgggaucacggugagcuccaccuacugcagcaccaaccacgacuacaccaucuggaugcccgucgagccgcgccugggcacguccugcgacaucuucaccaacagccgggggaagcgcgccuccaagggcggccgggugugcggguucguggacgagcgcggccuguacaagagccucaagggggcgugccggcugaagcugugcggcguccccggcauccgccuccuggacgggaccugggugagcauccagaccuccgaggacaucaaguggugcccgcccgaccggcuggugaaccuccacgacuuccacagcgacgagaucgagcaccuggucguggccgagcugaucaagcgccgggagaacugccucgacgcccuggaguccaucaugacgaccaagagcgugaccuuccgccggcugacccaccuccgcaagcugguccccggcuucgggaaggccuacacgaucuucaacaagacccugauggaggccgacgcgcacuacaaguccgugaagaccuggaacgaggugauccccagcaagggcugccucgaggucgggggccggugccacccccacgugaacggcgucuucuucaacgggaucauccugggccccgacgggaacgugcugaucccggagaugcaguccagccuccugcagcagcacauggagcugcucgaguccagcgugaucccccugaugcacccccuggccgaccccuccaccgucuucaaggagggcgacgaggccgaggacuucguggaggugcaccucccggacguccacaagcaggucagcgacguggaccuggggcugcccuccuggggcaaguaccuccugaucagcgccggcgcccuggcgauccucauccuggccaucgugcugaucaucugcugccgccgggugaacaagacgggguccacccagcgcggccaccgcgagagcgggggcaagauguccguggucccccagaacgggaagaucaucagcuccugggagcuguacaagagcgagagcgagaccggccucuga

SEQ ID NO: 95302 - RNA, 1575 nt, Artificial Sequence
  derived and/or modified CDS sequence (opt1) from glycoprotein__RABV__JQ685903.1
augauccugcaggcccuccuguucgugccccugcucaucagcucccugugcuucggcggguucccgaucuacaccauccccgacaagcugggccccuggagccccaucgacauccaccaccucuccugcccgaacaaccuggucguggaggacgaggggugcaccagccuguccggcuucagcuacauggagcucaaggugggguacaucuccgccaucaaggucaacggcuucacgugcaccggcguggugaccgaggcggagaccuacacgaacuucgucggguacgugaccaccaccuucaagcgcaagcacuuccggcccaugcccgacagcugccgcgccgccuacaacuggaagacggccggcgacccccgguacgaggagucccugcagaacccguaccccgacuaccacuggcugcgcaccgugaagaccaccaaggagagccucaucaucaucucccccagcgucgccgaccuggaccccuacgacaagucccugcacagccggguguuccccgggggcaagugccucgggaucacgguguccagcaccuacugcuccaccaaccacgacuacaccaucuggaugccggaggaggcgcgccugggcacgagcugcgacaucuucaccaacucccggggcaagcgcgccagcaagggcgggcggaccugcggguucgucgacgagcgcggccuguacaagagccucaagggcgccugcaagcugaagcugugcggggugcucggccugcggcugauggacgggaccugggugacgauccacaccuccaacgagaccaaguggugccccagcgaccagcucgucaaccugcacgacuuccacuccgacgagaucgagcaccuggugguggaggagcucgucaagaagcgcgaggagugccuggacgcccuggagagcaucaugaccacgaaguccgugagcuuccggcgccucucccaccuccggaagcuggugcccggcuucgggaaggcguacaccaucuucaacaagacccugauggaggccgacgcccacuacaagagcauccgcaccuggaacgagaucaucccguccaagggcugccugaaggucggcgggcggugccacccccacguggacggcguguucuucaacgggaucauccugggccccgacgggaacguccucauccccgagaugcagagcucccugcugcagcagcacguggagcuccuggagagcuccgucaucccgcugaugcacccccucgccgaccccagcacgguguucaaggacggcgacgaggccgaggacuucguggagguccaccuccccgacgugcacaagcaggucuccggcguggaccuggggcugccgaacuggggcaaguaccugcugaugagcgcgggggugcucgccacccugaugcugaccaucuuccugaucacgugcugccgccggguggaccgcaccgaguccauccagcggggccccggggagcucggccgcgagaugagcgucaccucccagaacggcaaggugaucagcagcugggagcuguacaaguccgggggcgagacccgccuguga

SEQ ID NO: 95303 - RNA, 1575 nt, Artificial Sequence
  derived and/or modified CDS sequence (opt1) from glycoprotein__RABV__JQ685905.1
augaucuuccaggcccugcuguucgugccccugcugaucagcucccucugccugggcaaguucccgaucuacaccauccccgacaagcuggggcccuggagccccaucgacauccaccaccucuccugcccgaacaaccuggucguggaggacgagggcugcaccagccuguccggguucagcuacauggagcucaaggugggcuacaucuccgccaucaaggucaacggguucacgugcaccggcguggugaccgaggcggagaccuacacgaacuucgucggcuacgugaccaccaccuucaagcgcaagcacuuccggcccauccccgacgccugccgcgccgccuacaacuggaagaucgccggggacccccgguacgaggagagccugcagaacccguaccccgacuaccacuggcugcgcacggugaagaccaccaaggagucccucaucaucaucagccccuccgucgcggaccuggaccccuacgacaagagccugcacucccgccucuucccgggcgggaagugccugggcaucaccaucagcuccacguacugcagcaccaaccacgacuacaccaucuggaugcccgaggagccccggcuggggaccuccugcgacaucuucacgaacagcaagggcaagaaggccuccaagggcgggaaggugugcggcuucguggacgagcgggggcucuacaagagccugaagggcgccugcaagcugaagcucugcggcgucagcgggcugcgccugauggacggcaccugggugaccauccagaccuccgacgagacgaaguggugcccgcccgaccagcucgugaaccugcacgacuuccacagcgacgagaucgagcaccuggucguggaggagcucgugaagaagcgggaggagugccuggacgcccuggaguccaucaugaccaccaagagcgucuccuuccgccggcucagcuaccugcgcaagcuggugcccggguucggcaaggcguacaccaucuucaacaagacgcucauggaggccgacgcccacuacaaguccgugcggaccuggaacgagaucauccccagcaaggggugccugaaggucuccgaccgcugccacccccacguggacggcguguucuucaacggcaucauccuggggccggacggcaacguccucauccccgagaugcagagcucccugcugcagcagcacauggagcuccuggagagcuccgugaucccccugaugcacccccucgccgacccgagcaccgucuucaaggacggggacgaggccgaggacuucguggaggugcaccuccccgacguccacaagcagaucuccggcguggaccuggggcuccccagcuggggcaaguaccugcugaugaucgcgggcgggcucgccacccuggugcugaucaucuuccugauggccugcugccggcgcacgaagcggaccgagucccgccggcgcggcagcggggaguccggcgagaagguccucgccaccccgcagcccaagaagguggugagcagcugggagcuguacaagcgggagggggacgcccgccuguga

SEQ ID NO: 95304 - RNA, 1575 nt, Artificial Sequence
  derived and/or modified CDS sequence (opt1) from glycoprotein__RABV__JQ685906.1
augaucccccaggcccugcucuacgugccgcugcugauccccagccucugcuucggcggguuccccaucuacaccauccccgacaagcugggcccguggucccccaucgacauccaccaccugagcugccccaacaaccucgucguggaggacgaggggugcaccucccugagcggcuucuccuacauggagcugaaggugggguacaucagcgccaucaaggucaacggcuucacgugcaccggcguggugaccgaggcggagaccuacacgaacuucgucggguacgugaccaccaccuucaagcgcaagcacuuccggcccaugccggacgccugccgcgccgccuacaacuggaagguggccggcgacccccgguacgaggagucccuccagaaccccuaccccgacuacagcuggcugcgcacggucaagaccaccaaggagucccugaucaucaucagcccguccguggcggaccucgaccccuacgacaagagccugcacucccggguguuccccgggggcaagugccuggggaucaccaucagcuccacguacugcagcaccaaccacgacuacaccaucuggaugcccgaggaggcccgccucggcaccuccugcgacaucuucacgaacagccggggcaagcgcgccuccaagggcgggaagaccugcggguucgucgacgagcggggccuguacaagagccugaagggcgccugcaagcucaagcugugcggggugccgggccugcgccucauggacgggaccugggugaccauccagacgagcgacgagaccaaguggugccccuccgaccagcuggucaaccugcacgacuuccacagcgacgagaucgagcaccucgugguggaggagcuggucaagaagcgggaggagugccuggacgcgcucgaguccaucaugaccaccaagagcguguccuuccgccggcugagccaccuccgcaagcuggugcccggcuucgggaaggccuacacgaucuucaacaagacccugauggaggccgacgcccacuacaaguccauccggaccuggaacgagaucauccccagcaagggcugccugaaggucggcgggcgcugccacccgcacguggacggcguguucuucaacgggaucauccucggccccgacgggaacguccugauccccgagaugcaguccagccugcuccagcagcacguggagcugcuggaguccagcgucaucccccucaugcacccgcuggccgaccccuccaccguguucaaggacggcgacgaggcggaggacuucguggagguccaccuccccgacauccacaagcaggucagcggcguggaccuggggcugcccaacuggggcaaguaccugcucauguccgccggggcccuggccacgcugaugcucaccaucuuccugaugaccugcugccggcgcgccaaccggaccgagagcauccagcgcgacccgggcgaguccgggaagaaggugagcacgaccucccaggacggcaaggugaucagcagcugggagcuguacaaguccggcggggagacccggcuguga

SEQ ID NO: 95305 - RNA, 1575 nt, Artificial Sequence
  derived and/or modified CDS sequence (opt1) from glycoprotein__RABV__JQ685907.1
augaucccccaggcccugcucuacgugccgcugcugaucagcucccucugcuucggcggguuccccaucuacaccauccccgacaagcugggccccuggagcccgaucgacauccaccaccuguccugccccaacaaccucgucguggaggacgaggggugcaccagccuguccggcuucagcuacauggagcugaaggugggguacaucuccgccaucaaggucaacggcuucacgugcaccggcguggugaccgaggcggagaccuacacgaacuucgucggguacgugaccaccaccuucaagcgcaagcacuuccggcccaugcccgacgccugccgcgccgccuacaacuggaagaucgccggcgacccgcgguacgaggagagccuccagaaccccuaccccgacuacuccuggcugcgcacggugaagaccaccaaggagagccugaucaucaucucccccagcgucgcggaccucgacccguacgacaagucccugcacagccggguguuccccgggggcaagugccuggggaucaccaucuccagcacguacugcuccaccaaccacgacuacaccaucuggaugcccgaggaggcccgccucggcaccagcugcgacaucuucacgaacucccggggcaagcgcgccagcaagggcgggaagaccugcggguucguggacgagcggggccuguacaagagccugaagggcgccugcaagcucaagcugugcgggguccccggccugcgccucauggacgggaccugggugaccauccagacguccgacgagaccaaguggugcccgagcgaccagcuggugaaccugcacgacuuccacuccgacgagaucgagcaccucgucguggaggagcuggugaagaagcgggaggagugccuggacgcgcucgagagcaucaugaccaccaaguccgucagcuuccgccggcugucccaccuccgcaagcuggugcccggcuucgggaaggccuacacgaucuucaacaagacccugauggaggccgacgcccacuacaagagcauccggaccuggaacgagaucauccccuccaagggcugccugaaggugggcgggcgcugccacccccacgucgacggcguguucuucaacgggaucauccucggcccggacgggaacgugcugauccccgagaugcagagcucccugcuccagcagcacgucgagcugcuggagagcuccgugaucccccucaugcacccccuggccgacccgagcaccgucuucaaggacggcgacgaggcggaggacuucguggaggugcaccuccccgacauccacaagcaggucuccggcguggaccuggggcugcccaacuggggcaaguaccugcucaugagcgccggggcccuggccacgcugaugcucaucaucuuccugauggccugcugccggcgcgcgaaccggaccgaguccauccagcgcgaccccggcgagagcgggcggaagguguccaucccgagccaggacggcaaggucaucagcuccugggagcuguacaagagcggcggggagacccgccuguga

SEQ ID NO: 95306 - RNA, 1575 nt, Artificial Sequence
  derived and/or modified CDS sequence (opt1) from glycoprotein__RABV__JQ685909.1
augaucccccaggcccugcucuacgugccgcugcugaucagcucccucugcuucggcggguuccccaucuacaccauccccgacaagcugggccccuggagcccgaucgacauccaccaccuguccugccccaacaaccucgucguggaggacgaggggugcaccagccuguccggcuucagcuacauggagcugaaggugggguacaucuccgccaucaaggucaacggcuucacgugcaccggcguggugaccgaggcggagaccuacacgaacuucgucggguacgugaccaccaccuucaagcgcaagcacuuccggcccaugcccgacgccugccgcgccgccuacaacuggaagauggccggcgacccgcgguacgaggagagccuccagaaccccuaccccgacuacuccuggcugcgcacggugaagaccaccaaggagagccugaucaucaucucccccagcgucgcggaccucgacccguacgacaagucccugcacagccggguguuccccgggggcaagugccuggggaucaccaucuccagcacguacugcuccaccaaccacgacuacaccaucuggaugcccgaggaggcccgccucggcaccagcugcgacaucuucacgaacucccggggcaagcgcgccagcaagggcgggaagaccugcggguucguggacgagcggggccuguacaagagccugaagggcgccugcaagcucaagcugugcgggguccccggccugcgccucauggacgggaccugggugaccauccagacguccgacgagaccaaguggugcccgagcgaccagcuggugaaccugcacgacuuccacuccgacgagaucgagcaccucgucguggaggagcuggugaagaagcgggaggagugccuggacgcgcucgagagcaucaugaccaccaaguccgucagcuuccgccggcugucccaccuccgcaagcuggugcccggcuucgggaaggccuacacgaucuucaacaagacccugauggaggccgacgcccacuacaagagcauccggaccuggaacgagaucauccccuccaagggcugccugaaggugggcgggcgcugccacccccacgucgacggcguguucuucaacgggaucauccucggcccggacgggaacgugcugauccccgagaugcagagcucccugcuccagcagcacgucgagcugcuggagagcuccgugaucccccucaugcacccccuggccgacccgagcaccgucuucaaggacggcgacgaggcggaggacuucguggaggugcaccuccccgacauccacaagcaggucuccggcguggaccuggggcugcccaacuggggcaaguaccugcucaugagcgccggggcccuggccacgcugaugcucaccaucuuccugaugaccugcugccggcgcgccaaccggaccgaguccauccagcgcgaccccggcgagagcgggcggaagguguccaucacgagcccggacggcaaggucaucagcuccugggagcuguacaagagcggcggggagaccggccuguga

SEQ ID NO: 95307 - RNA, 1575 nt, Artificial Sequence
  derived and/or modified CDS sequence (opt1) from glycoprotein__RABV__JQ685910.1
augaucccccaggccuuccuguucgugccgcuccugauccccagccugugccucggcgaguuccccaucuacaccauccccgacaagcuggggccguggucccccaucgacauccaccaccugagcugccccaacaaccucgucgccgagaacgacggcugcaccucccugagcggguucuccuacauggagcugaaggugggcuacaucagcgcgaucaaggugaacggguucacgugcaccggcgucaugaccgaggccgagaccuacacgaacuucgugggcuacgugaccaccaccuucaagcgcaagcacuuccggcccaugccggacgccugccgcgccgcccacgacuggaagaucgcgggggacccccgguacgaggacucccuccagaaccccuaccccgacuaccacuggcugcgcacggucaagaccaccaaggagagccuggugaucaucuccccgagcguggccgaccucgaccccuacgacaagucccugcacagccgggucuuccccuccggcaagugccuggggaucaccgugagcuccacguacugcagcaccaaccacgacuacaccaucuggaugcccguggagccgcgccucggcaccuccugcgacaucuucacgaacagccgggggaagcgcgccuccaagggcggccgggucugcggguucguggacgagcgcggccuguacaagagccugaagggggccugcaagcucaagcugugcggcgugcccggcauccggcugauggacgggaccugggucagcauccagaccuccgaggagaucaaguggugcccgcccgaccgccucgugaaccugcacgacuuccacagcgacgagaucgagcaccugguggucgaggagcucaucaagcggcgcgagaacugccuggacgcgcuggaguccaucaugaccaccaagagcguguccuuccggcgccucagccaccuccggaagcuggugcccggcuucgggaaggccuacacgaucuucaacaagacccugauggaggccgacgcccacuacaaguccgucaagaccuggaacgaggugauccccagcaagggcugccuggaggucgggggccgcugccacccgcccgugaacggcguguucuucaacgggaucauccugggccccgacgggaacguccucauccccgagaugcaguccagccugcugcagcagcacauggagcuccuggaguccagcgugaucccccugaugcacccccucgccgacccguccacgguguucaaggagggcgacgaggcggaggacuucgucgaggugcaccuccccgacgugcacaagcaggucagcgacguggaccuggggcugcccuccuggggcaaguaccugcugaugagcgccggcgcccucgccauccugauccuggugaucguccucaucaucugcugccggcgcgugaacaagaccggguccacccagcggggccaccgcgagagcgggggcaagauguccguggccccgcagaacgggaagaucaucagcagcugggagcuguacaaguccgagagcgagaccggccuguga

SEQ ID NO: 95308 - RNA, 1575 nt, Artificial Sequence
  derived and/or modified CDS sequence (opt1) from glycoprotein__RABV__JQ685911.1
augaucccccaggcccugcucuacgugccgcugcugauccccagccucugcuucggcggguuccccaucuacaccauccccgacaagcugggcccguggucccccaucgacauccaccaccugagcugccccaacaaccucgucguggaggacgaggggugcaccucccugagcggcuucuccuacauggagcugaaggugggguacaucagcgccaucaaggucaacggcuucacgugcaccggcguggugaccgaggcggagaccuacacgaacuucgucggguacgugaccaccaccuucaagcgcaagcacuuccggcccaugccggacgccugccgcgccgccuacaacuggaagguggccggcgacccccgguacgaggagucccuccagaaccccuaccccgacuacagcuggcugcgcacggucaagaccaccaaggagucccugaucaucaucagcccguccguggcggaccucgaccccuacgacaagagccugcacucccggguguuccccgggggcaagugccuggggaucaccaucagcuccacguacugcagcaccaaccacgacuacaccaucuggaugcccgaggaggcccgccucggcaccuccugcgacaucuucacgaacagccggggcaagcgcgccuccaagggcgggaagaccugcggguucgucgacgagcggggccuguacaagagccugaagggcgccugcaagcucaagcugugcggggugccgggccugcgccucauggacgggaccugggugaccauccagacgagcgacgagaccaaguggugccccuccgaccagcuggucaaccugcacgacuuccacagcgacgagaucgagcaccucgugguggaggagcuggucaagaagcgggaggagugccuggacgcgcucgaguccaucaugaccaccaagagcguguccuuccgccggcugagccaccuccgcaagcuggugcccggcuucgggaaggccuacacgaucuucaacaagacccugauggaggccgacgcccacuacaaguccauccggaccuggaacgagaucauccccagcaagggcugccugaaggucggcgggcgcugccacccgcacguggacggcguguucuucaacgggaucauccucggccccgacgggaacguccugauccccgagaugcaguccagccugcuccagcagcacguggagcugcuggaguccagcgucaucccccucaugcacccgcuggccgaccccuccaccguguucaaggacggcgacgaggcggaggacuucguggagguccaccuccccgacauccacaagcaggucagcggcguggaccuggggcugcccaacuggggcaaguaccugcucauguccgccggggcccuggccacgcugaugcucaccaucuuccugaugaccugcugccggcgcagcaaccggaccgaguccauccagcgcgacccgggcgagagcgggaagaagguguccaucacgagccaggacggcaaggugaucagcuccugggagcuguacaagagcggcggggagacccggcuguga

SEQ ID NO: 95309 - RNA, 1575 nt, Artificial Sequence; identical to SEQ ID NO: 95292
  derived and/or modified CDS sequence (opt1) from glycoprotein__RABV__JQ685912.1

SEQ ID NO: 95310 - RNA, 1575 nt, Artificial Sequence; identical to SEQ ID NO: 95292
  derived and/or modified CDS sequence (opt1) from glycoprotein__RABV__JQ685913.1

SEQ ID NO: 95311 - RNA, 1575 nt, Artificial Sequence
  derived and/or modified CDS sequence (opt1) from glycoprotein__RABV__JQ685914.1
augaucccccaggcccuccuguucgugccgcugcugaucagcucccucugcuucggcggguuccccaucuacaccauccccgacaagcugggccccuggagcccgaucgacauccaccaccuguccugccccaacaaccucgucguggaggacgaggggugcaccagccuguccggcuucagcuacauggagcugaaggugggguacaucuccgccaucaaggucaacggcuucacgugcaccggcguggugaccgaggcggagaccuacacgaacuucgucggguacgugaccaccaccuucaagcgcaagcacuuccggcccaugcccgacagcugccgcgccgccuacaacuggaagacggccggcgacccgcgguacgaggagucccuccagaaccccuaccccgacuaccacuggcugcgcaccgugaagaccaccaaggagagccugaucaucaucucccccagcgucgccgaccucgacccguacgacaagucccugcacagccggguguuccccgggggcaagugccuggggaucacgguguccagcaccuacugcuccaccaaccacgacuacaccaucuggaugcccgaggaggcgcgccucggcacgagcugcgacaucuucgccaacucccggggcaagcgcgccagcaagggcgggcggaccugcggguucgucgacgagcgcggccuguacaagagccugaagggcgccugcaagcucaagcugugcggggugcugggccuccggcugauggacgggaccugggcgaccauccacacguccaacgagaccaaguggugccccagcgaccagcuggugaaccuccacgacuuccacuccgacgagaucgagcaccuggucguggaggagcuggugaagaagcgcgaggagugccucgacgcccuggagagcaucaugaccaccaaguccgucagcuuccggcgccugucccaccuccggaagcuggugccgggcuucgggaaggccuacacgaucuucaacaagacccugauggaggccgacgcccacuacaagagcauccgcaccuggaacgagaucauccccuccaagggcugccucaaggugggcgggcggugccacccccacgucgacggcguguucuucaacgggaucauccugggccccgacgggaacgugcugaucccggagaugcagagcucccuccugcagcagcacgucgagcugcucgagagcuccgugaucccccugaugcacccccuggcggaccccagcaccgucuucaaggacggcgacgaggccgaggacuucguggaggugcaccucccggacguccacaagcaggucuccggcguggaccuggggcugcccaacuggggcaaguaccuccugaugagcgccggggcccuggccacgcucaugcugaccaucuuccugaucacgugcugccgccggguggacaagaccgaguccauccagcgcggccccggggagcugggccgggaggugagcgugaccucccagaacggcaaggucaucagcagcugggagcucuacaaguccgggggcgagacccgccuguga

SEQ ID NO: 95312 - RNA, 1575 nt, Artificial Sequence
  derived and/or modified CDS sequence (opt1) from glycoprotein__RABV__JQ685915.1
augauccugcaggcccuccugcugcucccccugcugaucagcuccuggugccucggcaaguucccgaucuacaccauccccgacaagcuggggcccuggagccccaucgacauccaccaccuguccugcccgaacaaccucguggucgaggacgagggcugcaccagccuguccggguucagcuacauggagcugaaggugggcuacaucuccgccaucaaggugaacggguucacgugcaccggcgucgugaccgaggcggagaccuacacgaacuucgugggcuacgucaccaccaccuucaagcgcaagcacuuccggcccaugcccgacgccugccgcgccgcccacgaguggaagauggccggggacccccgguacgaggacagccuccagaacccguaccccgacuaccacuggcugcgcacggugaagaccaccaaggagucccugaucaucaucagccccuccguggcggaccucgaccccuacgacaagagccugcacucccgggucuucccgggcgggaacugccugggcgugaccaucagcuccacguacugcagcaccaaccacgacuacaccaucuggaugcccgaggaggcccgccucgggaccuccugcgacaucuucacgaacagcaagggcaagaaggccuccaagggcgggaaggugugcggcuucgucgacgagcgggggcuguacaagagccugaagggcgccugcaagcucaagcugugcggcgugcccgggcugcgccucauggacggcaccugggugagcauccagaccuccgacgagaccaaguggugcccgcccgaccagcuggucaacauccacgacuuccacagcgacgagaucgagcaccugaucguggaggagcucgugaagaagcgggaggagugccuggacgcgcuggaguccaucaugacgaccaagagcgucuccuuccgccggcucagccaccuccgcaagcuggugcccggguucggcaaggccuacaccaucuucaacaagacccugauggaggccgacgcccacuacaaguccgugcggacguggaacgaggucauccccagcaaggggugccugaaggugggcggccgcugccacccccacgucgggggcguguucuucaacgggaucauccugggcccggacgggaccgugcucauccccgagaugcaguccagccugcugcagcagcacauggagcuccuggaguccagcgucaucccccugaugcacccccucgccgacccguccaagguguucaaggagggcgacgaggcggaggacuucguggagguccaccuccccgacgugcacaagcaggucagcggcguggaccuggggcugcccuccuggggcaaguaccugcugaugagcgugggggcccucgccacccugauccugaucaucuuccugaucacgugcugccggaaggugaagcgcaccgaguccauccagcggggccacggggagagcggccgcaaggucuccgccagcccccagaacggcaaggugaucagcuccugggagcucuacaagagcgagggggagaccaaccuguga

SEQ ID NO: 95313 - RNA, 1575 nt, Artificial Sequence
  derived and/or modified CDS sequence (opt1) from glycoprotein__RABV__JQ685916.1
augaucccccaggcccugcucagccugcugcuccugaucuccagccugugccucggcaaguucccgaucuacaccauccccgacaagcuggggcccuggucccccaucgacauccaccaccugagcugcccgaacaaccucguggucgaggacgagggcugcaccucccugagcggguucuccuacauggagcugaaggugggcuacaucagcgccaucaaggugaacggguucacgugcaccggcgucgugaccgaggcggagaccuacaccaacuucgugggcuacgucaccaccaccuucaagcgcaagcacuuccggcccaugcccgacgccugccgcgccgcccacgaguggaagauggccggggacccccgguacgaggacucccuccagaacccguaccccgacuaccacuggcugcgcacggugaagaccaccaaggagagccugaucaucaucucccccagcguggcggaccucgaccccuacgacaagucccugcacagccgggucuucccgggcgggaacugccugggcaucaccaucuccagcacguacugcuccaccaaccacgacuacaccaucuggaugcccgaggaggcccgccucgggaccagcugcgacaucuucacgaacuccaagggcaagcgggccagcaagggcgggaagaucugcggcuucguggacgagcgcgggcuguacaagagccugaagggcgccugcaagcucaagcugugcggcgugcccgggcugcggcucauggacggcaccugggucuccauccagaccagcgacgagaccaaguggugcccgcccgaccagcuggugaacgugcacgacuuccacuccgacgagaucgagcaccugaucgucgaggagcucgugaagaagcgcgaggagugccuggacgcgcuggagagcaucaugacgaccaaguccgugagcuuccggcgccucucccaccuccggaagcugguccccggguucggcaaggccuacaccaucuucaacaagacccugauggaggccgacgcccacuacaagagcgugcgcacguggaacgagaucauccccuccaaggggugccugaaggugggcggcaugugccacccccacgucgggggcguguucuucaacgggaucauccugggcccggacgggaccgugcucauccccgagaugcagagcucccugcugcagcagcacauggagcuccuggagagcuccgucaucccccugaugcacccccucgccgacccgagcaccguguucaaggagggcgacgaggcggaggacuucgucgagauccaccuccccgacgugcacaagcagaucuccggcguggaccuggggcugcccagcuggggcaaguaccugcugaucuccgccggggcccucgccacccugauccugacgaucuuccugaucacgugcugccggaaggucaaccgcaccgagagcauccagcggggccacggggaguccgagcgcaaggugagcgugagcccccagaacggccgggucaucuccagcugggagcucuacaaguccggcggggagaccaaccuguga

SEQ ID NO: 95314 - RNA, 1575 nt, Artificial Sequence
  derived and/or modified CDS sequence (opt1) from glycoprotein__RABV__JQ685917.1
augaucccccaggcccugcucuacgugccgcugcugaucagcucccucugcuucggcggguuccccaucuacaccauccccgacaagcugggccccuggagcccgaucgacauccaccaccuguccugccccaacaaccucgucguggaggacgaggggugcaccagccuguccggcuucagcuacauggagcugaaggugggguacaucuccgccaucaaggucaacggcuucacgugcaccggcguggugaccgaggcggagaccuacacgaacuucgucggguacgugaccaccaccuucaagcgcaagcacuuccggcccgugcccgacgccugccgcgccgccuacaacuggaaggucgccggcgacccgcgguacgaggagagccuccagaaccccuaccccgacuacuccuggcugcgcacggugaagaccaccaaggagagccugaucaucaucucccccagcguggcggaccucgacccguacgacaagucccugcacagccgggucuuccccgggggcaagugccuggggaucaccaucuccagcacguacugcuccaccaaccacgacuacaccaucuggaugcccgaggaggcccgccucggcaccagcugcgacaucuucacgaacucccggggcaagcgcgccagcaagggcgggaagaccugcggguucguggacgagcggggccuguacaagagccugaagggcgccugcaagcucaagcugugcggggugcccggccugcgccucauggacgggaccugggucaccauccagacguccgacgagaccaaguggugcccgagcgaccagcuggugaaccugcacgacuuccacuccgacgagaucgagcaccucguggucgaggagcuggugaagaagcgggaggagugccuggacgcgcucgagagcaucaugaccaccaaguccgugagcuuccgccggcugucccaccuccgcaagcugguccccggcuucgggaaggccuacacgaucuucaacaagacccugauggaggccgacgcccacuacaagagcauccggaccuggaacgagaucauccccuccaagggcugccugaaggugggcgggcgcugccacccccacguggacggcgucuucuucaacgggaucauccucggcccggacgggaacgugcugauccccgagaugcagagcucccugcuccagcagcacgucgagcugcuggagagcuccgugaucccccucaugcacccccuggccgacccgagcaccguguucaaggacggcgacgaggcggaggacuucgucgaggugcaccuccccgacauccacaagcaggucuccggcguggaccuggggcugcccgacuggggcaaguaccugcucaugagcgccggggcccuggccacgcugaugcucaccaucuuccugaugaucugcugccggcgcgccaaccggaccgaguccauccagcgcgaccccggcgagagcgggaagaagguguccaucaccagccaggacggcaaggugaucagcuccugggagcuguacaagagcggcggggagacgcggcuguga

SEQ ID NO: 95315 - RNA, 1575 nt, Artificial Sequence
  derived and/or modified CDS sequence (opt1) from glycoprotein__RABV__JQ685918.1
augaucccccagagccugcuguuccugccgcugcucaucuccagccugugcuucggcgaguuccccaucuacaccauccccgagaagcuggggcccugguccccgaucgacauccaccaccucagcugccccaacaaccugguggucgaggacgagggcugcaacucccugagcggguucuccuacauggagcucaaggugggcuacaucagcuccaucaaggugaacggguucacgugcaccggcgucgugaccgaggccgagaccuacaccaacuucgugggcuacgucacgaccaccuucaagcgcaagcacuuccggcccaugcccgacgccugccgcgcggccuacagcuggaagauggccggggacccgcgguacgaggagucccugcacaaccccuaccccgacuaccacuggcugcgcaccgugaagacgaccaaggagagccucgugaucaucucccccagcgucgccgaccuggacccguacgacaagucccugcacagccggguguucuccggcgggaagugccucggcaucaccaucagcuccaccuacugcagcacgaaccacgacuacaccaucuggaugcccgaggaggcccgccuggggaccagcugcgacaucuucaccaacuccaagggcaagcgggcgagcaagggcgggcgcacgugcggcuucguggacgagcgggggcuguacaagucccucaagggcgccugcaagcugaagcugugcggcguccccgggcuccgccugauggacggcaccugggugagcauccagaccuccaacgagaccaaguggugcccgcccgaccagcuggugaacauccacgacuuccggagcgacgagaucgagcaccucgucguggaggagcuggugaagaagcgcgaggagugccuggacgcccucgaguccaucaugacgaccaagagcgucuccuuccggcgccugagccaccuccggaagcucgugcccggguucggcaaggccuacaccaucuucaacaagacccugauggaggcggacgcccacuacaaguccgugcgcacguggaacgaggucauccccagcaaggggugccuguccgugggcggccggugcuacccccacgugagcggggucuucuucaacggcaucauccucgggccggacggcuccgugcugauccccgagaugcagagcucccugcuccagcagcacauggagcugcuggagagcuccgucaucccccucaugcacccccuggccaacccgagcaccguguucaaggacggggacgaggccgaggacuucguggagguccaccuccccgacgugaaggagcaggucagcggcguggaccugggccugcccaacugggggaaguacgugcugauguccgccggcgcgcucgccauccugaugcuggccaucuuccucaugaccugcugccgccgggccaaccgcaccaagagcauccagcaggggccccgggaguccggccgcaaggugagcgucccgccccagaacgggaaggugaucuccagcugggaguccuucaagagcggcggcgagacgcgccuguga

SEQ ID NO: 95316 - RNA, 1575 nt, Artificial Sequence
  derived and/or modified CDS sequence (opt1) from glycoprotein__RABV__JQ685920.1
augaucccccaggcccuccucuucgugccguuccuguuccccagccugugccucggcaaguuccccaucuacaccauccccgagaagcuggggccguggucccccaucgacauccaccaccugagcugccccaacaaccucgucguggaggacgagggcugcgacucccugagcggguucuccuacauggagcugaaggugggcuacaucagcgccaucaaggucaacggguucacgugcaccggcguggugaccgaggcggagaccuacaccaacuucgucggcuacgugacgaccaccuucaagcgcaagcacuuccggcccaugccggacgccugccgcgccgccuacaacuggaagaccgccggggacccccgguacgaggagucccuccacaaccccuaccccgacuaccacuggcugcgcacggugaagaccaccaaggagagccuggucaucaucuccccgagcguggcggaccucgaccccuacgacaagucccugcacagccggguguuccccggcgggaagugccugggcaucaccaucuccagcacguacugcuccaccaaccacgacuacaccaucuggaugcccgaggaggcccgccucgggaccagcugcgacaucuucacgaacuccaagggcaagcgggccagcaagggcgggcggaccugcggcuucgucgacgagcgcgggcuguacaagucccugaagggcgccugcaagcucaagcugugcggcgugccggggcugcgccucauggacggcaccuggguggcgauccagacccccggggagacgaaguggugcagccccgaccagcuggucaaccugcacgacuuccggagcgacgagaucgagcaccucgugguggaggagcugaucaagaagcgcgaggagugccuggacgcccucgaguccaucaugaccaccaagagcgucuccuuccggcgccugagcaaccugcggaagcucgugcccggcuucgggaaggccuacaccaucuucaacaagacgcugauggaggccgacgcccacuacaaguccgugcgcaccugggacgagaucaucccgagcaagggcugccugcgggucggcgggcgcugccacccccacgugaacggcguguucuucaacgggaucauccucggccccgacgggcacguccugauccccgagaugcaguccagccugcuccagcagcacauggagcugcuggaguccagcgugaucccgcucauccacccccuggcggaccccuccaccgucuucaaggacggcgacgaggccgaggacuucguggaggugcaccuccccgacguccacaagcaggucagcggcguggaccuggggcugccgaacuggggcaaguacgugcugauguccgccggggugcucgccaccgugauccugacgaucuuccugcugaccugcugccggcgcgucaaccggaccaagcccaagcagcagagccugggcgaguccgggcgcaaggugagcgugacgccccagaacggcaaggucauguccagcugggaguacuacaaguccgagggccgcaccagccuguga

SEQ ID NO: 95317 - RNA, 1575 nt, Artificial Sequence
  derived and/or modified CDS sequence (opt1) from glycoprotein__RABV__JQ685921.1
augauccugcaggcccuccuguucgugcccauccugaucagcuccuucugcuucggcgacuucccgaucuacaccauccccgagaagcucgggcccuggagccccaucgacauccaccaccuguccugcccgaacaaccuggucguggaggacgagggcugcagcucccucagcggguucuccuacauggagcugaaggugggcuacaucagcgccaucaaggucaacggguucacgugcaccggcguggugaccgaggcggagaccuacaccaacuucgucggcuacgugacgaccaccuucaagcgcaagcacuuccggcccaugcccgacgccugccgcgccgccuacaacuggaagaccgccggggacccccgguacgaggagucccugcagaacccguaccccgacuaccacuggcuccgcacggugaagaccaccaaggagagccuggucaucaucucccccagcguggcggaccuggaccccuacgacaagucccuccacagccggguguucuccgacggcaagugccuggggaucaccaucagcuccacguacugcagcaccaaccacgacuacaccaucuggaugccggaggaggcccgccugggcaccuccugcgacaucuucacgaccagccgggggaagcgcgccagcaagggcggcaagaccugcggguucgucgacgagcggggccucuacaagucccugaagggggccugcaagcugaagcucugcggcgugagcggccugcgccugauggacgggaccuggguguccauccaggcgcccgacgaggccaaguggugcagcacggaccagcucgucaacauccacgacauccgguccgacgagaucgagcaccuggugguggaggagcuggucaagaagcgcgaggagugccucgacgcccuggagagcaucaugaccaccaaguccgugagcuuccggcgccugucccaccuccggaagcuggugcccggcuucgggaaggccuacaccaucuucaacaagacgcugauggaggccgacgcgcacuacaagagcguccgcaccugguccgaggugauccccagcaagggcugccucuccgucgggggccggugccacccgcacgagaacggcguguucuucaacgggaucauccugggccccgacgggagcgugcugauccccgagaugcaguccagccuccugcagcagcacauggagcugcucgaguccagcgucaucccccugaugcacccgcuggccaaccccuccaccguguucaaggacggcgacgaggccgaggacuucguggagguccaccuccccgacgugcaggagcagaucagcgggguggaccugggccugcccaacuggggcaaguacgucaugaugagcgccggggcccucgcgauccugaugcugaccaucuuccucaugacgugcugccgccgggccaaccgcacccgguccacccagcgcgaccugggcgggcuggagcgcaaggugagcgugccgcccaaggacggccgggucauguccagcugggaguccuacaagagcgggggcgagaccucccucuga

SEQ ID NO: 95318 - RNA, 1575 nt, Artificial Sequence
  derived and/or modified CDS sequence (opt1) from glycoprotein__RABV__JQ685922.1
augaucccccaggcccuccuguucgugccgcugcugauccccagccucugccugggcaaguuccccaucuacaccauccccgacaagcuggggccguggucccccaucgacauccaccaccucagcugccccaacaaccuggucguggaggacgagggcugcaccucccugagcggguucuccuacauggagcucaaggugggcuacaucagcgccaucaaggucaacggguucacgugcaccggcguggugaccgaggccgagaccuacacgaacuucgucggcuacgugaccaccaccuucaagcgcaagcacuuccggcccaugccggacgccugccgcgccgcccacgacuggaagaucgccggggacccccgguacgaggacucccugcagaaccccuaccccgacuaccacuggcugcgcacggugaagaccaccaaggagagccucgucaucaucuccccgagcguggcggagcuggaccccuacgacaagucccugcacagccggguguuccccuccggcaagugccucgggaucaccgucagcuccacguacugcagcaccaaccacgacuacaccaucuggaugcccguggaggcccgccugggcaccuccugcgacaucuucacgaacagccgggggaagaaggccuccaagggcggccggaccugcggguucguggacgagcgcggccuguacaagagccucaagggggccugcaagcugaagcugugcggcgucccgggccuccgccugauggacgggaccugggugagcauccagaccuccgacgacaucaaguggugcccgcccgaccagcuggugaaccuccacgacuuccacagcgacgagaucgagcaccuggucguggaggagcugaucaagaagcgggagggcugccucgacgcgcuggaguccaucaugacgaccaagagcguguccuuccgccggcugagccaccuccgcaagcugguccccggguucggcaaggccuacaccaucuucaacaacacccugauggaggccgacgcccacuacaaguccgugcggacguggaacgaggugauccccagcaaggggugccucaaggucggcggccgcugccacccgcccgugaacggggucuucuucaacggcaucauccuggggcccgacggcaacgugcugauccccgagaugcaguccagccuccugcagcagcacauggagcugcucgaguccagcgugaucccccugaugcacccccuggccgaccccuccaccgucuucaaggacggggacgaggcggaggacuucguggaggugcaccucccggacguccacaagcaggucagcgacguggaccugggccugcccuccuggggcaaguaccuccugaugagcgccggggcccuggccacccucauccuggccaucuuccugaucacgugcugccggcgcgcgaaccggaccgaguccacccagcgcggccaccgggagagcgggggcaagguguccguggcgccccagaacgggaagaucaucagcagcugggagcuguacaaguccgagagcgagaccggcauguga

SEQ ID NO: 95319 - RNA, 1575 nt, Artificial Sequence; identical to SEQ ID NO: 95293
  derived and/or modified CDS sequence (opt1) from glycoprotein__RABV__JQ685923.1

SEQ ID NO: 95320 - RNA, 1575 nt, Artificial Sequence
  derived and/or modified CDS sequence (opt1) from glycoprotein__RABV__JQ685925.1
augaucccccaggcccugcucagcgugccgcugcugaucuccagccucugcuucggcaaguuccccaucuacaccauccccgagaagcuggggcccugguccccgaucgacauccaccaccugagcugccccaacaaccucgucguggaggacgagggcugcaacucccugagcggguucuccuacauggagcugaaggugggcuacaucagcgccaucaaggucaacggguucacgugcaccggcguggugaccgaggcggagaccuacaccaacuucgucggcuacgugaccaccaccuucaagcgcaagcacuuccggcccaugcccgacgccugccgcgccgccuacaacuggaagaccgccggggacccgcgguacgaggagucccuccacaaccccuaccccgacuaccacuggcugcgcacggugaagaccaccaaggagagccugaucaucaucucccccagcgucgcggaccucgacccguacgacaagucccugcacagccggaucuuccccggcgggaagugccugggcaucaccaucuccagcacguacugcuccaccaaccacgacuacaccaucuggaugcccgaggaggcccgccucgggaccagcugcgacaucuucacgaacuccaagggcaagcgggccagcaagggcgggcggaccugcggcuucguggacgagcgcgggcuguacaagagccugaagggcgccugcaagcucaagcugugcggcgugcccgggcugcgccucauggacggcaccugggucgcgauccagaccccgaacgagacgaaguggugcucccccgaccagcuggugaacgugcacgacuuccggagcgacgagaucgagcaccuggucguggaggagcucauccgcaagcgggaggagugccuggacgcccuggaguccaucaugaccaccaagagcguguccuuccgccggcucagcaaccugcgcaagcugguccccggguucggcaaggccuacaccaucuucaacaagacgcucauggaggccgacgcccacuacaaguccgugcggaccuggaacgagaucauccccagccgcgggugccugaaggugggcggccggugccacccgcacgucaacgggguguucuucaacggcaucauccuggggcccgacggccacauccucauccccgagaugcaguccagccugcugcagcagcacauggagcuccuggaguccagcgugaucccccugauccacccgcucgcggaccccuccaccgucuucaaggacggggacgaggccgaggacuucguggagguccaccuccccgacgugcaccagcaggucagcggcguggaccugggccugcccgacugggggaaguacgugcugauguccgccggcgcccuggccaccgugaugcucacgaucuuccugaucacgugcugccgccgggucaagcgcaccgagagcgugcagcaggggcugggcgaguccgggcgcaaggugagcgucgcgccgcagaacggcaaggugauguccagcugggaguacuacaagagcggcgggggcacccggcucuga

SEQ ID NO: 95321 - RNA, 1575 nt, Artificial Sequence
  derived and/or modified CDS sequence (opt1) from glycoprotein__RABV__JQ685926.1
augaucccccaggcccugcucuacgugccgcugcugauccccagccucugccugggcggguuccccaucuacaccauccccgacaagcugggcccguggucccccaucgacauccaccaccucagcugccccaacaaccuggucguggaggacgaggggugcaccucccugagcggcuucuccuacauggagcucaaggugggguacaucagcgccaucaaggucaacggcuucacgugcaccggcguggugaccgaggcggagaccuacacgaacuucgucggguacgugaccaccaccuucaagcgcaagcacuuccggcccaugccggacgccugccgcgccgccuacaacuggaagguggccggcgacccccgguacgaggagucccugcagaaccccuaccccgacuacagcuggcugcgcacggucaugaccaccaaggagucccucaucaucaucagcccguccguggcggaccuggaccccuacgacaagagccugcacucccggguguuccccgggggcaagugccucgggaucaccaucuucagcacguacugcuccaccaaccacgacuacaccaucuggaugcccgaggaggcccgccugggcaccagcugcgacaucuucacgaacucccggggcaagcgcgccagcaagggcgggaagaccugcggguucgucgacgagcggggccuguacaagucccucaagggcgccugcaagcugaagcugugcggggugccgggccuccgccugauggacgggaccugggugaccauccagacgagcgacgagaccaaguggugccccagcgaccagcuggucaaccuccacgacuuccacuccgacgagaucgagcaccuggugguggaggagcuggucaagaagcgggaggagugccucgacgcgcuggagagcaucaugaccaccaaguccgugagcuuccgccggcugucccaccuccgcaagcuggugcccggcuucgggaaggccuacacgaucuucaacaagacccugauggaggccgacgcccacuacaagagcauccggaccuggaacgagaucauccccuccaagggcugccucaaggucggcgggcgcugccacccgcacguggacggcguguucuucaacgggaucauccugggccccgacgggaacguccugauccccgagaugcagagcucccuccugcagcagcacguggagcugcucgagagcuccgucaucccccugaugcacccgcuggccgaccccagcaccguguucaaggacggcgacgaggcggaggacuucguggagguccaccuccccgacauccacaagcaggucuccggcguggaccuggggcugcccaacuggggcaaguaccuccugaugagcgccggggcccuggccacgcucaugcugaccaucuuccugaugaccugcugccggcgcgccaaccggaccgaguccauccagcgcgacccgggcgagagcgggaagaagguguccgugacgagccaggacggcaaggugaucuccagcugggagcuguacaagagcggcggggagacccggcucuga

SEQ ID NO: 95322 - RNA, 1575 nt, Artificial Sequence; identical to SEQ ID NO: 95292
  derived and/or modified CDS sequence (opt1) from glycoprotein__RABV__JQ685928.1

SEQ ID NO: 95323 - RNA, 1575 nt, Artificial Sequence
  derived and/or modified CDS sequence (opt1) from glycoprotein__RABV__JQ685929.1
auggugccccaggcccugcuguucgucccgcugcugaucccgcccgugugccucggcaaguuccccaucuacaccauccccgacaagcuggggcccuggagccccaucgacauccaccaccuguccugccccaacaaccucguggucgaggacgagggcugcagcaaccuguccggguucagcuacauggagcugaaggugggcuacaucuccgccaucaagguggacggguucacgugcacgggcgucgugaccgaggcggagaccuacaccaacuucaucggcuacgugacgaccaccuucaagcgcaagcacuuccggccgaugcccgacgccugccgcagcgccuacaacuggaagaucgccggggacccccgguacgaggagucccuccacacccccuacccggacuaccacuggcugcgcacggucaagaccaccaaggagagccuggugaucaucucccccagcguggccgaccucgaccccuacgacaagucccugcacagcauggucuuccccaacggcaagugcuccgggaucaccguguacagcacguacugcuccaccaaccacgacuacaccaucuggaugccggagaaggcgggccuggggaccagcugcgacaucuucacgaacucccggggcaagcgcgccagcaagggcgggcggaccugcggcuucguggacgagcgcgggcucuacaagucccugcggggcgccugcaagcugaagcucugcggcguccccgggcugcgccugauggacggcaccugggccaccauccagacgcccgaggagaccaaguggugcagccccgaccagcucgugaaccugcacgacuuccacagcgacgagaucgagcaccugguggucgaggaccucgugaagaagcgggaggagugccuggacacccuggaguccaucaugaccaccaagagcguguccuuccgccggcucagccaccuccgcaagcuggucccgggguucggcaaggcguacaccaucuucaacaagacccucauggaggccgacgcccacuacaaguccgugcggaccuggaacgagaucauccccagcaaggggugccugcgcgugggcggccggugccacccccacgucaacgggguguucuucaacggcgucaucauggggcccgacggccacgugcugaucccggagaugcaguccagccuccugcagcagcacauggagcugcucgaguccagcgugaucccccugauccacccccuggccgaccccuccacggucuucaaggacaacgacgaggccgaggacuucguggaggugcaccucccggacguccacaagcaggucagcgggaucgaccugggccugcccuccuggggccgcuaccucgugaugaucgcgggggcccugaugacccugacccucgugaucuuccugaugaucugcugccggcgcgugaacaaggccggcagcauccagcaggaccccgagaaguccgagaagcggcgcagcgugaccccgcagaacgggaaggucaucuccagcugggaguccuacaagagcggcagcgagacgcgccuguga

SEQ ID NO: 95324 - RNA, 1575 nt, Artificial Sequence
  derived and/or modified CDS sequence (opt1) from glycoprotein__RABV__JQ685931.1
augaucccccaggcccuccuguucgugccgcugcugaucagcucccucugcuucggcggguuccccaucuacaccauccccgacaagcugggccccuggagcccgaucgacauccaccaccuguccugccccaacaaccucgucguggaggacgaggggugcaccagccuguccggcuucagcuacauggagcugaaggugggguacaucuccgccaucaaggucaacggcuucacgugcaccggcguggugaccgaggcggagaccuacacgaacuucgucggguacgugaccaccaccuucaagcgcaagcacuuccggcccaugcccgacgccugccgcgccgccuacaacuggaagacggccggcgacccgcgguacgaggagagccuccagaaccccuaccccgacuaccacuggcugcgcaccgugaagaccaccaaggagucccugaucaucaucagccccuccgucgcggaccucgacccguacgacaagagccugcacucccggguguuccccgggggcaagugccuggggaucacggugagcuccaccuacugcagcaccaaccacgacuacaccaucuggaugcccgaggaggcccgccucggcacguccugcgacaucuucaccaacagccggggcaagcgcgccuccaagggcgggcggaccugcggguucgucgacgagcgcggccuguacaagagccugaagggcgccugcaagcucaagcugugcggggugcugggccuccggcugauggacgggaccugggugacgauccagaccagcaacgagaccaaguggugccccuccgaccagcuggucaaccuccacgacuuccacagcgacgagaucgagcaccuggugguggaggagcuggucaagaagcgcgaggagugccucgacgcgcuggaguccaucaugaccaccaagagcguguccuuccggcgccugagccaccuccggaagcuggugccgggcuucgggaaggccuacaccaucuucaacaagacccugauggaggccgacgcccacuacaaguccauccgcaccuggaacgagaucauccccagcaagggcugccucaaggucggcgggcggugccacccccacguggacggcguguucuucaacgggaucauccugggccccgacgggaacguccugaucccggagaugcaguccagccuccugcagcagcacguggagcugcucgaguccagcgucaucccccugaugcacccccuggccgaccccuccacgguguucaaggacggcgacgaggcggaggacuucguggagguccaccucccggacgugcacaagcaggucagcggcguggaccuggggcugcccaacuggggcaaguaccuccugauguccgccggggcccuggccacccucaugcugaccaucuuccugaucacgugcugccgccggguggaccgcacggagagcauccagcggggccccggggagcugggccgcgagguguccgucaccagccagaacggcaaggugaucuccagcugggagcucuacaagagcgggggcgagacccgccuguga

SEQ ID NO: 95325 - RNA, 1575 nt, Artificial Sequence; identical to SEQ ID NO: 95293
  derived and/or modified CDS sequence (opt1) from glycoprotein__RABV__JQ685932.1

SEQ ID NO: 95326 - RNA, 1575 nt, Artificial Sequence
  derived and/or modified CDS sequence (opt1) from glycoprotein__RABV__JQ685933.1
augaucccccaggcccugcucuacgugccgcugcugauccccagccucugcuucggcggguuccccaucuacaccauccccgacaagcugggcccguggucccccaucgacauccaccaccugagcugccccaacaaccucgucguggaggacgaggggugcaccucccugagcggcuucuccuacauggagcugaaggugggguacaucagcgccaucaaggucaacggcuucacgugcaccggcguggugaccgaggcggagaccuacacgaacuucgucggguacgugaccaccaccuucaagcgcaagcacuuccggcccaugccggacgccugccgcgccgccuacaacuggaagauggccggcgacccccgguacgaggagucccuccagaaccccuaccccgacuacagcuggcugcgcacggugaagaccaccaaggagucccugaucaucaucagcccguccgucgcggaccucgaccccuacgacaagagccugcacucccggguguuccccgggggcaagugccuggggaucaccaucagcuccacguacugcagcaccaaccacgacuacaccaucuggaugcccgaggaggcccgccucggcaccuccugcgacaucuucacgaacagccggggcaagcgcgccuccaagggcgggaagaccugcggguucguggacgagcggggccuguacaagagccugaagggcgccugcaagcucaagcugugcggggucccgggccugcgccucauggacgggaccugggugaccauccagacgagcgacgagaccaaguggugccccuccgaccagcuggugaaccugcacgacuuccacagcgacgagaucgagcaccucgucguggaggagcuggugaagaagcgggaggagugccuggacgcgcucgaguccaucaugaccaccaagagcgucuccuuccgccggcugagccaccuccgcaagcuggugcccggcuucgggaaggccuacacgaucuucaacaagacccugauggaggccgacgcccacuacaaguccauccggaccuggaacgagaucauccccagcaagggcugccugaaggugggcgggcgcugccacccgcacgucgacggcguguucuucaacgggaucauccucggccccgacgggaacgugcugauccccgagaugcaguccagccugcuccagcagcacgucgagcugcuggaguccagcgugaucccccucaugcacccgcuggccgaccccuccaccgucuucaaggacggcgacgaggcggaggacuucguggaggugcaccuccccgacauccacaagcaggucagcggcguggaccuggggcugcccaacuggggcaaguaccugcucauguccgccggggcccuggccacgcugaugcucaucauccugcugaugaccugcugccggcgcgccaaccggaccgagagcauccagcgcgacccgggcgaguccgggcggaaggugagcaucaccucccccgacggcaaggucaucagcagcugggagcuguacaaguccggcggggagacgcgccucuga

SEQ ID NO: 95327 - RNA, 1575 nt, Artificial Sequence
  derived and/or modified CDS sequence (opt1) from glycoprotein__RABV__JQ685934.1
augaucccccaggcccugcucuacgugccgcugcugaucagcucccucugcuucggcggguuccccaucuacaccauccccgacaagcugggccccuggagcccgaucgacauccaccaccuguccugccccaacaaccucgucguggaggacgaggggugcaccagccuguccggcuucagcuacauggagcugaaggugggguacaucuccgccaucaaggucaacggcuucacgugcaccggcguggugaccgaggcggagaccuacacgaacuucgucggguacgugaccaccaccuucaagcgcaagcacuuccggcccaugcccgacgccugccgcgccgccuacaacuggaagauggccggcgacccgcgguacgaggagagccuccagaaccccuaccccgacuacuccuggcugcgcacggugaagaccaccaaggagagccugaucaucaucucccccagcgucgcggaccucgacccguacgacaagucccugcacagccggguguuccccgggggcaagugccuggggaucaccaucuccagcacguacugcuccaccaaccacgacuacaccaucuggaugcccgaggaggcccgccucggcaccagcugcgacaucuucacgaacucccggggcaagcgcgccagcaagggcgggaagaccugcggguucguggacgagcggggccuguacaagagccugaagggcgccugcaagcucaagcugugcgggguccccggccugcgccucauggacgggaccugggugaccauccagacguccgacgagaccaaguggugcccgagcgaccagcuggugaaccugcacgacuuccacuccgacgagaucgagcaccucgucguggaggagcuggugaagaagcgggaggagugccuggacgcgcucgagagcaucaugaccaccaaguccgucagcuucaagcgccugucccaccuccggaagcuggugcccggcuucgggaaggccuacacgaucuucaacaagacccugauggaggccgacgcccacuacaagagcauccgcaccuggaacgagaucauccccuccaagggcugccugaaggugggcgggcggugccacccccacgucgacggcguguucuucaacgggaucauccucggcccggacgggaacgugcugauccccgagaugcagagcucccugcuccagcagcacgucgagcugcuggagagcuccgugaucccccucaugcacccccuggccgacccgagcaccgucuucaaggacggcgacgaggcggaggacuucguggaggugcaccuccccgacauccacaagcaggucuccggcguggaccuggggcugcccaacuggggcaaguaccugcucaugagcgccggggcccuggccacgcugaugcucaucaucuuccugauggccugcugccgccgggcgaaccgcaccgaguccauccagcgggaccccggcgagagcgggcgcaagguguccaucccgagccaggacggcaaggucaucagcuccugggagcuguacaagagcggcggggagacccggcuguga

SEQ ID NO: 95328 - RNA, 1575 nt, Artificial Sequence
  derived and/or modified CDS sequence (opt1) from glycoprotein__RABV__JQ685936.1
augauccugcaggcccuccuguucgugccccugcucaucagcccccugugccugggcaaguuccccaucuacaccauccccgacaagcucgggcccugguccccgaucgacauccaccaccugagcugccccaacaaccuggucguggaggacgagggcugcaccaaccucuccggguucagcuacauggagcugaaggugggcuacaucuccgccaucaaggucaacggguucacgugcaccggcguggugaccgaggcggagaccuacacgaacuucgucggcuacgugaccaccaccuucaagcgcaagcacuuccggcccauccccgacgccugccgcgccgccuacaacuggaagauggccggggacccgcgguacgaggagagccugcagaaccccuaccccgaguaccacuggcuccgcacggugaagaccaccaaggagucccugaucaucaucagccccuccgucgcggaccuggacccguacgacaagagccuccacucccggguguuccccggcgggaagugccugggcaucaccgugagcuccacguacugcagcaccaaccacgacuacaccaucuggaugcccgaggagccccgccuggggaccuccugcgacaucuucacgagcuccaagggcaagaaggccagcaagggcgggaagaccugcggcuucgucgacgagcgggggcucuacaagucccugaagggcgccugcaagcugaagcucugcggcgugcuggggcugcgccucauggacggcaccugggugagcauccagaccagcgacgacacgaaguggugcccgcccgaccagcuggucaaccugcacgacuuccacuccgacgagaucgagcaccucgugguggaggagcuggucaagaagcgggaggagugccuggacgcccucgagagcaucaugaccaccaaguccgugagcuuccgccggcuguccuaccugcgcaagcucgugcccggguucggcaaggcguacaccaucuucaacaagacgcugauggaggccgacgcccacuacaagagcguccggaccuggaacgagaucauccccuccaaggggugccugaaggugcgcgagcggugccacccgcccguggacggcgucuucuucaacggcaucauccucgggcccgacggcaacgugcugauccccgagaugcagagcucccugcuccagcagcacauggagcugcuggagagcuccgucaucccgcucaugcacccccuggccgaccccagcaccguguucaaggagggggacgaggccgaggacuucguggagguccaccuccccgacgugcacaagcagaucuccggcguggaccuggggcugccgagcuggggcaaguaccugcucaugaucgcgggcgggcuggucacccuggugcugaucaucugcuccaucgccugcugccgccgggccaagcgcacggagagccggcgccggggcuccggggagagcggcaagaaggugaacgccaccccgcagacccgcaaggucguguccagcugggagcucuacaagcgcgagggggacgcccggcuguga

SEQ ID NO: 95329 - RNA, 1575 nt, Artificial Sequence
  derived and/or modified CDS sequence (opt1) from glycoprotein__RABV__JQ685938.1
auggugcugcaggcccuccuguucgcccccuuccugaucagcucccucugccugggcaaguucccgaucuacaccauccccgacaagcuggggcccuggagccccaucgacauccaccaccucuccugcccgaacaaccuggucguggaggacgagggcugcaacagccuguccgggaucagcuacauggagcucaaggugggcuacaucuccgcgaucaaggucaacggguucacgugcaccggcguggugaccgaggccgagaccuacaccaacuucgucggcuacgugacgaccaccuucaagcgcaagcacuuccaccccaugcccgacgccugccggagcgccuacaacuggaagcuggccggggacccccgcuacgaggagucccugcagaacccguaccccgacuaccacuggcuccggaccgugaagacgaccaaggagagccugaucaucaucucccccagcgucgcggaccuggaccccuacgacaagucccuccacagccgcaucuucccguccggcaagugcagcgggaugaccaucuccagcaccuacugcuccacgaaccacgaguacaccaucuggaugcccgagaaggccggccuggggaccagcugcgacaucuucaccacgagcaagggcaagcgggccuccaagggcgggaagaccugcggcuucguggacgagcgcgggcuguacaagagccucaagggcgccugcaagcugaagcugugcggcguguccgggcuccggcugauggacggcaccugggucgcgauccagaccagcgaggagacgaaguggugcccgcccgaccagcuggugaaccuccacgaccugcacuccgacgagaucgagcaccugguggucgaggagcucgugaagaagcgcgaggagugccuggacgcccuggagagcaucaugaccaccaaguccgugagcuuccggcgccucucccaccuccggaagcugguccccggguucggcaaggccuacaccaucuucaacaagacgcugauggaggccgacgcccacuacaagagcauccgcaccuggaacgagaucauccccuccaaggggugccugcgggugggcggcaagugccacccccacgugaacggggucuucuucaacggcaucauccuggggcccgacggccacgugcucaucccggagaugcagagcucccugcugcagcagcacauggagcuccuggagagcuccgugaucccccugaugcacccccucgcggaccugagcaccgucuucaaggacggggacgaggccgaggacuucguggagguccaccuccccgacgugcacaagcagaucuccggcguggaccugggccugccgagcugggggaaguacguccugauguccgccggcgcccucgccauccugaugcuggugaucagccugaugaagugcuucuggggcgugaaccgcaccaagcccauccagcaggggccccgggagagcgagcgcaaggucuccaucgcgccccagagccggaaggugaucuccagcugggaguccuacaagagcgggggcgagacggagcucuga

SEQ ID NO: 95330 - RNA, 1575 nt, Artificial Sequence
  derived and/or modified CDS sequence (opt1) from glycoprotein__RABV__JQ685940.1
augaucccccaggcccugcucuacgugccgcugcugauccccagccucugcuucggcggguuccccaucuacaccauccccgacaagcugggcccguggucccccaucgacauccaccaccugagcugccccaacaaccucgucguggaggacgaggggugcaccucccugagcggcuucuccuacauggagcugaaggugggguacaucagcgccaucaaggucaacggcuucacgugcaccggcguggugaccgaggcggagaccuacacgaacuucgucggguacgugaccaccaccuucaagcgcaagcacuuccggcccaugccggacgccugccgcgccgccuacaacuggaagguggccggcgacccccgguacgaggagucccuccagaaccccuaccccgacuacagcuggcugcgcacggucaagaccaccaaggagucccugaucaucaucagcccguccguggcggaccucgaccccuacgacaagagccugcacucccggguguuccccgggggcaagugccuggggaucaccaucagcuccacguacugcagcaccaaccacgacuacaccaucuggaugcccgaggaggcccgccucggcaccuccugcgacaucuucacgaacagccggggcaagcgcgccuccaagggcgggaagaccugcggguucgucgacgagcggggccuguacaagagccugaagggcgccugcaagcucaagcugugcggggugccgggccugcgccucauggacgggaccugggugaccauccagacgagcgacgagaccaaguggugccccuccgaccagcuggucaaccugcacgacuuccacagcgacgagaucgagcaccucgugguggaggagcuggucaagaagcgggaggagugccuggacgcgcucgaguccaucaugaccaccaagagcguguccuuccgccggcugagccaccuccgcaagcuggugcccggcuucgggaaggccuacacgaucuucaacaagacccugauggaggccgacgcccacuacaaguccauccggaccuggaacgagaucauccccagcaagggcugccugaaggucggcgggcgcugccacccgcacguggacggcguguucuucaacgggaucauccucggccccgacgggaacguccugauccccgagaugcaguccagccugcuccagcagcacguggagcugcuggaguccagcgucaucccccucaugcacccgcuggccgaccccuccaccguguucaaggacggcgacgaggcggaggacuucguggagguccaccuccccgacauccacaagcaggucagcggcguggaccuggggcugcccaacuggggcaaguaccugcucauguccgccggggcccuggccacgcugaugcucaccaucuuccugaucacgugcugccggcgcagcaaccggaccgaguccauccagcgcgacccgggcgagagcgggaagaagguguccaucaccagccaggacggcaaggugaucagcuccugggagcuguacaagagcggcggggagacccggcuguga

SEQ ID NO: 95331 - RNA, 1575 nt, Artificial Sequence; identical to SEQ ID NO: 95292
  derived and/or modified CDS sequence (opt1) from glycoprotein__RABV__JQ685941.1

SEQ ID NO: 95332 - RNA, 1575 nt, Artificial Sequence
  derived and/or modified CDS sequence (opt1) from glycoprotein__RABV__JQ685942.1
augaucccccaggcccugcuccuggugccgcugcucaucagcucccugugcuucggcggguuccccaucuacaccauccccgacaagcugggccccuggagcccgaucgacauccaccaccucuccugccccaacaaccuggucguggaggacgaggggugcaccagccuguccggcuucagcuacauggagcucaaggugggguacaucuccgccaucaaggucaacggcuucacgugcaccggcguggugaccgaggcggagaccuacacgaacuucgucggguacgugaccaccaccuucaagcgcaagcacuuccggcccacgcccgacgccugccgcgccgccuacaacuggaagauggccggcgacccgcgguacgaggagagccugcagaaccccuaccccgacuaccacuggcugcgcaccgugaagaccaccaaggagucccucaucaucaucagccccuccgucgcggaccuggacccguacgacaagagccugcacucccggguguuccccgggggcaagugccucgggaucacggugagcuccaccuacugcagcaccaaccacgacuacaccaucuggaugcccgaggaggcccgccugggcacguccugcgacaucuucaccaacagccggggcaagcgcgccuccaagggcgggaagaccugcggguucgucgacgagcggggccuguacaagagccucaagggcgccugcaagcugaagcugugcggggugcccggccuccgccugauggacgggaccugggugacgauccagaccagcgacgagaccaaguggugcccguccgaccagcuggucaaccuccacgacuuccacagcgacgagaucgagcaccuggugguggaggagcuggucaagaagcgggaggagugccucgacgcgcuggaguccaucaugaccaccaagagcguguccuuccgccggcugagccaccuccgcaagcuggugcccggcuucgggaaggccuacacgaucuucaacaagacccugauggaggccgacgcccacuacaaguccauccggaccuggaacgagaucauccccagcaagggcugccucaaggucggcgggcgcugccacccccacguggacggcguguucuucaacgggaucauccugggcccggacgggaacguccugauccccgagaugcaguccagccuccugcagcagcacguggagcugcucgaguccagcgucaucccccugaugcacccccuggccgacccguccacgguguucaaggacggcgacgaggcggaggacuucguggagguccaccuccccgacauccacaagcaggucagcggcguggaccuggggcugcccaacuggggcaaguaccuccugauguccgccggggcccuggccacccucauccugaccaucuuccuggugaccugcugccggcgcguggaccggacgcgcagcauccagcggggcuccggggagagcggccgcaagguguccgucaccagccagaacggcaaggugaucagcuccugggagcuguacaagagcgggggcgagacccgccucuga

SEQ ID NO: 95333 - RNA, 1575 nt, Artificial Sequence
  derived and/or modified CDS sequence (opt1) from glycoprotein__RABV__JQ685943.1
auggugcugcaggcccugcuguucgucccccugcucguguucccgagcugcuucggcaaguuccccaucuacaccauccccgacaagcuggggcccugguccccgaucgacauccaccaccugagcugccccaacaaccucguggucgaggacgagggcugcaacaaccuguccggguucagcuacauggagcugaaggugggcuacaucuccgccaucaaggugaacggguucacgugcaccggcgucgugaccgaggcggagaccuacaccaacuucgugggcuacgucacgaccaccuucaagcgcaagcacuuccggcccacccccgacgccugccgcgccgccuacaacuggaagauggccggggacccgcgguacgaggagagccuccacaaccccuaccccgacuaccacuggcugcgcacggugaagaccaccaaggagucccuggugaucaucagccccuccgucgcggaccucgacccguacgacaagagccugcacucccggguguuccccagcggcaagugcuccgggaugaccgugagcuccacgugcugcagcaccaaccacgacuacaccaucuggaugcccgagaacccccgccugggcaccuccugcgacaucuucacgaacagccgggggaagcgcgccuccaagggcagcaagaccugcggcuucgucgacgagcgggggcucuacaagagccugaagggcgccugcaagcugaagcucugcggggugcugggccugcgccucauggacggcaccuggguggccaugcagaccuccgacgagaucaaguggugcccgcccgaccagcuggucaaccugcacgacuuccggagcgacgagaucgagcaccucgugguggaggagcuggucaagaagcgcgaggagugccuggacgcgcucgaguccaucaugacgaccaagagcguguccuuccggcgccugagccaccuccggaagcuggugcccggguucggcaaggccuacaccaucuucaaccgcacccugauggaggccgacgcccacuacaaguccguccggacguggaacgaggugauccccagcaaggggugccugcgcgucggcgggcggugccacccgcacgugaacggcguguucuucaacggcaucauccucgggcccgacggccacguccugauccccgagaugcaguccagccugcuccagcagcacauggagcugcuggaguccagcgugaucccccucaugcacccgcuggccaaccccuccaccguguucaaggagggggacgaggcggaggacuucgucgaggugcaccuccccgacgugcacaagcaggucagcggcguggaccuggggcugcccaacuggggcaaguacgugcugauguccgccggcgcccucaucgcccugaugcugaucaucuuccucaugaccugcugccgccgggucaaccgcccggagagcacccagcgcauccucgggggcacggggaagaagguguccgccgcgagccaguccggcaaggugaucagcagcugggaguccuacaagagcgggggcgagacccagcuguga

SEQ ID NO: 95334 - RNA, 1575 nt, Artificial Sequence
  derived and/or modified CDS sequence (opt1) from glycoprotein__RABV__JQ685944.1
auggugccccaggcccugcucgucgugccgcugcugggcuucagccucugcuucgggaaguuccccaucuacaccauccccgacaagcugggccccugguccccgaucgacauccaccaccugagcugccccaacaaccucguggucgaggacgaggggugcaccaaccuguccggcuucagcuacauggagcugaaggugggguacaucuccgccaucaaggugaacggcuucacgugcaccggcgucgugaccgaggcggagaccuacacgaacuucgugggguacgucaccaccaccuucaagcgcaagcacuuccaccccacgcccgacgagugccgggccgccuacaacuggaagauggccggcgacccgcgcuacgaggagagccuccacaaccccuaccccgacuaccacuggcugcggaccgugaagaccaccaaggagucccuggugaucaucagccccuccgucgccgaccucgacccguacgacaagagccugcacucccgcguguuccccagcgggaagugcuccggcaucacggugagcuccaccuacugcagcaccaaccacgacuacaccaucuggaugcccgagaacccccggcuggggacguccugcgacaucuucaccaacagccgcggcaagcgggcguccaagggcagcaagaccugcggguucgucgacgagcgcggccucuacaagagccugaagggggccugcaagcugaagcucugcggcgugccgggccugaagcugaucgacgggaccuggaucgccaugcagacguccgacgagaccaaguggugcccgcccgaccagcucgugaaccugcacgacuuccggagcgacgagaucgagcaccuggucguggaggaccucgugaagaagcgcgaggagugccuggacgcccuggaguccaucaugaccaccaagagcgucuccuuccggcgccucagccaccuccggaagcuggugcccggcuucgggaaggcguacacgaucuucaacaagacccugauggaggccgacgcccacuacaaguccgugcgcaccuggaacgagaucauccccagcaagggcugccugaaggucgggggccggugccacccccacgugaacggcgucuucuucaacggggugauccugggccccgacgggcacgugcucauccccgagaugcaguccagccugcugcagcagcacauggagcuccuggaguccagcgucaucccgcugaugcacccccucgccgaccccuccaccguguucaaggacggcgacgaggccgaggacuucguggagauccaccuccccaacguccacaagcaggucagcgggguggaccugggccugccgaacuggggcaaguacgugucccugagcgcgggggcccugacggcccucaugcugaucaucuuccugauggccugcugccgcaaggugaaccggcccgagcccacccagcgcucccucgagggcaaggggcggaaggugagcaucaccucccagagcggcaaggucaucagcuccugggagagcuacaaguccgggggcgagacccgccuguga

SEQ ID NO: 95335 - RNA, 1575 nt, Artificial Sequence; identical to SEQ ID NO: 95296
  derived and/or modified CDS sequence (opt1) from glycoprotein__RABV__JQ685945.1

SEQ ID NO: 95336 - RNA, 1575 nt, Artificial Sequence
  derived and/or modified CDS sequence (opt1) from glycoprotein__RABV__JQ685946.1
augaucccccaggcccugcucuacgugccgcugcugauccccagccucugcuucggcggguuccccaucuacaccauccccgacaagcugggcccguggucccccaucgacauccaccaccugagcugccccaacaaccucgucguggaggacgaggggugcaccucccugagcggcuucuccuacauggagcugaaggugggguacaucagcgccaucaaggucaacggcuucacgugcaccggcguggugaccgaggcggagaccuacacgaacuucgucggguacgugaccaccaccuucaagcgcaagcacuuccggcccaugccggacgccugccgcgccgccuacaacuggaagauggccggcgacccccgguacgaggagucccuccagaaccccuaccccgacuacagcuggcugcgcacggugaagaccaccaaggagucccugaucaucaucagcccguccgucgcggaccucgaccccuacgacaagagccugcacucccggguguuccccgggggcaagugccuggggaucaccaucagcuccacguacugcagcaccaaccacgacuacaccaucuggaugcccgaggaggcccgccucggcaccuccugcgacaucuucacgaacagccggggcaagcgcgccuccaagggcgggaagaccugcggguucguggacgagcggggccuguacaagagccugaagggcgccugcaagcucaagcugugcggggucccgggccugcgccucauggacgggaccugggugaccauccagacgagcgacgagaccaaguggugccccuccgaccagcuggugaaccugcacgacuuccacagcgacgagaucgagcaccucgucguggaggagcuggugaagaagcgggaggagugccuggacgcgcucgaguccaucaugaccaccaagagcgucuccuuccgccggcugagccaccuccgcaagcuggugcccggcuucgggaaggccuacacgaucuucaacaagacccugauggaggccgacgcccacuacaaguccauccggaccuggaacgagaucauccccagcaagggcugccugaaggugggcgggcgcugccacccgcacgucgacggcguguucuucaacgggaucauccucggccccgacgggaacgugcugauccccgagaugcaguccagccugcuccagcagcacgucgagcugcuggaguccagcgugaucccccucaugcacccgcuggccgaccccuccaccgucuucaaggacggcgacgaggcggaggacuucguggaggugcaccuccccgacguccacaagcaggucagcggcguggaccuggggcugcccaacuggggcaaguaccugcucauguccgccggggcccuggccacgcugaugcucaccaucuuccugaugaccuacugccggcgcgccaaccgggcggagagcauccagcgcgacccgggcgaguccgggcggaaggugagcaucaccucccaggacggcaaggugaucagcagcugggagcuguacaaguccggcggggaggcccgccuguga

SEQ ID NO: 95337 - RNA, 1575 nt, Artificial Sequence
  derived and/or modified CDS sequence (opt1) from glycoprotein__RABV__JQ685947.1
augaucccccaggcccuccuguucgugagccugcugaucccgucccucugccugggcgaguuccccaucuacaccauccccgacaagcuggggcccuggaccccgaucgacauccaccaccucagcugccccaacaaccuggucgccgagaacgacggcugcacgucccugagcggguucuccuacauggagcucaaggugggcuacaucagcgcgaucaaggugaacggguucacgugcaccggcgucgugaccgaggccgagaccuacaccaacuucgugggcuacgucaccaccacguucaagcgcaagcacuuccggcccaugcccgacgccugccgcgccgcccacgacuggaagauggcgggggacccgcgguacgaggacucccugcagaaccccuaccccgacuaccacuggcugcgcaccgugaagaccaccaaggagagccucgugaucaucucccccagcgucgccgaccuggacccguacgacaagucccugcacagccggguguuccccuccggcaagugccucgggaucacggugagcuccaccuacugcagcaccaaccacgacuacaccaucuggaugcccgucgagccccgccugggcacguccugcgacaucuucaccaacagccgggggaagcgcgccuccaagggcggccgggugugcggguucguggacgagcgcggccuguacaagagccucaagggggccugcaagcugaagcugugcggcgucccgggcauccggcucauggacgggaccugggugagcauccagaccuccgaggacaucaaguggugcccgcccgaccgccuggugaaccugcacgacuuccacagcgacgagcucgagcaccuggucguggaggagcugaucaagcggcgcgagaacugccucgacgcgcuggaguccaucaugacgaccaagagcguguccuuccggcgccugagccaccuccggaagcugguccccggcuucgggaaggccuacaccaucuucaacaagacccugauggaggccgacgcccacuacaaguccgugaagacguggaacgaggugauccccagcaagggcugccucgaggucgggggcaagugccacccgcccgugaacggcgucuucuucaacgggaucauccugggccccgacgggaacgugcugauccccgagaugcaguccagccuccugcagcagcacauggagcugcucgaguccagcgugaucccccugaugcacccccuggccgaccccuccaccgucuucaaggagggcgacgaggcggaggacuucguggaggugcaccucccggacguccacaagcaggucagcgacguggaccuggggcugcccuccuggggcaaguaccuccugaugagcgccggcgcccuggccauccucauccuggccaucgugcugaucaucugcugccgccgggugaacaagacccgcuccacccagcgggggcagcgcgagagccgcggcaagauguccguggcgccccagaacgggaagaucaucagcagcugggagcuguacaagcgggaguccgagacgggccucuga

SEQ ID NO: 95338 - RNA, 1575 nt, Artificial Sequence; identical to SEQ ID NO: 95336
  derived and/or modified CDS sequence (opt1) from glycoprotein__RABV__JQ685951.1

SEQ ID NO: 95339 - RNA, 1575 nt, Artificial Sequence
  derived and/or modified CDS sequence (opt1) from glycoprotein__RABV__JQ685952.1
augaucccccaggccauccugagcgugccgcuccugaucuccagccugugcuucggcaaguuccccaucuacaccauccccgagaagcucgggcccugguccccgaucgacauccaccaccugagcugccccaacaaccuggucguggaggacgagggcugcaccacccucuccggguucagcuacaucgagcugaaggugggcuacaucuccgccaucaaggucaacggguucacgugcaccggcguggugaccgaggcggagacguacaccaacuucgucggcuacgugaccaccacguucaagcgcaagcacuuccggcccaugcccgacgccugccgcgccgccuacaacuggaagauggccggggacccgcgguacgaggagagccugcacaaccccuaccccgacuaccacuggcuccgcaccgugaagaccaccaaggagucccuggucaucaucagccccuccguggcggaccuggacccguacgacaagagccuccacucccggguguuccccggcgggaagugccugggcaucacgaucagcuccaccuacugcagcaccaaccacgacuacaccaucuggaugcccgaggaggcccgccuggggacguccugcgacaucuucaucaacagccggggcaagcgcgccuccaagggcgggcggaccugcggcuucgucgacgagcgcgggcucuacaagagccugaagggcgccugcaagcugaagcucugcggcgugcccgggcugcggcugauggacggcaccugggugagcaucccggcguccgacgagaccaaguggugcagccccgaccagcucgucaacgugcacgacuuccacuccgacgagaucgagcaccugguggucgaggagcuggugaagcgccgggaggagugccucgacgcccuggagagcaucgugacgaccaaguccaucagcuuccgccggcugucccaccuccgcaagcugguccccggguucggcaaggccuacaccaucuucaacaagacccugauggaggccgacgcccacuacaagagcgugcggacguggaacgagaucauccccuccaaggggugccucagcgugggcggccgcugccacccgcacgucaacgggguguucuucaacggcaucauccuggggcccgacggcaacguccugauccccgagaugcaguccagccuccugcagcagcacauggagcugcucgaguccagcgugaucccccugaugcacccgcuggcggaccccuccaccguguucaaggacggggacgaggccgaggacuucgucgaggugcaccuccccgacgugcaggagcaggucagcggcguggaccugggccugcccaacugggggaaguacgugcucauguccgccggcgcccuggccauccugauccucaccaucuuccugaucacgugcugccggcgcgcggacaagaccaagagcauccagcaggggcugggcggguccggccggaaggucagcgugagcccgcagaacggcaaggugaucuccagcugggaguccuacaagaacgggggcgagacccgccucuga

SEQ ID NO: 95340 - RNA, 1575 nt, Artificial Sequence
  derived and/or modified CDS sequence (opt1) from glycoprotein__RABV__JQ685953.1
augaucuuccaggcccugcccuucgugccgcuccugaucagcucccugugccucggcaaguuccccaucuacaccauccccgacaagcuggggcccuggagcccgaucgacauccaccaccuguccugccccaacaaccucgucguggaggacgagggcugcaccagccuguccggguucagcuacauggagcugaaggugggcuacaucuccgccaucaaggucaacggguucacgugcaccggcguggugaccgaggcggagaccuacacgaacuucgucggcuacgugaccaccaccuucaagcgcaagcacuuccggcccauccccgacgccugccgcgccgccuacaacuggaagauggccggggacccgcgguacgaggagagccuccagaaccccuaccccgaguaccacuggcugcgcacggugaagaccaccaaggagucccugaucaucaucagccccuccgucgcggaccucgacccguacaacaagagccugcacucccggguguuccccggcgggaagugccugggcaucaccaucagcuccacguacugcagcaccaaccacgacuacaccaucuggaugcccgaggagccccgccucgggaccuccugcgacaucuucacgagcuccaagggcaagaaggccagcaagggcgggaagaccugcggcuucguggacgagcgggggcuguacaagagccugaagggcgccugcaagcucaagcugugcggcguccuggggcuccgccugauggacggcaccuggguguccauccagaccagcgacgacacgaaguggugcccgcccgaccagcuggugaaccuccacgacuuccacuccgacgagaucgagcaccuggucguggaggagcuggugaagaagcgggaggagugccucgacgcccuggagagcaucaugaccaccaaguccgucagcuuccgccggcuguccuaccuccgcaagcuggugcccggguucggcaaggcguacaccaucuucaacaagacgcugauggaggccgacgcccacuacaagagcgugcggaccuggaacgagaucauccccuccaaggggugccucaagguccgcgagcggugccacccgcccguggacggcguguucuucaacggcaucauccuggggcccgacggcaacguccugauccccgagaugcagagcucccuccugcagcagcacauggagcugcucgagagcuccgugaucccgcugaugcacccccuggccgaccccagcaccgucuucaaggacggggacgaggccgaggacuucguggaggugcaccuccccgacguccacaagcagaucuccggcguggaccuggggcugccgagcuggggcaaguaccuccugaugaucgcgggcgggcuggccacccucgcccugaucaucuucuccauggccugcugccgccgggccaagcgcacggagcccggccggcgcgggagcggcgaguccgggaagcgggugcccgcgaccccgcagacccgcaaggucgugagcagcugggagcuguacaaguccgagggcgacgcccgccuguga

SEQ ID NO: 95341 - RNA, 1575 nt, Artificial Sequence
  derived and/or modified CDS sequence (opt1) from glycoprotein__RABV__JQ685954.1
auggugccccaggcccugcuguucgucccgcugcugauccccagcgugugccucggcaaguuccccaucuacaccauccccgacaagcuggggccguggucccccaucgacauccaccaccugagcugccccaacaaccucguggucgaggacgagggcugcuccaaccugagcggguucuccuacauggagcugaaggugggcuacaucagcgccaucaagguggacggguucacgugcaccggcgucgugaccgaggcggagaccuacaccaacuucaucggcuacgugacgaccaccuucaagcgcaagcacuuccggcccaugccggacgccugccgcuccgccuacaacuggaagaucgccggggacccccgguacgaggagagccuccacacccccuaccccgacuaccacuggcugcgcacggucaagaccaccaaggagucccuggugaucaucagcccguccguggccgaccucgaccccuacgacaagagccugcacuccauggucuuccccaacggcaagugcagcgggaucaccguguacuccacguacugcagcaccaaccacgacuacaccaucuggaugcccgagaaggcgggccuggggaccuccugcgacaucuucacgaacagcaagggcaagcgggccuccaagggcgggcggaccugcggcuucguggacgagcgcgggcucuacaagagccugcgcggcgccugcaagcugaagcucugcggcgucccggggcugcggcugauggacggcaccugggccaccauccagacgcccgaggagaccaaguggugcagccccgaccagcucgugaaccugcacgacuuccacuccgacgagaucgagcaccugguggucgaggaccucgugaagaagcgcgaggagugccuggacacccuggagagcaucaugaccacgaaguccgugagcuuccggcgccucucccaccuccggaagcugguccccggguucggcaaggcguacaccaucuucaacaagacccucauggaggccgacgcccacuacaagagcgugcgcaccuggaacgagaucaucccguccaaggggugccugcgggugggcggccgcugccacccccacgucaacgggguguucuucaacggcgucaucauggggcccgacggccacgugcugauccccgagaugcagagcucccuccugcagcagcacauggagcugcucgagagcuccgugaucccgcugauccacccccuggccgaccccagcacggucuucaaggacaacgacgaggccgaggacuucguggaggugcaccuccccgacguccacaagcaggucuccgggaucgaccugggccugccgagcuggggccgguaccuccugaugaucgcgggggcccugaugacccucacccuggugaucuuccugaugaucugcugccgccgggugaacaaggccggcuccauccagcaggaccccgagaaguccgagcgccggcgcagcgugacgccccagaacgggaaggugaucagcuccugggagagcuacaagagcggcuccgagacccgccucuga

SEQ ID NO: 95342 - RNA, 1575 nt, Artificial Sequence
  derived and/or modified CDS sequence (opt1) from glycoprotein__RABV__JQ685955.1
augaucagccaggccuuccuguacgugccccuccugaucuccagccugugcuucggcaaguucccgaucuacaccauccccgacaagaucgggcccuggucccccaucgacauccaccaccucagcugcccgaacaaccuggucguggaggacgagggcugcaccucccugagcggguucuccuacauggagcucaaggugggcuacaucagcgccaucaaggucaacggguucacgugcaccggcguggugaccgaggcggagaccuacacgaacuucgucggcuacgugaccaccaccuucaagcgcaagcacuuccggcccaugcccgacgccugccgcuccgccuacaacuggaagacggccggggacccccgguacgaggagagccugcagaacccguaccccgacuacuccuggcugcgcaccgugaagaccaccaaggagagccucgucaucaucucccccagcguggccgaccuggaccccuacgacaagucccugcacagccggguguucccgaacggcaagugccucgggaucacgaucuccagcaccuacugcuccaccaaccacgacuacaccaucuggaugcccgaggaggcgcgccugggcacgagcugcgacaucuucaccaacagcaaggggaagcgggccuccaagggcggccggaccugcggguucgucgacgagcgcggccuguacaagagccuccgcggggccugcaagcugaagcugugcggcgugcccggccuccggcugauggacgggaccuggguguccauccagacgagcgacgagaccaaguggugcccgcccgaccagcuggucaacgugcacgacuuccacuccgacgagaucgagcaccucguggucgaggagcuggugaagaagcgcgaggagugccuggacgcccucgagagcaucaugaccaccaaguccgugagcuuccggcgccugucccaccuccggaagcugguccccggcuucgggaaggcguacacgaucuucaacaagacccugauggaggccgacgcccacuacaagagcgugcagaccuggaacgagaucauccccuccaagggcugccugaaggucgggggcaugugccacccccacguggacggcguguucuucaacgggaucauccucggcccggacgggaacguccugauccccgagaugcagagcucccugcuccagcagcacauggagcugcuggagagcuccgugaucccccucaugcacccccuggccgacccgagcaccguguucaaggacggcgacgaggccgaggacuucgucgaggugcaccuccccgacauccacaagcaggucuccgggaucgaccugggccugcccgacuggggcaaguaccugcucaugagcgcgggggcccuggccauccugcuccugacgaucuuccugaugaccugcugccgccgggugaaccgcaccgaguccgcccagcgggaccccggcgagcucgggcgcaaggugagcgccaccccgcagaaccggaaggugaucagcuccugggagcuguacaagagcggcggggacacgcgccuguga

SEQ ID NO: 95343 - RNA, 1575 nt, Artificial Sequence
  derived and/or modified CDS sequence (opt1) from glycoprotein__RABV__JQ685956.1
augaucccccaggcccugcucuacgugccgcugcugaucagcucccucugcuucggcggguuccccaucuacaccauccccgacaagcugggccccuggagcccgaucgacauccaccaccuguccugccccaacaaccucgucguggaggacgaggggugcaccagccuguccggcuucagcuacauggagcugaaggugggguacaucuccgccaucaaggucaacggcuucacgugcaccggcguggugaccgaggcggagaccuacacgaacuucgucggguacgugaccaccaccuucaagcgcaagcacuuccggcccaugcccgacgccugccgcgccgccuacaacuggaagguggccggcgacccgcgguacgaggagagccuccagaaccccuaccccgacuacuccuggcugcgcacggucaagaccaccaaggagagccugaucaucaucucccccagcguggcggaccucgacccguacgacaagucccugcacagccggguguuccccgggggcaagugccuggggaucaccaucuccagcacguacugcuccaccaaccacgacuacaccaucuggaugcccgaggaggcccgccucggcaccagcugcgacaucuucacgaacucccggggcaagcgcgccagcaagggcgggaagaccugcggguucgucgacgagcggggccuguacaagagccugaagggcgccugcaagcucaagcugugcggggugcccggccugcgccucauggacgggaccugggugaccauccagacguccgacgagaccaaguggugcccgagcgaccagcuggucaaccugcacgacuuccacuccgacgagaucgagcaccucgugguggaggagcuggucaagaagcgggaggagugccuggacgcgcucgagagcaucaugaccaccaaguccgugagcuuccgccggcugucccaccuccgcaagcuggugcccggcuucgggaaggccuacacgaucuucaacaagacccugauggaggccgacgcccacuacaagagcauccggaccuggaacgagaucauccccuccaagggcugccugaaggucggcgggcgcugccacccccacguggacggcguguucuucaacgggaucauccucggcccggacgggaacguccugauccccgagaugcagagcucccugcuccagcagcacguggagcugcuggagagcuccgucaucccccucaugcacccccuggccgacccgagcaccguguucaaggacggcgacgaggcggaggacuucguggagguccaccuccccgacauccacaagcaggucuccggcguggaccuggggcugcccaacuggggcaaguaccugcucaugagcgccggggcccuggccacgcugaugcucaccaucuuccugaugaccugcugccggcgcgccaaccggaccgaguccauccagcgcgaccccggcgagagcgggaagaagguguccaucacgagccaggacggcaaggugaucagcuccugggagcuguacaagagcggcggggagacccggcuguga

SEQ ID NO: 95344 - RNA, 1575 nt, Artificial Sequence
  derived and/or modified CDS sequence (opt1) from glycoprotein__RABV__JQ685957.1
augaucagccaggcccugcuguucgugccccugcugaucuccagccucugccugggcgaguucccgaucuacaccauccccgagaagcuggggcccuggucccccaucgacauccaccaccucagcugcccgaacaaccuggucguggaggacgagggcugcaacucccugagcggguucuccuacauggagcucaaggugggcuacaucagcuccaucaaggucaacggguucacgugcaccggcguggugaccgaggccgagaccuacaccaacuucgucggcuacgugacgaccaccuucaagcgcaagcacuuccggcccaugcccgacgcgugccgcgccgccuacaacuggaagaugagcggggacccccgguacgaggagucccugcacaacccguaccccgacuaccacuggcugcgcaccgugaagacgaccaaggagagccucgucaucaucucccccagcguggccgaccuggaccccuacgacaagucccugcacagccggguguucuccggcgggaagugccucggcaucaccaucagcuccaccuacugcagcacgaaccacgacuacaccaucuggaugccggaggaggcccgccuggggaccagcugcgacaucuucaccaacuccaagggcaagaaggcgagcaagggcgggcggacgugcggcuucgucgacgagcgcgggcuguacaagucccucaagggcgccugcaagcugaagcugugcggcgugcccgggcuccggcugauggacggcaccugggugagcauccagaccuccgacgagaccaaguggugcccgcccgaccagcuggucaacauccacgacuuccgcagcgacgagaucgagcaccucgugguggaggagcuggucaagaagcgggaggagugccuggacgcccucgaguccaucaugacgaccaagagcguguccuuccgccggcugagccaccuccgcaagcucgugcccggguucggcaaggccuacaccaucuucaacaagacccugauggaggcggacgcccacuacaaguccguccggacguggaacgagaucauccccagcaaggggugccuguccgugggcggccgcugccacccccacguggacggggucuucuucaacggcaucauccucgggcccgacggcagcgugcugaucccggagaugcaguccagccugcuccagcagcacauggagcugcuggaguccagcgucaucccccucaugcacccccuggccaaccccuccaccguguucaaggacggggacgaggccgaggacuucguggagguccaccucccggacauccaggagcaggucagcggcguggaccugggccugcccaacugggggaaguacgugcugaugagcgccggcgcgcucgccauccugcugcucaccaucuuccugaugaccugcugcauccggacgaaccgcaccaaguccauccagcaggggcccggcgagagcgggcggaagguguccgugcccccgcagaacggccgcgucaucagcuccugggagagcuucaaguccggcggggagaccggccuguga

SEQ ID NO: 95345 - RNA, 1575 nt, Artificial Sequence; identical to SEQ ID NO: 95308
  derived and/or modified CDS sequence (opt1) from glycoprotein__RABV__JQ685959.1

SEQ ID NO: 95346 - RNA, 1575 nt, Artificial Sequence
  derived and/or modified CDS sequence (opt1) from glycoprotein__RABV__JQ685960.1
augaucccccaggcccugcucuacgugccgcugcugaucagcucccucugcuucggcggguuccccaucuacaccauccccgacaagcugggccccuggagcccgaucgacauccaccaccuguccugccccaacaaccucgucguggaggacgaggggugcaccagccuguccggcuucagcuacauggagcugaaggugggguacaucuccgccaucaaggucaacggcuucacgugcaccggcguggugaccgaggcggagaccuacacgaacuucgucggguacgugaccaccaccuucaagcgcaagcacuuccggcccaugcccgacgccugccgcgccgccuacaacuggaagguggccggcgacccgcgguacgaggagagccuccagaaccccuaccccgacuacuccuggcugcgcacggucaagaccaccaaggagagccugaucaucaucucccccagcguggcggaccucgacccguacgacaagucccugcacagccggguguuccccgggggcaagugccuggggaucaccaucuccagcacguacugcuccaccaaccacgacuacaccaucuggaugcccgaggaggcccgccucggcaccagcugcgacaucuucacgaacucccggggcaagcgcgccagcaagggcgggaagaccugcggguucgucgacgagcggggccuguacaagagccugaagggcgccugcaagcucaagcugugcggggugcccggccugcgccucauggacgggaccugggugaccauccagacguccgacgagaccaaguggugcccgagcgaccagcuggucaaccugcacgacuuccacuccgacgagaucgagcaccucgugguggaggagcuggucaagaagcgggaggagugccuggacgcgcucgagagcaucaugaccaccaaguccgugagcuuccgccggcugucccaccuccgcaagcuggugcccggcuucgggaaggccuacacgaucuucaacaagacccugauggaggccgacgcccacuacaagagcauccggaccuggaacgagaucauccccuccaagggcugccugaaggucggcgggcgcugccacccccacguggacggcguguucuucaacgggaucauccucggcccggacgggaacguccugauccccgagaugcagagcucccugcuccagcagcacguggagcugcuggagagcuccgucaucccccucaugcacccccuggccgacccgagcaccguguucaaggacggcgacgaggcggaggacuucguggagguccaccuccccgacauccacaagcaggucuccggcguggaccuggggcugcccaacuggggcaaguaccugcucaugagcgccggggcccuggccacgcugaugcucaccaucuuccugaugaccugcugccggcgcgccaaccggaccgaguccauccagcgcgaccccggcgagagcgggaagaagguguccaucacgagccaggacggcaaggugaucagcuccugggagcuguacaagcggggcggggagacccgccuguga

SEQ ID NO: 95347 - RNA, 1575 nt, Artificial Sequence
  derived and/or modified CDS sequence (opt1) from glycoprotein__RABV__JQ685961.1
augaucccccaggcccugcucuacgugccgcugcugaucagcccccucugcuucggcggguuccccaucuacaccauccccgacaagcugggcccguggucccccaucgacauccaccaccugagcugccccaacaaccucgucguggaggacgaggggugcaccucccugagcggcuucuccuacauggagcugaaggugggguacaucagcgccaucaaggucaacggcuucacgugcaccggcguggugaccgaggcggagaccuacacgaacuucgucggguacgugaccaccaccuucaagcgcaagcacuuccggcccaugccggacgccugccgcgccgccuacaacuggaagguggccggcgacccccgguacgaggagucccuccagaaccccuaccccgacuacagcuggcugcgcacggucaagaccaccaaggagucccugaucaucaucagcccguccguggcggaccucgaccccuacgacaagagccugcacucccggguguuccccgggggcaagugccuggggaucaccaucagcuccacguacugcagcaccaaccacgacuacaccaucuggaugcccgaggaggcccgccucggcaccuccugcgacaucuucacgaacagccggggcaagcgcgccuccaagggcgggaagaccugcggguucgucgacgagcggggccuguacaagagccugaagggcgccugcaagcucaagcugugcggggugccgggccugcgccucauggacgggaccugggugaccauccagacgagcgacgagaccaaguggugccccuccgaccagcuggucaaccugcacgacuuccacagcgacgagaucgagcaccucgugguggaggagcuggucaagaagcgggaggagugccuggacgcgcucgaguccaucaugaccaccaagagcguguccuuccgccggcugagccaccuccgcaagcuggugcccggcuucgggaaggccuacacgaucuucaacaagacccugauggaggccgacgcccacuacaaguccauccggaccuggaacgagaucauccccagcaagggcugccugaaggucggcgggcgcugccacccgcacguggacggcguguucuucaacgggaucauccucggccccgacgggaacguccugauccccgagaugcaguccagccugcuccagcagcacguggagcugcuggaguccagcgucaucccccucaugcacccgcuggccgaccccuccaccguguucaaggacggcgacgaggcggaggacuucguggagguccaccuccccgacauccacaagcaggucagcggcguggaccuggggcugcccaacuggggcaaguaccugcucaucuccgccggggcccuggccacgcugaugcucaccaucuuccugaugaccugcugccggcgcgccaaccggaccgagagcauccagcgcgacccgggcgagcccgggaagaagguguccaucacgagccaggacggcaaggugaucuccagcugggagcuguacaagagcggcggggagacccggcuguga

SEQ ID NO: 95348 - RNA, 1575 nt, Artificial Sequence
  derived and/or modified CDS sequence (opt1) from glycoprotein__RABV__JQ685962.1
augaucccccaggcccugcucuacgugccgcugcugauccccagccucugcuucggcggguuccccaucuacaccauccccgacaagcugggcccguggucccccaucgacauccaccaccugagcugccccaacaaccucgucguggaggacgaggggugcaccucccugagcggcuucuccuacauggagcugaaggugggguacaucagcgccaucaaggucaacggcuucacgugcaccggcguggugaccgaggcggagaccuacacgaacuucgucggguacgugaccaccaccuucaagcgcaagcacuuccggcccaugccggacgccugccgcgccgccuacaacuggaagguggccggcgacccccgguacgaggagucccuccagaaccccuaccccgacuacagcuggcugcgcacggucaagaccaccaaggagucccugaucaucaucagcccguccguggcggaccucgaccccuacgacaagagccugcacucccggguguuccccgggggcaagugccuggggaucaccaucagcuccacguacugcagcaccaaccacgacuacaccaucuggaugcccgaggaggcccgccucggcaccuccugcgacaucuucacgaacagccggggcaagcgcgccuccaagggcgggaagaccugcggguucgucgacgagcggggccuguacaagagccugaagggcgccugcaagcucaagcugugcggggugccgggccugcgccucauggacgggaccugggugaccauccagacgagcgacgagaccaaguggugccccuccgaccagcuggucaaccugcacgacuuccacagcgacgagaucgagcaccucgugguggaggagcuggucaagaagcgggaggagugccuggacgcgcucgaguccaucaugaccaccaagagcguguccuuccgccggcugagccaccuccgcaagcuggugcccggcuucgggaaggccuacacgaucuucaacaagacccugauggaggccgacgcccacuacaaguccauccggaccuggaacgagaucauccccagcaagggcugccugaagguccgcggccggugccacccgcacguggacgggguguucuucaacggcaucauccucgggcccgacggcaacguccugauccccgagaugcaguccagccugcuccagcagcacguggagcugcuggaguccagcgucaucccccucaugcacccgcuggccgaccccuccaccguguucaaggacggggacgaggcggaggacuucguggagguccaccuccccgacauccacaagcaggucagcggcguggaccugggccugcccaacugggggaaguaccugcucauguccgccggcgcccuggccacgcugaugcucaccaucuuccugaugaccugcugccgccggagcaaccgcaccgaguccauccagcgggacccgggggagagcggcaagaagguguccaucacgagccaggacgggaaggugaucagcuccugggagcuguacaagagcggcggcgagacccgccuguga

SEQ ID NO: 95349 - RNA, 1575 nt, Artificial Sequence
  derived and/or modified CDS sequence (opt1) from glycoprotein__RABV__JQ685963.1
augauccugcaggcccuccuguucgugccccugcucaucagcucccugugccugggcaaguucccgaucuacaccauccccgacaagcucgggcccuggagccccaucgacauccaccaccuguccugcccgaacaaccuggucguggaggacgagggcugcaccagccucuccggguucagcuacauggagcugaaggugggcuacaucuccagcaucaaggucaacggguucacgugcaccggcguggugaccgaggccgagaccuacacgaacuucgucggcuacgugaccaccaccuucaagcgcaagcacuuccggcccauccccgacgcgugccgcgccgccuacaacuggaagauggccggggacccccgguacgaggagucccugcagaacccguaccccgacuaccacuggcuccgcacggugaagaccaccaaggagagccugaucaucaucucccccagcgucgccgaccuggaccccuacgacaagucccuccacagccggguguucccgggcgggaagugccugggcaucaccaucuccagcacguacugcuccaccaaccacgacuacaccguguggaugcccgaggagccccgccuggggaccuucugcgacaucuucacgaacagcaagggcaagaaggcguccaagggcgggaaggucugcggcuucguggacgagcgggggcucuacaagagccugaagggcgccugcaagcugaagcucugcggcgugcccgggcugcgccugauggacggcaccugggucaccauccagaccagcgaggaggugaaguggugcccggccgaccagcucgugaaccugcacgacuuccacuccgacgagaucgagcaccuggucguggaggagcucgugaagaagcgggaggagugccuggacgcccuggagagcaucaugacgaccaaguccgucagcuuccgccggcucuccuaccugcgcaagcuggugcccggguucggcaaggcguacaccaucuucaacaagacccucauggaggccgacgcccacuacaagagcgugcggacguggaacgagaucauccccuccaaggggugccugaaggucaaggagcgcugccacccccacguggacggcgucuucuucaacggcaucauccuggggccggacggcaacgugcucauccccgagaugcagagcucccugcugcagcagcacauggagcuccuggagagcuccgugaucccccugaugcacccccucgccgacccgagcaccgucuucaaggacggggacgaggccgaggacuucguggaggugcaccuccccgacguccacaagcagaucuccggcguggaccuggggcugcccagcuggggcaaguaccugcugaugaucgcgggcgggcucgccgcccuggugcugaucaucuuccugauggucugcugccggcgcaccaagcggaccgagucccgccggcgcggcagcggggaguccggcaagaaggugagcgugacgccccagacccggaaggucguguccagcugggagcucuacaagagcgagggggacgcccgccuguga

SEQ ID NO: 95350 - RNA, 1575 nt, Artificial Sequence
  derived and/or modified CDS sequence (opt1) from glycoprotein__RABV__JQ685964.1
augaucccccaggcccugcucuacgugccgcugcugaucagcucccucugcuucggcggguuccccaucuacaccauccccgacaagcugggccccuggagcccgaucgacauccaccaccuguccugccccaacaaccucgucguggaggacgaggggugcaccagccuguccggcuucagcuacauggagcugaaggugggguacaucuccgccaucaaggucaacggcuucacgugcaccggcguggugaccgaggcggagaccuacacgaacuucgucggguacgugaccaccaccuucaagcgcaagcacuuccggcccaugcccgacgccugccgcgccgccuacaacuggaagauggccggcgacccgcgguacgaggagagccuccagaaccccuaccccgacuacuccuggcugcgcacggugaagaccaccaaggagagccugaucaucaucucccccagcgucgcggaccucgacccguacgacaagucccugcacagccggguguuccccgggggcaagugccuggggaucaccaucuccagcacguacugcuccaccaaccacgacuacaccaucuggaugcccgaggaggcccgccucggcaccagcugcgacaucuucacgaacucccggggcaagcgcgccagcaagggcgggaagaccugcggguucguggacgagcggggccuguacaagagccugaagggcgccugcaagcucaagcugugcgggguccccggccugcgccucauggacgggaccugggugaccauccagacguccgacgagaccaaguggugcccgagcgaccagcuggugaaccugcacgacuuccacuccgacgagaucgagcaccucgucguggaggagcuggugaagaagcgggaggagugccuggacgcgcucgagagcaucaugaccaccaaguccgucagcuuccgccggcugucccaccuccgcaagcuggugcccggcuucgggaaggccuacacgaucuucaacaagacccugauggaggccgacgcccacuacaagagcauccggaccuggaacgagaucauccccuccaagggcugccugaaggugggcgggcgcugccacccccacgucgacggcguguucuucaacgggaucauccucggcccggacgggaacgugcugauccccgagaugcagagcucccugcuccagcagcacgucgagcugcuggagagcuccgugaucccccucaugcacccccuggccgacccgagcaccgucuucaaggacggcgacgaggcggaggacuucguggaggugcaccuccccgacauccacaagcaggucuccggcguggaccuggggcugcccaacuggggcaaguaccugcucaugagcgccggggcccuggccacgcugaugcucaucaucuuccugauggccugcugccggcgcgcgaaccggaccgaguccauccagcgcgaccccggcgagagcgggaagaagguguccaucccgagccaggacggcaaggucaucagcuccugggagcuguacaagagcggcggggagacccggcuguga

SEQ ID NO: 95351 - RNA, 1575 nt, Artificial Sequence
  derived and/or modified CDS sequence (opt1) from glycoprotein__RABV__JQ685965.1
augaucccccaggccauccugagcgugccgcuccugaucuccagccugugcuucggcaaguuccccaucuacaccauccccgagaagcucgggcccugguccccgaucgacauccaccaccugagcugccccaacaaccuggucguggaggacgagggcugcaccacgcucuccggguucagcuacaucgagcugaaggugggcuacaucuccgccaucaaggucaacggguucacgugcaccggcguggugaccgaggcggagaccuacaccaacuucgucggcuacgugaccaccacguucaagcgcaagcacuuccggcccaugcccgacgccugccgcgccgccuacaacuggaagauggccggggacccgcgguacgaggagagccugcacaaccccuaccccgacuaccacuggcuccgcaccgugaagaccaccaaggagucccuggucaucaucagccccuccguggcggaccuggacccguacgacaagagccuccacucccggguguuccccggcgggaagugccugggcaucacgaucagcuccaccuacugcagcaccaaccacgacuacaccaucuggaugcccgaggaggcccgccuggggacguccugcgacaucuucaccaacagccggggcaagcgcgccuccaagggcgggcggaccugcggcuucgucgacgagcgcgggcucuacaagagccugaagggcgccugcaagcugaagcucugcggcgugcccgggcugcggcugauggacggcaccugggugagcauccaggcguccgacgagacgaaguggugcagcccggaccagcucgucaacgugcacgacuuccacuccgacgagaucgagcaccugguggucgaggagcuggugaagcgccgggaggagugccucgacgcccuggagagcaucgugaccaccaaguccaucagcuuccgccggcugucccaccuccgcaagcugguccccggguucggcaaggccuacaccaucuucaacaagacgcugauggaggccgacgcccacuacaagagcgugcggaccuggaacgagaucauccccuccaaggggugccucagcgugggcggccgcugccacccccacgucaacgggguguucuucaacggcaucauccuggggccggacggcaacguccugauccccgagaugcaguccagccuccugcagcagcacauggagcugcucgaguccagcgugaucccccugaugcacccccuggcggacccguccaccguguucaaggacggggacgaggccgaggacuucgucgaggugcaccuccccgacgugcaggagcaggucagcggcguggaccugggccugcccaacugggggaaguacgugcucauguccgccggcgcccuggccauccugauccucaccaucuuccugaucacgugcugccggcgcgcgaacaagaccaagagcauccagcaggggcugggcggguccggccggaaggucagcgugagcccccagaacggcaaggugaucuccagcugggaguccuacaagagcgggggcgagacccgccucuga

SEQ ID NO: 95352 - RNA, 1575 nt, Artificial Sequence
  derived and/or modified CDS sequence (opt1) from glycoprotein__RABV__JQ685967.1
auggugccccaggcccugcucgucgugccgcugcugggcuucagccucugcuucgggaaguuccccaucuacaccauccccgacaagcugggccccugguccccgaucgacauccaccaccugagcugccccaacaaccucguggucgaggacgaggggugcaccaaccuguccggcuucagcuacauggagcugaaggugggguacaucuccgccaucaaggugaacggcuucacgugcaccggcgucgugaccgaggcggagaccuacacgaacuucgugggguacgucaccaccaccuucaagcgcaagcacuuccggcccacgcccgacgagugccgcgccgccuacaacuggaagauggccggcgacccgcgguacgaggagagccuccacaaccccuaccccgacuaccacuggcugcgcaccgugaagaccaccaaggagucccuggugaucaucagccccuccgucgccgaccucgacccguacgacaagagccugcacucccggguguuccccagcgggaagugcuccggcaucacggugagcuccaccuacugcagcaccaaccacgacuacaccaucuggaugcuggagaacccccgccucgggacguccugcgacaucuucaccaacagccggggcaagcgcgcguccaagggcagcaagaccugcggguucgucgacgagcggggccuguacaagagccugaagggggccugcaagcucaagcugugcggcgugcugggccucaagcugauggacgggaccuggguggccaugcagacguccgacgagaccaaguggugcccgcccgaccagcuggucaaccuccacgaccugcgcagcgacgagaucgagcaccuggugguggaggagcucgucaagaagcgggaggagugccuggacgcccuggaguccaucaugaccaccaagagcguguccuuccgccggcucagccaccuccgcaagcuggugcccggcuucgggaaggcguacacgaucuucaacaagacccugauggaggccgacgcccacuacaaguccguccggaccuggaacgagaucauccccagcaagggcugccugaaggucgggggccgcugccacccccacgugaacggcguguucuucaacggggugauccugggcccggacgggcacguccucauccccgagaugcaguccagccugcugcagcagcacauggagcuccuggaguccagcgugaucccccugaugcacccccucgccgacccguccaccguguucaaggacggcgacgaggccgaggacuucgucgaggugcaccuccccgacgugcacaagcaggucagcgggguggaccugggccugcccaacuggggcaaguacgugucccugagcgcgggggcccugaucgcccucaugcugaucauccugcugaucacgugcugccggaaggucaaccgccccgagccgacccagcggucccucgagggcaaggagcgcaaggugagcgugaccucccagagcgggaaggucaucagcuccugggagagcuacaaguccggcggggagacccggcuguga

SEQ ID NO: 95353 - RNA, 1575 nt, Artificial Sequence
  derived and/or modified CDS sequence (opt1) from glycoprotein__RABV__JQ685968.1
auggugcugcaggcccuccuguucgcccccuuccugaucagcucccucugccugggcaaguucccgaucuacaccauccccgacaagcuggggcccuggagccccaucgacauccaccaccucuccugcccgaacaaccuggucguggaggacgagggcugcaacagccuguccgggaucagcuacauggagcucaaggugggcuacaucuccgcgaucaaggucaacggguucacgugcaccggcguggugaccgaggccgagaccuacaccaacuucgucggcuacgugacgaccaccuucaagcgcaagcacuuccaccccaugcccgacgccugccggagcgccuacaacuggaagcuggccggggacccccgcuacgaggagucccugcacaacccguaccccgacuaccacuggcuccggaccgugaagacgaccaaggagagccugaucaucaucucccccagcgucgcggaccuggaccccuacgacaagucccuccacagccgcaucuucccgcggggcaagugcuccgggaugaccaucagcuccaccuacugcagcacgaaccacgaguacaccaucuggaugcccgagaaggccggccuggggaccuccugcgacaucuucaccacgagcaagggcaagcgcgccagcaagggcgggaagaccugcggcuucguggacgagcgggggcuguacaagucccucaagggcgccugcaagcugaagcugugcggcgugagcgggcuccgccugauggacggcaccugggucgcgauccagaccuccgaggagacgaaguggugcccgcccgaccagcuggugaaccuccacgaccugcacagcgacgagaucgagcaccugguggucgaggagcucgugaagaagcgggaggagugccugaacgcccugaaguccaucaugaccaccaagagcguguccuuccgccggcucagccaccuccgcaagcugguccccggguucggcaaggccuacaccaucuucaacaagacgcugauggaggccgacgcccacuacaaguccauccggaccuggaacgagaucauccccagcaaggggugccugcgcgugggcggcaagugccacccccacguggacggggucuucuucaacggcaucauccuggggcccgacggccacgugcucaucccggagaugcaguccagccugcugcagcagcacauggagcuccuggaguccagcgugaucccccugaugcacccccucgcggaccuguccaccgucuucaaggacggggacgaggccgaggacuucguggagguccaccuccccgacgugcacaagcagaucagcggcguggaccugggccugccguccugggggaaguacguccugaugagcgccggcgcccucgccauccugaugcuggugaucucccugaugaagugcuucuggggcgugaaccggaccaagcccauccagcaggggccccgcgagagcgagcggaaggucagcaucgcgccccagucccgcaaggugaucagcuccugggagagcuacaagaacgggggcgagacggagcucuga

SEQ ID NO: 95354 - RNA, 1575 nt, Artificial Sequence
  derived and/or modified CDS sequence (opt1) from glycoprotein__RABV__JQ685970.1
auggugagccaggcccuccuguucgucagcccccugauccugucccucugcuccggcgaguucccgaucuacaccauccccgacaagcuggggcccuggagccccaucgacauccaccaccuguccugcccgaacaaccucgugguggaggacgagggcugcaccaaccugagcggguucuccuacauggagcugaaggucggcuacaucagcgccaucaaggugaacggguucacgugcaccggcguggucaccgaggcggagaccuacacgaacuucgugggcuacgugaccaccaccuucaagcgcaagcacuuccggcccacgcccgacgccugccgcgccgccuacaacuggaagauggccggggacccccgguacgaggagucccuccacaacccguaccccgacuaccacuggcugcgcaccgucaagaccaccaaggagagccuggugaucaucucccccagcguggcggaccucgaccccuacgacaagucccugcacagccgggucuucccguccggcaagugcagcgggaucacgguguccagcaccuacugccugaccaaccacgacuacaccaucuggaugcccgagaaccuccgccugggcacguccugcgacaucuucaccaacagccgggggaagcgcgccagccggggcuccaagaccugcggcuucguggacgagcgcgggcuguacaagagccucaagggcgccugcaagcugaagcugugcgggguccucggccugcggcugauggacggcaccuggguggccaugcagacguccgacgagaccaaguggugccccagcgaccagcucgugaaccugcacgacuuccgcuccgacgagaucgagcaccuggucguggaggagcucgugaagaagcgggaggagugccuggacgcgaucgagagcaucaugaccaccaaguccgucagcuuccgccggcugucccaccuccgcaagcuggugcccggguucggcaaggccuacacgaucuucaacaagacccugauggaggccgacgcccacuacaagagcgugcggaccuggaacgagaucaucccguccaaggggugccuccgcgucggcgggcggugccacccccacgugaacggcgucuucuucaacggcaucauccuggggcccgacggccacgugcugauccccgagaugcagagcucccuccugcagcagcacguggagcugcucgagagcuccgucaucccgcugaugcacccccuggccgaccccagcaccguguucaaggacggggaggaggcggaggacuucguggagguccaccuccccgacgugcacaagcaggucuccggcguggaccuggggcugccgaacuggggcaaguacgcccucgugagcgccggcgcccugacggcccugaugcucaucgcguuccugaugaccugcugccgcggggugaaccugcccaaguccacccagcggagccccggcgggacccgccgcaaggucagcguggccucccagagcggcaaggugaucgccuccugggaggccuacaagagcgggugcgagacgaagauguga

SEQ ID NO: 95355 - RNA, 1575 nt, Artificial Sequence
  derived and/or modified CDS sequence (opt1) from glycoprotein__RABV__JQ685971.1
augaucccccaggcccuccuguucgugccgcugcugaucagcucccucugcuucggcaaguuccccaucuacaccauccccgagaagcuggggcccuggagcccgaucgacauccaccaccuguccugccccaacaaccucgucgccgaggacgagggcugcaacagccuguccggguucagcuacauggagcugaaggugggcuacaucuccgcgaucaaggugaacggguucacgugcaccggcgucgugaccgaggccgagaccuacaccaacuucgugggcuacgucacgaccaccuucaagcgcaagcacuuccggcccacccccgacgccugccgcgccgccuacaacuggaagauggcgggggacccgcgguacgaggagagccuccacaaccccuaccccgacuaccacuggcugcgcacggugaagaccaccaaggagucccuggugaucaucagccccuccgucgccgaccucgacccguacgacaagagccugcacucccggguguuccccgacggcaagugccuggggaucaccaucagcuccacguacugcagcaccaaccacgacuacaccaucuggaugcccgaggaggcccgccucggcaccuccugcgacaucuucacgaccagcaaggggaagcgggccuccaagggcgacaagaucugcggcuucguggacgagcgcgggcuguacaagagccugaagggcgcgugcaagcucaagcugugcgggguccugggccuccggcugauggacggcaccugggugagcauccagacccccggggagacgaaguggugcuccccggaccagcuggugaaccuccacgacuuccacagcgacgagaucgagcaccuggucgccgaggagcuggugaagaagcgcgaggagugccucgacgcccuggaguccaucaugaccaccaagagcguguccuuccggcgccugagccaccuccggaagcugguccccggcuucgggaaggccuacaccaucuucaacaagacgcugauggaggccgacgcgcacuacaaguccgugcgcaccuggaacgaggugauccccagcaagggcugccucuccgucgggggccggugccacccccacgugaacggcguguucuucaacgggaucauccugggcccggacgggagcguccugauccccgagaugcaguccagccuccugcagcagcacauggagcugcucgaguccagcgugaucccccugaugcacccccuggccgacccguccaccgucuucaaggacggcgacgaggccgagaacuucguggaggugcaccuccccgacguccacaagcaggucagcgggguggaccugggccugcccaacuggggcaaguaccuccugaugaucgccggggcccuggcgacccucaugcugacgaucuuccugaugaccugcugccgccggaccaagcgcgccgaguccauccaguacggccugggggagagcggccggaagguguccgugacgccccagagcgggaaggugaucagcuccugggagagcuacaaguccggcggcgagacccgccucuga

SEQ ID NO: 95356 - RNA, 1575 nt, Artificial Sequence; identical to SEQ ID NO: 95292
  derived and/or modified CDS sequence (opt1) from glycoprotein__RABV__JQ685974.1

SEQ ID NO: 95357 - RNA, 1575 nt, Artificial Sequence
  derived and/or modified CDS sequence (opt1) from glycoprotein__RABV__JQ685975.1
auggugccccaggcccugcuguucgucccgcugcugguguucagccucugcuucggcaaguuccccaucuacaccauccccgacaagcuggggcccugguccccgaucgacauccaccaccugagcugccccaacaaccucguggucgaggacgagggcugcaccaaccuguccggguucagcuacauggagcugaaggugggcuacaucuccgccaucaaggugaacggguucacgugcaccggcgucgugaccgaggcggagaccuacacgaacuucgugggcuacgucaccaccaccuucaagcgcaagcacuuccggcccauccccgacgccugccgcgccgccuacaacuggaagauggccggggacccgcgguacgaggagagccuccacaaccccuaccccgacuaccacuggcugcgcacggugaagaccaccaaggagucccuggugaucaucagccccuccgucgcggaccucgacccguacgacaagagccugcacucccggguguuccccggcgggaagugcagcggcaugaccguguucuccacguacugcagcaccaaccacgacuacaccaucuggaugcccgagaacccccgccuggggaccuccugcgacaucuucgccaacagccggggcaagcgcgccucccggggcagcaagacgugcggguucgucgacgagcgcggccucuacaagucccugaagggggccugcaagcugaagcucugcggcgugcugggccugcggcucguggacgggaccugggucgcgaugcagaccagcgacgacaccaaguggugcccgcccgaccagcuggugaaccugcacgacuuccgcagcgacgagaucgaguaccucguggucgaggagcuggugaagaagcgggaggagugccuggacgcccucgaguccaucaugacgaccaagagcguguccuuccgccggcugagccaccuccgcaagcucguccccggcuucgggaaggccuacaccaucuucaacaagacccugauggaggccgacgcccacuacaaguccgugcggacguggaacgagaucauccccagcaagggcugccugcgcgucgggggccggugccacccgcacgugaacggcguguucuucaacgggaucauccucggccccgacgggcacguccugauccccgagaugcaguccagccugcuccagcagcacauggagcugcuggaguccagcgugaucccccucaugcacccgcuggcggaccccuccaccguguucaaggagggcgacgaggccgaggacuucgucgaggugcaccuccccgacgugcacaagcaggucagcgagguggaccuggggcugcccaacuggggcaaguacauccugaugaucgccggcgcccucaucgcccugaugcugaucaucuuccucaugaccugcugcgggcgcgugaaccgguccgagagcaagcagcgcucccugggcgggaccggccgcaaggucagcgugacgucccagagcgggaaggugaucuccagcugggagagcuacaaguccggcggcgagacccggcuguga

SEQ ID NO: 95358 - RNA, 1575 nt, Artificial Sequence
  derived and/or modified CDS sequence (opt1) from glycoprotein__RABV__JQ685978.1
augaucagccaggcccugcuguucgugccccugcugaucuccagccucugcuucggcgaguucccgaucuacaccauccccgagaagcuggggcccuggucccccaucgacauccaccaccugagcugcccgaacaaccucgucguggaggacgagggcugcaacucccugagcggguucuccuacauggagcugaaggugggcuacaucagcuccaucaaggucaacggguucacgugcaccggcguggugaccgaggccgagaccuacaccaacuucgucggcuacgugacgaccaccuucaagcgcaagcacuuccggcccaugcccgacgcgugccgcgccgccuacaacuggaagaugagcggggacccccgguacgaggagucccuccacaacccguaccccgacuaccacuggcugcgcaccgugaagacgaccaaggagagccuggucaucaucucccccagcguggccgaccucgaccccuacgacaagucccugcacagccggguguucuccggcgggaagugccugggcaucaccaucagcuccaccuacugcagcacgaaccacgacuacaccaucuggaugccggaggaggcccgccucgggaccagcugcgacaucuucaccaacuccaagggcaagaaggcgagcaagggcgggcggacgugcggcuucgucgacgagcgcgggcuguacaagucccugaagggcgccugcaagcucaagcugugcggcgugcccgggcugcggcucauggacggcaccugggugagcauccagaccuccgacgagaccaaguggugcccgcccgaccagcuggucaacauccacgacuuccgcagcgacgagaucgagcaccuggugguggaggagcucgucaagaagcgggaggagugccuggacgcccuggaguccaucaugacgaccaagagcguguccuuccgccggcucagccaccuccgcaagcuggugcccggguucggcaaggccuacaccaucuucaacaagacccucauggaggcggacgcccacuacaaguccguccggacguggaacgagaucauccccagcaaggggugccuguccgugggcggccgcugccacccccacguggacggggucuucuucaacggcaucauccuggggcccgacggcagcgugcucaucccggagaugcaguccagccugcugcagcagcacauggagcuccuggaguccagcgucaucccccugaugcacccccucgccaaccccuccaccguguucaaggacggggacgaggccgaggacuucguggagguccaccucccggacgugcaggagcaggucagcggcgucgaccugggccugcccaacugggggaaguacgugcugaugagcgccggcgcgcuggccauccuccugcugaccaucuuccucaugaccugcugccggcgcgccaaccggacgaaguccauccgccaggggcccggcgagagcgggcggaagguguccgugcccccgcagaacggccgcgugaucagcuccugggagagcuucaaguccggcgacgagaccgggcuguga

SEQ ID NO: 95359 - RNA, 1575 nt, Artificial Sequence; identical to SEQ ID NO: 95358
  derived and/or modified CDS sequence (opt1) from glycoprotein__RABV__JQ685979.1

SEQ ID NO: 95360 - RNA, 1575 nt, Artificial Sequence
  derived and/or modified CDS sequence (opt1) from glycoprotein__RABV__JQ685980.1
auggugccccaggcccugcuguucgucccgcugcuggccuuccccaugugcuucggcaaguuccccaucuacaccauccccgacaagcucgggccguggagccccaucgacauccaccaccuguccugccccaacaaccuggugguggaggacgagggcugcaccaaccucagcggguucuccuacauggagcugaaggucggcuacaucagcgcgaucaaggugaacggguucacgugcaccggcguggucaccgaggccgagaccuacacgaacuucgugggcuacgugaccaccaccuuccgccggaagcacuuccgccccacgccggacgccugccgggccgccuacaacuggaagauggcgggggacccccgcuacgaggagucccugcacaaccccuaccccgacuaccacuggcuccggaccgucaagaccaccaaggagagccugaucaucaucuccccgagcguggccgaccuggaccccuacgacaagucccuccacagccgcguguuccccuccggcaagugccuggggaucacgaucagcuccaccuacugcagcaccaaccacgacuacaccaucuggaugcccgagaaccugcggcucggcacguccugcgacaucuucaccaacagccgcgggaagcgggccuccaagggcagccggaccugcggcuucgucgacgagcgcgggcuguacaagucccugaagggcgccugcaagcucaagcugugcggggugcugggccuccgccugauggacggcaccuggguggcgaugcagacgagcgacgagaccaaguggugcccgcccgaccagcuggucaaccuccacgacuuccggagcgacgagaucgagcaccuggugguggaggagcuggucaagaagcgcgaggagugccucgacgcccuggaguccaucaugaccaccaagagcguguccuuccggcgccugagccaccuccggaagcuggugcccggguucggcaaggccuacacgaucuucaacaagacccugauggaggccgacgcccacuacaaguccguccgcaccuggaacgagaucauccccagcaaggggugccuccgggugggcgggcgcugccacccgcacgugaacggcgucuucuucaacggcaucauccuggggcccgacggccacgugcugauccccgagaugcaguccagccuccugcagcagcacauggagcugcucgaguccagcgucaucccccugaugcacccgcuggcggaccccuccaccguguucaaggacggggacgaggccgaggacuucguggagguccaccuccccgacgugcacaagcagaucagcggcguggaccuggggcugcccaacuggggcaaguacguccucaucaucgccggcgugcugaucgccaugauccugacgaucuuccucaugaccugcugcgggcggggcaaccgcccgaaguccacccagcacagccucgggggcaucgggcgcaagguguccgccaccagccaguccggcaaggucaucagcuccugggagagcuacaagaacggcggggagacgcggcuguga

SEQ ID NO: 95361 - RNA, 1575 nt, Artificial Sequence
  derived and/or modified CDS sequence (opt1) from glycoprotein__RABV__JQ685981.1
auggugccgcagguccugcuguucgugccgcugcugguguucagcaugugcuucggcaaguuccccaucuacaccauccccgacaagcucgggcccugguccccgaucgacauccaccaccugagcugccccaacaaccuggucguggaggacgagggcugcaccaaccucuccggguucagcuacauggagcugaaggugggcuacaucuccgccaucaaggucaacggguucacgugcaccggcguggugaccgaggccgagaccuacacgaacuucgucggcuacgugaccaccaccuucaagcgcaagcacuuccggcccacgcccgacgcgugccgcgccgccuacaacuggaagauggccggggacccgcgguacgaggagagccugcacaaccccuaccccgacuaccacuggcuccgcaccgugaagaccaccaaggagucccuggucaucaucagccccuccguggccgaccuggacccguacgacaagagccuccacucccggguguuccccagcggcaagugcuccgggaucacgaucagcuccaccuacugcagcaccaaccacgacuacaccaucuggaugcccgagaacccccgccugggcacguccugcgacaucuucaccaacagccgggggaagcgcgcguccaagggcggcaagaccugcggguucgucgacgagcggggccuguacaagagccucaagggggccugcaagcugaagcugugcggcgugcucggccugcgccugauggacgggaccuggguggccaugcagacgagcgacgagaccaaguggugcccgcccgaccagcucgucaaccugcacgacuuccgguccgacgagaucgagcaccuggugguggaggagcucgucaagaagcgcgaggagugccuggacgcccuggagagcaucaugaccaccaaguccgugagcuuccggcgccucucccaccuccggaagcuggugcccggcuucgggaaggcguacacgaucuucaacaagacccucauggaggccgacgcccacuacaagagcguccgcaccuggaacgagaucauccccuccaagggcugccugcgggucgggggccgcugccacccgcacgugaagggcguguucuucaacgggaucauccugggccccgacgggcacgugcucauccccgagaugcagagcucccugcugcagcagcacauggagcuccuggagagcuccgucaucccccugaugcacccgcucgccgaccccagcaccguguucaaggacggcgacgaggccgaggacuucguggagguccaccuccccgacgugcacaagcagaucuccgggguggaccugggccugcccagcuggggccgguacguccugguguccgcgggggugcuggucgugcucaugcugacgaucuucaucaucacgugcugcggccgcgugcaccggcccaagagcacccagcacgggcugggcgggaccggccgcaaggucuccgugaccagccaguccggcaaggugaucagcagcugggaguccuacaagagcgggggcgagacccgccucuga

SEQ ID NO: 95362 - RNA, 1575 nt, Artificial Sequence
  derived and/or modified CDS sequence (opt1) from glycoprotein__RABV__JQ685982.1
auggugccccaggcccugcuguucgucccgcugcuggccuuccccaugugcuucggcaaguuccccaucuacaccauccccgacaagcucgggccguggagccccaucgacauccaccaccuguccugccccaacaaccuggugguggaggacgagggcugcaccaaccucagcggguucuccuacauggagcugaaggucggcuacaucagcgcgaucaaggugaacggguucacgugcaccggcguggucaccgaggccgagaccuacacgaacuucgugggcuacgugaccaccaccuucaagcgcaagcacuuccggcccacgccggacgccugccgcgccgccuacaacuggaagauggcgggggacccccgguacgaggagucccugcacaaccccuaccccgacuaccacuggcuccgcaccgucaagaccaccaaggagagccugaucaucaucuccccgagcguggccgaccuggaccccuacgacaagucccuccacagccggguguuccccuccggcaagugccuggggaucacgaucagcuccaccuacugcagcaccaaccacgacuacaccaucuggaugcccgagaaccugcgccucggcacguccugcgacaucuucaccaacagccgggggaagcgcgccuccaagggcagcaagaccugcggcuucgucgacgagcgggggcuguacaagucccugaagggcgccugcaagcucaagcugugcggggugcugggccuccgccugauggacggcaccuggguggcgaugcagacgagcgacgagaccaaguggugcccgcccgaccagcuggucaaccuccacgacuuccggagcgacgagaucgagcaccuggugguggaggagcuggucaagaagcgcgaggagugccucgacgcccuggaguccaucaugaccaccaagagcguguccuuccggcgccugagccaccuccggaagcuggugcccggguucggcaaggccuacacgaucuucaacaagacccugauggaggccgacgcccacuacaaguccguccgcaccuggaacgagaucauccccagcaaggggugccuccgggugggcgggcgcugccacccgcacgugaacggcgucuucuucaacggcaucauccuggggcccgacggccacgugcugauccccgagaugcaguccagccuccugcagcagcacauggagcugcucgaguccagcgucaucccccugaugcacccgcuggcggaccccuccaccguguucaaggacggggacgaggccgaggacuucguggagguccaccuccccgacgugcacaagcagaucagcggcguggaccuggggcugcccaacuggggcaaguacguccucaucaucgccggcgugcugaucgccaugauccugacgaucuuccucaugaccugcugcgggcggggcaaccgcccgaaguccacccagcacagccucgggggcaucgggcggaagguguccgccaccagccaguccggcaaggucaucagcuccugggagagcuacaagagcggcggggagacgcgccuguga

SEQ ID NO: 95363 - RNA, 1575 nt, Artificial Sequence
  derived and/or modified CDS sequence (opt1) from glycoprotein__RABV__JQ685983.1
auggugccccaggcccugcuguucgucccgcugcugguguuccccaugugcuucggcaaguuccccaucuacaccauccccgacaagcucgggccguggagccccaucgacauccaccaccuguccugccccaacaaccugguggucgaggacgagggcugcaccaaccucagcggguucuccuacauggagcugaaggugggcuacaucagcgccaucaaggugaacggguucacgugcaccggcgucgugaccgaggcggagaccuacacgaacuucgugggcuacgucaccaccaccuucaagcgcaagcacuuccggcccacgccggacgccugccgcgccgccuacaacuggaagauggccggggacccccgguacgaggagucccugcacaaccccuaccccgacuaccacuggcuccgcaccgugaagaccaccaaggagagccuggugaucaucuccccgagcgucgcggaccuggaccccuacgacaagucccuccacagccggguguuccccgacggcaagugcuccgggaucacgaucagcuccaccuacugccccaccaaccacgacuacaccaucuggcugccggagaacccccgccugggcacgagcugcgacaucuucaccaacucccgggggaagcgcgccagcaagggcuccaagaccugcggcuucguggacgagcgggggcucuacaagagccugaagggcgccugcaagcugaagcucugcgggguccugggccugcgccucauggacggcaccuggguggccaugcagacguccgacgagaccaaguggugcccgcccgaccagcuggugaaccugcacgacuuccggagcgacgagaucgagcaccucgucguggaggagcuggugaagaagcgcgaggagugccuggacgcgcucgagagcaucaugaccaccaaguccgucagcuuccggcgccugucccaccuccggaagcucgugcccggguucggcaaggccuacacgaucuucaacaagacccugauggaggccgacgcccacuacaagagcgugcgcaccuggaacgagaucauccccuccaaggggugccugcgggucggcgggcgcugccacccccacgugaacggcgucuucuucaacggcaucauccucgggcccgacggccacgugcugaucccggagaugcagagcucccugcuccagcagcacauggagcugcuggagagcuccgugaucccccucaugcacccccuggccgaccccagcaccgucuucaaggacggggacgaggcggaggacuucguggaggugcaccucccggacguccacaagcagaucuccggcguggaccuggggcugcccaacuggggcaaguacgugcuggucagcgccggcgugcucaucgcccugaugcugaucaucuuccucaugacgugcugcgggcggauccaccgccccaaguccacccagugcgaccugggcgggaccggccggaaggugagcgucaccucccagagcgggaaggugaucuccagcugggaguccuacaagagcggcggcgagacgcgccuguga

SEQ ID NO: 95364 - RNA, 1575 nt, Artificial Sequence
  derived and/or modified CDS sequence (opt1) from glycoprotein__RABV__JQ685984.1
auggugccccagguccugcuguucgugccgcugcugguguucagccucugcuucggcaaguuccccaucuacaccauccccgacaagcuggggcccugguccccgaucgacauccaccaccugagcugccccaacaaccucgucguggaggacgagggcugcaccaaccuguccggguucagcuacauggagcugaaggugggcuacaucuccgccaucaaggucaacggguucacgugcaccggcguggugaccgaggccgagaccuacacgaacuucgucggcuacgugaccaccaccuucaagcgcaagcacuuccggcccacgcccgacgcgugccgcgccgccuacaacuggaagauggccggggacccgcgguacgaggagagccuccacaaccccuaccccgacuaccacuggcugcgcaccgugaagaccaccaaggagucccuggucaucaucagccccuccgugacggaccucgacccguacgacaagagccugcacucccggguguuccccggcgggaagugcagcggcaucaccgucuccagcaccuacugcuccaccaaccacgacuacacgaucuggaugcccgagaacccccgccuggggaccagcugcgacaucuucaccaacucccggggcaagcgcgccagcaagggcuccaagaccugcggguucguggacgagcggggccucuacaagagccugaagggggcgugcaagcugaagcucugcggcgugcugggccugcgccucauggacgggacgugggucgccaugcagaccagcgacgagaccaaguggugcccgcccgaccagcuggugaaccugcacgacuuccgguccgacgagaucgagcaccucguggucgaggagcuggugaagaagcgcgaggagugccuggacgcccucgagagcaucaugaccacgaaguccgugagcuuccggcgccugucccaccuccggaagcucguccccggcuucgggaaggccuacaccaucuucaacaagacccugauggaggcggacgcccacuacaagagcgugcgcaccuggaacgagaucauccccuccaagggcugccugcgggucgggggccgcugccacccgcacgugaacggcguguucuucaacgggaucauccucggccccgacgggcacguccugauccccgagaugcagagcucccugcuccagcagcacauggagcugcuggagagcuccgugaucccccucaugcacccgcuggccgaccccagcacgguguucaaggacggcgacgaggccgaggacuucgucgaggugcaccuccccgacgugcacaagcaggucuccgggguggaccugggccugcccaacuggggcaaguacgugcugaugaucgccggggcgcucaucgcccugaugcugaucaucuuccucaugaccugcugccggcgcgucaaccggccggagagcacccagcgcucccugggcgggaccggccgcaaggugagcaucacgucccagagcgggaaggugaucuccagcugggagagcuacaaguccggcggcgagacccggcuguga

SEQ ID NO: 95365 - RNA, 1575 nt, Artificial Sequence
  derived and/or modified CDS sequence (opt1) from glycoprotein__RABV__JQ685985.1
auggugccccaggcccugcuguucgucccgauccugguguucagccugugcuucggcaaguuccccaucuacaccauccccgacaagcucgggcccugguccccgaucgacauccaccaccugagcugccccaacaaccugguggucgaggacgagggcugcaccaaccucuccggguucagcuacauggagcugaaggugggcuacaucuccgccaucaaggugaacggguucacgugcaccggcgucgugaccgaggcggagaccuacacgaacuucgugggcuacgucaccaccaccuuccgccggaagcacuuccgccccacgcccgacgccugccgggccgccuacaacuggaagauggccggggacccgcgcuacgaggagagccugcacaaccccuaccccgacuaccacuggcuccggaccgugcgcaccaccaaggagucccuggugaucaucagccccuccgucgcggaccuggacccguacgacaagagccuccacucccggguguuccccagcggcaagugcuccgggaucacggugagcuccaccuacugcagcaccaaccacgacuacaccaucuggaugcccgagaacccccgccugggcacguccugcgacaucuucaucaacagccgggggaagcgcgccuccaagggcagcaagaccugcggcuucgucgacgagcgggggcuguacaagagccucaagggcgccugcaagcugaagcugugcggggugcucggccugcgccugauggacggcaccuggguggccaugcagaccuccgaggagacgaaguggugcccgcccgaccagcucgucaaccugcacgacuuccggagcgacgagaucgagcaccuggugguggaggagcucgucaagaagcgcgaggagugccuggacgcgcuggaguccaucaugaccaccaagagcguguccuuccggcgccucagccaccuccggaagcuggugcccggguucggcaaggccuacaccaucuucaacaagacgcucauggaggccgacgcccacuacaaguccguccgcaccuggaacgagaucauccccagcaaggggugccugcgggugggcgggcgcugccacccgcacgucaacggcguguucuucaacggcaucauccuggggcccgacggccacgugcucauccccgagaugcaguccagccugcugcagcagcacauggagcuccuggaguccagcgucaucccccugaugcacccgcucgccgaccccuccaccguguucaaggagggggacgaggcggaggacuucguggagguccaccuccccgacgugcacaagcaggucagcggcguggaccuggggcugcccaacuggggcaaguacgugcugauguccgccggcgugcugaucagccggaugcuccugaucuuccugaugaccugcugccgccgcgucaaccggccggaguccacgcagcgcagccccgggggcgccgggcggaagguguccgugaccagccagagcggcaaggucaucuccagcugggaguccuacaagagcgggggcgagacccgccucuga

SEQ ID NO: 95366 - RNA, 1575 nt, Artificial Sequence
  derived and/or modified CDS sequence (opt1) from glycoprotein__RABV__JQ685986.1
auggugcugcagguccuccuguucgcccccuuccugaucagcucccucugccugggcaaguucccgaucuacaccauccccgacaagcuggggcccuggagccccaucgacauccaccaccucuccugcccgaacaaccuggugguggaggacgagggcugcaacagccuguccggguucagcuacauggagcucaaggucggcuacaucuccgccaucaaggugaacggguucacgugcaccggcguggucaccgaggcggagaccuacaccaacuucgugggcuacgugacgaccaccuucaagcgcaagcacuuccggcccguccccgacgccugccgcagcgccuacaacuggaagcuggccggggacccccgguacgaggagucccugcacaacccguaccccgaguaccacuggcuccgcaccgugaagacgaccaaggagagccugaucgugaucucccccagcgucgccgaccuggaccccuacgacaagucccuccacagccggaucuucccguccggcaagugcagcgggaugaccguguccagcaccuacugcuccacgaaccacgaguacaccaucuggaugcccgagaaggcgagccugggcaccagcugcgacaucuucaccacguccaaggggaagcgcgccagcaagggcggccggaccugcggguucguggacgagcgcggccuguacaagucccucaagggggccugcaagcugaagcugugcggcgucagcggccuccggcugauggacgggaccuggguggccauccagaccuccgacgaggcgaaguggugcagccccgaccagcuggugaaccuccacgaccugcacuccgacgagaucgagcaccuggucguggaggagcucgugcgcaagcgggaggagugccuggacgcccuggagagcaucaugacgaccaaguccgucagcuuccgccggcucucccaccuccgcaagcuggugcccggcuucgggaaggccuacaccaucuucaacaagacccugauggaggccgacgcccacuacaagagcgugcggacguggaacgagaucaucccguccaagggcugccugcgcgucgggggcaagugccacccccacgugaacggcgucuucuucaacgggaucauccugggccccgacgggcacgugcucauccccgagaugcagagcucccugcugcagcagcacaucgagcuccuggagagcuccgugaucccgcugaugcacccccucgcggaccugagcaccgucuucaaggacggcgacgaggccgaggacuucguggaggugcaccuccccgacguccacaagcagaucuccgggguggaccugggccugcccagcuggggcaaguacgugcugaugagcgccggggcccucgccacccugguccuggugaucucccugaugaagugcugccggugggugaacaagaccaagagcauccagcagggcccgcgcgaguccgagcggaaggucagcgugacgccccagaacgggaaggugaucuccagcugggaguccuacaagaucggcggggagaccggccucuga

SEQ ID NO: 95367 - RNA, 1575 nt, Artificial Sequence
  derived and/or modified CDS sequence (opt1) from glycoprotein__RABV__JQ685987.1
auggcgccccaggcccuguggguggucccgcuccugggcuucagccugugcuucgggaaguuccccaucuacaccauccccgacaagcucggccccugguccccgaucgacauccaccaccugagcugccccaacaaccuggugguggaggacgaggggugcaccaaccucuccggcuucagcuacauggagcugaaggucggguacaucuccgccaucaaggugaacggcuucacgugcaccggcguggucaccgaggccgagaccuacacgaacuucgugggguacgugaccaccaccuucaagcgcaagcacuuccggcccacgcccgacgccugccgcaccgccuacaacuggaagauggccggcgacccgcgguacgaggagagccugcacaaccccuaccccgacuaccacuggcuccgcaccgucaagaccacgaaggagucccuggugaucaucagccccuccguggcggaccuggacccguacgacaagagccuccacucccgggucuuccccagcgggaagugcuccggcaucaccgugagcuccaccuacugccugaccaaccacgacuacacgaucuggaugcccgagaacccccgccuggggaccagcugcgacaucuucaccaacucccggggcaagcgcgccagcaagggcuccaagaccugcggguucguggacgagcggggccucuacaagagccugaagggggccugcaagcugaagcucugcggcguccugggccugaagcucauggacgggacguggguggccaugcagaccagcgacgagaccaaguggugcccguccgaccagcuggugaaccugcacgacuuccgcagcgacgagaucgagcaccucgucguggaggagcuggugaagaagcgggaggagugccuggacgcgcucgaguccaucaugaccaccaagagcgucuccuuccgccggcugagccaccuccgcaagcuggugcccggcuucgggaaggccuacacgaucuucaacaagacccugauggaggccgacgcccacuacaaguccgugcggaccuggaacgagaucauccccagcaagggcugccugcgcgucgggggccggugccacccccacgugaacggcgucuucuucaacgggaucauccucggcccggacgggcacauccugauccccgagaugcaguccagccugcuccagcagcacauggagcugcuggaguccagcgugaucccccucaugcacccccuggccgacccguccacgguguucaaggacggcgacgaggcggaggacuucgucgaggugcaccuccccgacgugcacaagcaggucagcgggguggaccugggccugcccaacuggggccgcuacgugucccugggggccggcgcccucaucgcccugaugcugaucaucuuccucaugaccugcugccggcgcgucaaccggcccgagccgacccagcgcagccuggaggggaagggccgcaagguguccgugaccagccaguccgggaaggucaucagcagcugggaguccuacaagagcggcggcgagacgcggcuguga

SEQ ID NO: 95368 - RNA, 1575 nt, Artificial Sequence
  derived and/or modified CDS sequence (opt1) from glycoprotein__RABV__JQ685988.1
auggugccccaggcccugcugcuggucccgcugcucgccuuccccaugugcuucggcaaguuccccaucuacaccauccccgacaagcuggggccguggagccccaucgacauccaccaccuguccugccccaacaaccucgugguggaggacgagggcugcaccaaccugagcggguucuccuacauggagcugaaggucggcuacaucagcgcgaucaaggugaacggguucacgugcaccggcguggucaccgaggccgagaccuacacgaacuucgugggcuacgugaccaccaccuucaagcgcaagcacuuccggcccacgccggacgccugccgcgccgccuacaacuggaagauggcgggggacccccgguacgaggagucccuccacaaccccuaccccgacuaccacuggcugcgcaccgucaagaccaccaaggagagccugaucaucaucuccccgagcguggccgaccucgaccccuacgacaagucccugcacagccggguguuccccuccggcaagugccuggggaucacgaucagcuccaccuacugcagcaccaaccacgacuacaccaucuggaugcccgagaaccuccgccugggcacguccugcgacaucuucaccaacagccgggggaagcgcgccuccaagggcagcaagaccugcggcuucgucgacgagcgggggcuguacaagucccucaagggcgccugcaagcugaagcugugcggggugcucggccugcgccugauggacggcaccuggguggcgaugcagacgagcaacgagaccaaguggugcccgcccgaccagcucgucaaccugcacgacuuccggagcgacgagaucgagcaccuggugguggaggagcucgucaagaagcgcgaggagugccuggacgcccuggaguccaucaugaccaccaagagcguguccuuccggcgccucagccaccuccggaagcuggugcccggguucggcaaggccuacacgaucuucaacaagacccugauggaggccgacgcccacuacaaguccguccgcaccuggaacgagaucauccccagcaaggggugccugcgggugggcgggcgcugccacccgcacgugaacggcgucuucuucaacggcaucauccuggggcccgacggccacgugcucauccccgagaugcaguccagccugcugcagcagcacauggagcuccuggaguccagcgucaucccccugaugcacccgcucgcggaccccuccaccguguucaaggacggggacgaggccgaggacuucguggagguccaccuccccgacgugcacaagcagaucagcggcguggaccuggggcugcccaacuggggcaaguacguccugaucaucgccggcgugcugaucgccaugauccucacgaucuuccugaugaccugcugcgggcggggcaaccgcccgaaguccacccagcacagccucgggggcaucgggcggaagguguccgccaccagccaguccggcaaggucaucagcuccugggagagcuacaagagcggcuccgagacgcgccuguga

SEQ ID NO: 95369 - RNA, 1575 nt, Artificial Sequence
  derived and/or modified CDS sequence (opt1) from glycoprotein__RABV__JQ685989.1
auggugccccaggcccugcuguucgucccgauccugguguucagccugugcuucggcaaguuccccaucuacaccauccccgacaagcucgggcccugguccccgaucgacauccaccaccugagcugccccaacaaccugguggucgaggacgagggcugcaccaaccucuccggguucagcuacauggagcugaaggugggcuacaucuccgccaucaaggugaacggguucacgugcaccggcgucgugaccgaggcggagaccuacacgaacuucgugggcuacgucaccaccaccuuccgccggaagcacuuccgccccacgcccgacgccugccgggccgccuacaacuggaagauggccggggacccgcgcuacgaggagagccugcacaaccccuaccccgacuaccacuggcuccggaccgugcgcaccaccaaggagucccuggugaucaucagccccuccgucgcggaccuggacccguacgacaagagccuccacucccggguguuccccagcggcaagugcuccgggaucacggugagcuccaccuacugcagcaccaaccacgacuacaccaucuggaugcccgagaacccccgccugggcacguccugcgacaucuucaucaacagccgggggaagcgcgccuccaagggcagcaagaccugcggcuucgucgacgagcgggggcuguacaagagccucaagggcgccugcaagcugaagcugugcggggugcucggccugcgccugauggacggcaccuggguggccaugcagaccuccgaggagacgaaguggugcccgcccgaccagcucgucaaccugcacgacuuccggagcgacgagaucgagcaccuggugguggaggagcucgucaagaagcgcgaggagugccuggacgcgcuggaguccaucaugaccaccaagagcguguccuuccggcgccucagccaccuccggaagcuggugcccggguucggcaaggccuacaccaucuucaacaagacgcucauggaggccgacgcccacuacaaguccguccgcaccuggaacgagaucauccccagcaaggggugccugcgggugggcgggcgcugccacccgcacgucaacggcguguucuucaacggcaucauccuggggcccgacggccacgugcucauccccgagaugcaguccagccugcugcagcagcacauggagcuccuggaguccagcgucaucccccugaugcacccgcucgccgaccccuccaccguguucaaggagggggacgaggcggaggacuucguggagguccaccuccccgacgugcacaagcaggucagcggcguggaccuggggcugcccaacuggggcaaguacgugcugauguccgccggcgugcugaucagccucaugcugcugaucuuccucaugaccugcugccggcgcgucaaccgcccggaguccacgcagcggagccccgggggcgccgggcgcaagguguccgugaccagccagagcggcaaggucaucuccagcugggaguccuacaagagcgggggcgagacccggcuguga

SEQ ID NO: 95370 - RNA, 1575 nt, Artificial Sequence; identical to SEQ ID NO: 95368
  derived and/or modified CDS sequence (opt1) from glycoprotein__RABV__JQ685990.1

SEQ ID NO: 95371 - RNA, 1575 nt, Artificial Sequence
  derived and/or modified CDS sequence (opt1) from glycoprotein__RABV__JQ685991.1
auggugcugcaggcccuccuguucgcccccuuccugaucagcuccuucugccucggcaaguucccgaucuacaccauccccgacaagcuggggcccuggagccccaucgacauccaccaccuguccugcccgaacaaccucgucaucgaggacgagggcugcaacagccuguccggguucagcuacauggagcugaaggugggcuacaucuccgccaucaaggugaacggguucacgugcaccggcgucgugaccgaggccgagaccuacaccaacuucgugggcuacgucacgaccaccuucaagcgcaagcacuuccggcccaugcccgacgccugccgcagcgccuacaacuggaagcucgccggggacccccgguacgaggagucccugcacaacccguaccccgaguaccacuggcugcgcaccgugaagacgaccaaggagagccucaucgugaucucccccagcgucgcggaccuggaccccuacgacaagucccugcacagccggaucuucccguccggcaagugcagcgggaugaccguguccagcaccuacugcuccacgaaccacgaguacaccaucuggaugcccgagaaggugggccucgggaccagcugcgacaucuucaucaccagcaagggcaagcgcgccuccaagggcgggcggacgugcggcuucgucgacgagcgcgggcuguacaagagccugaagggcgccugcaagcucaagcugugcggcguguccgggcugcggcucauggacggcaccuggguggccauccagaccagcgacgagaccaaguggugcucccccgaccagcuggucaaccugcacgaccuccacagcgacgagaucgagcaccuggugguggaggagcugguccgcaagcgggaggagugccucgacgcgcuggaguccaucaugacgaccaagagcguguccuuccgccggcugagccaccuccgcaagcuggugcccggguucggcaaggccuacaccaucuucaacaagacccugauggaggccgacgcccacuacaaguccguccggacguggaacgagaucaucccgagcaaggggugccuccgcgugggcggcaagugccacccccacgugaacggggucuucuucaacggcaucauccuggggcccgacggccacgugcugauccccgagaugcaguccagccuccugcagcagcacaucgagcugcucgaguccagcgucaucccgcugaugcacccccuggccgaccucuccaccguguucaaggacggggacgaggcggaggacuucguggagguccaccuccccgacgugcacaagcagaucagcggcguggaccugggccugcccuccugggggaaguacguccugaucagcgccggcgcccuggccacccucauccuggugaucagccugaugaagugcugccggugggugaaccgcaccaaguccauccagcaggggccgcgggagagcgagcgcaaggucuccguggcgccccagagcggcaaggugaucuccagcugggaguccuacaagaucgggggcgagacgggccuguga

SEQ ID NO: 95372 - RNA, 1575 nt, Artificial Sequence
  derived and/or modified CDS sequence (opt1) from glycoprotein__RABV__JQ685992.1
auggugccccaggcccugcuguucgucccgcugcugguguucagccucugcuucggcaaguuccccaucuacaccauccccgacaagcuggggcccugguccccgaucgacauccaccaccugagcugccccaacaaccucguggucgaggacgagggcugcaccaaccuguccggguucagcuacauggagcugaaggugggcuacaucuccgccaucaaggugaacggguucacgugcaccggcgucgugaccgaggcggagaccuacacgaacuucgugggcuacgucaccaccaccuuccgccggaagcacuuccgccccacgcccgacgccugccgggccgccuacaacuggaagauggccggggacccgcgcuacgaggagagccuccacaaccccuaccccgacuaccacuggcugcggaccgugaagaccaccaaggagucccuggugaucaucagccccuccgucgcggaccucgacccguacgacaagagccugcacucccgcguguuccccggcgggaagugcagcggcaucacgguguccagcaccuacugcuccaccaaccacgacuacaccaucuggaugcccgagaacccccggcuggggacgagcugcgacaucuucgucaacucccgcggcaagcgggccagcaagggcgggaagaccugcggcuucguggacgagcgcgggcucuacaagucccugaagggcgccugcaagcugaagcucugcggcgugccggggcugcggcugauggacggcaccugggucgccauccagaccagcgacgagacgaaguggugcccgcccgaccagcucgugaaccugcacgacuuccgcagcgacgagaucgagcaccugguggucgaggagcucgugaagaagcgggaggagugccuggacgcgcuggaguccaucaugaccaccaagagcguguccuuccgccggcucagccaccuccgcaagcugguccccggguucggcaaggccuacaccaucuucaacaagacgcucauggaggccgacgcccacuacaaguccgugcggaccuggaacgagaucauccccagcaaggggugccugcgcgucggcggccggugccacccccacgugaacgggguguucuucaacggcaucauccuggggcccgacggccacguccucauccccgagaugcaguccagccugcugcagcagcacauggagcuccuggaguccagcgugaucccgcugaugcacccccucgccgaccccuccaccguguucaaggacggggacgaggcggaggacuucgucgaggugcaccuccccgacgugcacaagcugaucagcggcgucgaccugggccugccguccugggggaaguacgugcugaugagcgccggcauccucaccacgcugaugcugaugaucuuccucaugaccugcugccgccgggugaaccaggucggguccaagcagcacggccuggagggggccggccgcaaggugagcgugaccucccagaacggccgcgucaucagcuccugggagagcuacaagagcgggggcgagacccggcuguga

SEQ ID NO: 95373 - RNA, 1575 nt, Artificial Sequence
  derived and/or modified CDS sequence (opt1) from glycoprotein__RABV__JQ685993.1
auggugcugcaggcccuccuguucgcccccuuccugaucagcucccucugccugggcaaguucccgaucuacaccauccccgacaagcuggggcccuggagccccaucgacauccaccaccucuccugcccgaacaaccuggucguggaggacgagggcugcaacagccuguccggguucagcuacauggagcucaaggugggcuacaucuccgcgaucaaggucaacggguucacgugcaccggcguggugaccgaggccgagaccuacaccaacuucgucggcuacgugaccaccaccuucaagcgcaagcacuuccggcccaugcccgacgccugccgcagcgccuacaacuggaagcuggccggggacccccgguacgaggagucccugcacaacccguaccccgacuaccacuggcuccgcaccgugaagacgaccaaggagagccugaucgucaucucccccagcguggcggaccuggaccccuacgacaagucccuccacagccggaucuucccgggcgggaagugcuccggcaugaccgugagcuccaccuacugcagcacgaaccacgaguacaccaucuggaugcccgagaaggccgggcugggcaccuccugcgacaucuucaccacgagcaagggcaagcgcgccaccaagggcgggaagaccugcggguucgucgacgagcggggccuguacaagagccucaagggcgccugcaagcugaagcugugcgggguguccggccuccgccugauggacgggaccuggguggcgauccagacgagcgacgagaccaaguggugcucccccgaccagcuggucaaccuccacgaccugcacagcgacgagaucgagcaccuggugguggaggagcucguccggaagcgcgaggagugccuggacgcccuggaguccaucaugaccaccaagagcguguccuuccggcgccucagccaccuccggaagcuggugcccggcuucgggaaggccuacacgaucuucaacaagacccugauggaggccgacgcccacuacaaguccguccgcaccuggaacgagaucaucccgagcaagggcugccugcgggugggcgggaagugccacccccacgugaacggcgucuucuucaacgggaucauccugggccccgacgggcacgugcucauccccgagaugcaguccagccugcugcagcagcacauggagcuccuggaguccagcgucaucccgcugaugcacccccucgcggaccccuccaccguguucaaggacgacgacgaggccgaggacuucguggagguccaccuccccgacgugcacaagcaggucagcggcguggaccugggccugccguccugggggcgcuacgugcugaugagcgccggcgcccuggccacgcucaugguggucaucucccugaugaagugcugcaagggggugaaccggaccaagagcaucaagcagggcagccgcgaguccgagcggaaggugagcaucacgccccaguccgggaaggucaucagcuccugggagagcuacaaguccggcggcgagaccgggcuguga

SEQ ID NO: 95374 - RNA, 1575 nt, Artificial Sequence
  derived and/or modified CDS sequence (opt1) from glycoprotein__RABV__JQ685994.1
auggugcccugggcccuccucuucgucccguuccugaucagcucccugugcuucggcaaguuccccaucuacaccauccccgacaagcucgggcccuggagcccgaucgacauccaccaccuguccugccccaacaaccuggugguggaggacgagggcugcaacagccucuccggguucagcuacauggagcugaaggucggcuacaucuccgccaucaaggugaacggguucacgugcaccggcguggucaccgaggcggagaccuacaccaacuucgugggcuacgugaccaccaccuucaagcgcaagcacuuccggcccaugcccgacgccugccgcagcgccuacaacuggaagauggccggggacccgcgguacgaggagucccugcacaaccccuaccccgacuaccacuggcuccgcaccgucaagacgaccaaggagagccugaucaucaucucccccagcguggccgaccuggacccguacgaccggucccuccacagccgcaucuuccccggcgggaagugcaccggccugaccguguccagcacguacugcuccaccaaccacgacuacaccaucuggaugcccgagaaggcggggcugggcaccagcugcgacaucuucacgaacuccaagggcaagcgggccagcaagggcgggaagaccugcggguucgucgacgagcgcggccucuacaagagccugaagggcgccugcaagcugaagcucugcgggguguccggccugcggcugauggacgggaccuggguggccauccagacccucgacgagacgaaguggugcagccccgaccagcuggucaaccugcacgacuuccacuccgacgagcucgagcaccuggugguggaggagcugguccgcaagcgggaggagugccucgacgcgcuggagagcaucaugaccaccaaguccgugagcuuccgccggcugucccaccuccgcaagcuggugccgggcuucgggaaggccuacaccaucuucaacaagacgcugauggaggccgacgcccacuacaagagcguccggaccugguccgagaucauccccagcaagggcugccuccgcgugggcgggcggugccacccccacgugaacggcgucuucuucaacgggaucauccugggccccgacgggcacgugcugaucccggagaugcaguccagccuccugcagcagcacgucgagcugcucgaguccagcgugaucccccugaugcacccccuggccgaccccuccgcgguguucaaggacggcgacgaggccgaggacuucgucgaggugcaccucccggacgugcacaagcagaucagcggcgucgaccuggggcugcccuccuggggcaaguacaugcucaugaucgccggggcccugaccacccugaugcuguucaucuuccugaugacgugcugcaagcgcgugaacaagaaggagagcauccggcagagcccccgcgagcuggaguccaaggugagcgucacgccccagaaccggaaggugaucuccagcugggaguccuacaagagcggcggggagaccaagcuguga

SEQ ID NO: 95375 - RNA, 1575 nt, Artificial Sequence
  derived and/or modified CDS sequence (opt1) from glycoprotein__RABV__JQ685995.1
auggugccccagguccugcuguucgugccgcugcugguguucagccucugcuucggcaaguucccccuguacaccauccccgacaagcuggggcccugguccccgaucgacauccaccaccucagcugccccaacaaccuggucguggaggacgagggcugcaccaaccuguccggguucagcuacauggagcucaaggugggcuacaucuccgccaucaaggucagcggguucacgugcaccggcguggugaccgaggccgagaccuacacgaacuucgucggcuacgugaccaccaccuucaagcgccggcacuuccgccccacgcccgacgcgugccgggccgccuacaacuggaagauggccggggacccgcgcuacgaggagucccugcacaaccccuaccccgacuaccacuggcugcggaccgugaagaccaccaaggagagccucgucaucaucucccccagcgugacggaccuggacccguacgacaagucccugcacagccgcguguuccccggcgggaagugcuccggcaucaccgucagcuccaccuacugcagcaccaaccacgacuacacgaucuggaugcccgagagcccccggcucgggaccuccugcgacaucuucaccaacucccgcggcaagcgggccagcaagggcagcaagaccugcggguucguggacgagcgcggccuguacaagucccugaagggggcgugcaagcucaagcugugcggcgugcugggccuccggcugauggacgggacgugggucgccaugcagaccagcgacgagaccaaguggugccugccggaccagcucgugaaccugcacgacuuccgcuccgacgagaucgagcaccugguggucgaggagcucgugcggaagcgcgaggagugccuggacgcccuggagagcaucaugaccacgaaguccgugagcuuccggcgccucucccaccuccggaagcugguccccggcuucgggaaggccuacaccaucuucaacaagacccucauggaggcggacgcccacuacaagagcauccgcaccuggaacgagaucgugcccuccaagggcugccugcgggucgggggccgcugccacccccacgugaacggcguguucuucaacgggaucauccugggcccggacgggcagguccucauccccgagaugcagagcucccugcugcagcagcacauggagcuccuggagagcuccgugaucccccugaugcacccccucgccgacccgagcacgguguucaaggagggcgacgaggccgaggacuucgucgaggugcaccuccccgacgugcacaagcaggucuccgggguggaccugggccugcccaacuggggcaaguacgugcugaugaucgccggggcgcugaucgcccucaugcugaucaucuuccugaugaccugcugccggcgcgucaaccgcagcgaguccacccagcaccggcugcgcggcaccgggcggaaggugagcgugacgucccagaccggcaaggucaucagcagcugggaguccuacaagagcgggggcgagacccgccucuga

SEQ ID NO: 95376 - RNA, 1575 nt, Artificial Sequence
  derived and/or modified CDS sequence (opt1) from glycoprotein__RABV__JQ685996.1
augaucccccaggcccugcucagcgugccgcugcugaucuccagccucugcuucggcaaguuccccaucuacaccauccccgagaagcuggggcccugguccccgaucgacauccaccaccugagcugccccaacaaccucgucguggaggacgagggcugcaacucccugagcggguucuccuacauggagcugaaggugggcuacaucagcgccaucaaggucaacggguucacgugcaccggcguggugaccgaggcggagaccuacaccaacuucgucggcuacgugaccaccaccuucaagcgcaagcacuuccggcccaugcccgacgccugccgcgccgccuacaacuggaagaccgccggggacccgcgguacgaggagucccuccacaaccccuaccccgacuaccacuggcugcgcacggugaagaccaccaaggagagccugaucaucaucucccccagcgucgcggaccucgacccguacgacaagucccugcacagccggaucuuccccggcgggaagugccugggcaucaccaucuccagcacguacugcuccaccaaccacgacuacaccaucuggaugcccgaggaggcccgccucgggaccagcugcgacaucuucacgaacuccaagggcaagcgggccagcaagggcgggcggaccugcggcuucguggacgagcgcgggcuguacaagagccugaagggcgccugcaagcucaagcugugcggcgugcuggggcuccgccugauggacggcaccugggucgcgauccagacccccaacgagacgaaguggugcuccccggaccagcuggugaacgugcacgacuuccggagcgacgagaucgagcaccucgucguggaggagcugauccgcaagcgggaggagugccuggacgcccucgaguccaucaugaccaccaagagcguguccuuccgccggcugagcaaccugcgcaagcucguccccggguucggcaaggccuacaccaucuucaacaagacgcugauggaggccgacgcccacuacaaguccgugcggaccuggaacgagaucauccccagccgcgggugccugaaggugggcggccggugccacccccacgucaacgggguguucuucaacggcaucauccucgggccggacggccacauccugauccccgagaugcaguccagccugcuccagcagcacauggagcugcuggaguccagcgugaucccccucauccacccccuggcggacccguccaccgucuucaaggacggggacgaggccgaggacuucguggagguccaccuccccgacgugcaccagcaggucagcggcguggaccugggccugcccgacugggggaaguacgugcugauguccgccggcgcccucgccaccgugaugcugacgaucuuccugaucacgugcugccgccgggucaagcgcaccgagagcauccagcaggggcucggcgaguccgggcgcaaggugagcgugacgccccagaacggcaaggucauguccagcugggaguacuacaagagcggcgggggcacccggcuguga

SEQ ID NO: 95377 - RNA, 1575 nt, Artificial Sequence
  derived and/or modified CDS sequence (opt1) from glycoprotein__RABV__JQ685997.1
augaucagccagacccugcuguucgugccccugcugaucuccagcgucugcuucggcgaguucccgaucuacaccauccccgagaagcucgggcccuggucccccaucgacauccaccaccugagcugcccgaacaaccuggugguggaggacgagggcugcaacucccucagcggguucuccuacauggagcugaaggucggcuacaucagcuccaucaaggugaacggguucacgugcaccggcguggucaccgaggccgagaccuacacgaacuucgugggcuacgugaccaccaccuucaagcgcaagcacuuccggcccaugcccgacgccugccgcgcggccuacaacuggaagaugagcggggacccccgguacgaggagucccugcacaacccguaccccgacuaccacuggcuccgcacggucaagaccaccaaggagagccuggugaucaucucccccagcgugggcgaccuggaccccuacgacaagucccuccacagccgggucuucuccgggggcaagugccuggggaucaccaucagcuccacguacugcagcaccaaccacgacuacacccuguggaugccggaggaggcccgccucggcaccagcugcgacaucuucacgaacuccaagggcaagcgggccagcaagggcgggcggaccugcggguucguggacgagcgcggccuguacaagucccugaagggcgccugcaagcucaagcugugcggggugcccggccugcgccucauggacgggaccugggucagcauccagaccuccgacgagacgaaguggugcccgcccgaccagcuggugaacauccacgacuuccggagcgacgagaucgagcaccugguggucgaggagcucgugaagaagcgcgaggagugccuggacgcgcuggaguccaucaugaccaccaagagcguguccuuccggcgccucagccaccuccggaagcugguccccggcuucgggaaggccuacaccaucuucaacaagacgcucauggaggccgacgcccacuacaaguccgugcgcaccuggaacgaggugauccccagcaagggcugccuguccgucggcgggcggugccacccccacguggacggcgucuucuucaacgggaucauccugggccccgacgggagcgugcucaucccggagaugcaguccagccugcugcagcagcacauggagcuccuggaguccagcgugaucccccugaugcacccccucgcgaaccccuccaccgucuucaaggacggcgacgaggccgaggacuucguggaggugcaccucccggacguccaggagcaggucagcggcguggaccuggggcugcccaacuggggcaaguacgugcugaugagcgccggggcccuggccauccuccugcugaccaucuuccucaugacgugcugccgccgggcgaaccgcaccaaguccauccggcagggccccgaggagagcgggcgcaagguguccgugcccccgcagagcggcaaggucaucuccagcugggaguccuucaagagcggcggggagacccgccuguga

SEQ ID NO: 95378 - RNA, 1575 nt, Artificial Sequence
  derived and/or modified CDS sequence (opt1) from glycoprotein__RABV__JQ685998.1
augaucccccaggcccugcuguuccugccgcugcucaucagcucccugugcagcggcaaguuccccaucuacaccauccccgagaagcuggggcccugguccccgaucgacauccaccaccucagcugccccaacaaccugguggucgaggacgagggcugcaacucccugagcggguucuccuacauggagcucaaggugggcuacaucagcgccaucaaggugaacggguucacgugcacgggcgucgugaccgaggcggagaccuacaccaacuucgugggcuacgucacgaccaccuucaagcgcaagcacuuccggcccaugcccgacgccugccgcgccgccuacaacuggaagauggccggggacccgcgguacgaggagucccugcacaaccccuaccccgacuaccacuggcugcgcaccgugaagacgaccaaggagagccucgugaucaucucccccagcgucgcggaccuggacccguacgacaagucccugcacagccggguguuccccggcgggaagugccucggcaucaccaucuccagcaccuacugcuccacgaaccacgacuacaccaucuggaugcccgaggaggcccgccuggggaccagcugcgacaucuucaccaacuccaagggcaagcgggccagcaagggcgggcgcacgugcggcuucguggacgagcgggggcuguacaagagccucaagggcgccugcaagcugaagcugugcggcguccccgggcuccgccugauggacggcaccuggguguccauccagaccagcgaggagaccaaguggugcuccagcgaccagcuggugaacauccacgacuuccgguccgacgagaucgagcaccucgucguggaggagcuggugaagaagcgcgaggagugccuggacgcgcucgagagcaucaugacgaccaaguccgucagcuuccggcgccugucccaccuccggaagcucgugccgggguucggcaaggccuacaccaucuucaacaacacccugauggaggccgacgcccacuacaagagcgugaagacguggaacgagaucauccccuccaaggggugccugagcgucggcggccgcugccaccccaacgugaacgggguguucuucaacggcaucauccucgggcccgacggcuccguccugaucccggagaugcagagcucccugcuccagcagcacauggagcugcuggagagcuccgugaucccccucaugcacccccuggccaaccccagcaccgucuucaaggacggggacgaggcggaggaguucguggaggugcaccucccggacgucaaggagcaggucuccggcguggaccugggccugcccaacugggggcgguacgugcugaugagcgccggcgcccucgccauccuggugcugaccaucuuccucaugaccugcugccgccgggccaaccgcaccaagagcauccagcaggggcugggcgaguccgugcggaaggucagcgugccccugcagaacgggaaggugaucuccagcugggaguccuacaagagcggcggcgagacccgccuguga

SEQ ID NO: 95379 - RNA, 1575 nt, Artificial Sequence
  derived and/or modified CDS sequence (opt1) from glycoprotein__RABV__JQ685999.1
augaucccccaggcccuccuguucgugccgcugcugauccccagccucugccugggcgaguuccccaucuacaccauccccgacaagcuggggccguggacccccaucgacauccaccaccucuccugccccaacaaccuggucgccgagaacgacggcugcacgagccuguccggguucagcuacauggagcucaaggugggcuacaucuccgcgaucaaggugaacggguucacgugcaccggcgucgugaccgaggccgagaccuacaccaacuucgugggcuacgucaccaccacguucaagcgcaagcacuuccggcccaugccggacgccugccgcgccgcccacgacuggaagauggcgggggacccccgguacgaggacagccugcagaaccccuaccccgacuaccacuggcugcgcaccgugaagaccaccaaggagucccucgugaucaucagcccguccgucgccgaccuggaccccuacgacaagagccugcacucccggguguuccccagcggcaagugccucgggaucacgguguccagcaccuacugcuccaccaaccacgacuacaccaucuggaugcccgucgagccgcgccugggcacgagcugcgacaucuucaccaacucccgggggaagcgcgccagcaagggcggccgggugugcggguucguggacgagcgcggccuguacaagucccucaagggggccugcaagcugaagcugugcggcguccccggcauccggcucauggacgggaccugggugagcauccagaccagcgaggacaucaaguggugcccgcccgaccgccuggugaaccugcacgacuuccacuccgacgagcucgagcaccuggucguggaggagcugaucaagcggcgcgagaacugccucgacgcgcuggagagcaucaugacgaccaaguccgugagcuuccggcgccugucccaccuccggaagcugguccccggcuucgggaaggccuacaccaucuucaacaagacccugauggaggccgacgcccacuacaagagcgugaagacguggaacgaggugauccccuccaagggcugccucgaggucgggggccgcugccacccgcccgugaacggcgucuucuucaacgggaucauccugggccccgacgggaacgugcugauccccgagaugcagagcucccuccugcagcagcacauggagcugcucgagagcuccgugaucccccugaugcacccccuggccgacccgagcaccgucuucaaggagggcgacgaggcggaggacuucguggaggugcaccuccccgacguccacaagcaggucuccgacguggaccuggggcugcccagcuggggcaaguaccuccugauguccgccggcgcccuggccauccucauccuggccaucgugcugaucaucugcugccggcgcgugaacaagaccgggagcacccagcggggccaccgcgagucccgcgggaagaugagcguggcgccgcagaacggcaagaucaucuccagcugggagcuguacaagcgggagagcgagacggggcucuga

SEQ ID NO: 95380 - RNA, 1575 nt, Artificial Sequence
  derived and/or modified CDS sequence (opt1) from glycoprotein__RABV__JQ686000.1
augaucccccaggcccuccuguucgugccgcugcugauccccagccucugccugggcaaguuccccaucuacaccauccccgacaagcuggggccguggucccccaucgacauccaccaccucagcugccccaacaaccuggucguggaggacgagggcugcaccucccugagcggguucuccuacauggagcucaaggugggcuacaucagcgccaucaaggucaacggguucacgugcaccggcguggugaccgaggccgagaccuacacgaacuucgucggcuacgugaccaccaccuucaagcgcaagcacuuccggcccaugccggacgccugccgcgccgcccacgacuggaagaucgccggggacccccgguacgaggacucccugcagaaccccuaccccgacuaccacuggcugcgcacggugaagaccaccaaggagagccucgucaucaucuccccgagcguggcggagcuggaccccuacgacaagucccugcacagccggguguuccccuccggcaagugccucgggaucaccgucagcuccacguacugcagcaccaaccacgacuacaccaucuggaugcccguggaggcccgccugggcaccuccugcgacaucuucacgaacagccgggggaagaaggccuccaagggcggccggaccugcggguucguggacgagcgcggccuguacaagagccucaagggggccugcaagcugaagcugugcggcgucccgggccuccgccugauggacgggaccugggugagcauccagaccuccgacgacaucaaguggugcccgcccgaccagcuggugaaccuccacgacuuccacagcgacgagaucgagcaccuggucguggaggagcugaucaagaagcgggagggcugccucgacgcgcuggaguccaucaugacgaccaagagcguguccuuccgccggcugagccaccuccgcaagcugguccccggguucggcaaggccuacaccaucuucaacaacacccugauggaggccgacgcccacuacaaguccgugcggacguggaacgaggugauccccagcaaggggugccucaaggucggcggccgcugccacccgcccgugaacggggucuucuucaacggcaucauccuggggcccgacggcaacgugcugauccccgagaugcaguccagccuccugcagcagcacauggagcugcucgaguccagcgugaucccccugaugcacccccuggccgaccccuccaccgucuucaaggacggggacgaggcggaggacuucguggaggugcaccucccggacguccacaagcaggucagcgacguggaccugggccugcccuccuggggcaaguaccuccugaugagcgccggggcccuggccacccucucccuggccaucuuccugaucacgugcugccggcgcgcgaaccggaccgagagcacccagcgcggccaccgggaguccgggggcaaggugagcguggcgccccagaacgggaagaucaucagcuccugggagcuguacaagagcgaguccgagaccggcauguga

SEQ ID NO: 95381 - RNA, 1575 nt, Artificial Sequence
  derived and/or modified CDS sequence (opt1) from glycoprotein__RABV__JQ686001.1
augaucccccaggcccuccuguucgugccgcugcugauccccagccucugccugggcaaguuccccaucuacaccauccccgacaagcuggggccguggucccccaucgacauccaccaccucagcugccccaacaaccuggucgccgaggacgagggcugcaccucccugagcggguucuccuacauggagcucaaggugggcuacaucagcgccaucaaggugaacggguucacgugcaccggcgucgugaccgaggccgagaccuacacgaacuucgugggcuacgucaccaccaccuucaagcgcaagcacuuccggcccaugccggacgccugccgcgccgcccacgacuggaagauggcgggggacccccgguacgaggacucccugcagaaccccuaccccgacuaccacuggcugcgcacggugaagaccaccaaggagagccucgugaucaucuccccgagcgucgccgaccuggaccccuacgacaagucccugcacagccggguguuccccuccggcaagugccucgggaucaccgugagcuccacguacugcagcaccaaccacgacuacaccaucuggaugcccgucgaggcccgccugggcaccuccugcgacaucuucacgaacagcaaggggaagaaggccuccaagggcggccggaccugcggguucguggacgagcgcggccuguacaagagccucaagggggcgugcaagcugaagcugugcggcgugccgggccuccggcugauggacgggaccugggucagcauccagaccuccgacgacaucaaguggugcccgcccgaccagcuggugaaccuccacgacuuccacagcgacgagaucgagcaccugguggucgaggagcugaucaagaagcgcgagggcugccucgacgcccuggaguccaucaugacgaccaagagcguguccuuccggcgccugagccaccuccggaagcuggugcccggguucggcaaggccuacaccaucuucaacaacacccugauggaggccgacgcccacuacaaguccguccgcacguggaacgaggugauccccagcaaggggugccucaaggugggcggccggugccacccgcccgucaacgggguguucuucaacggcaucauccuggggcccgacggcaacguccugauccccgagaugcaguccagccuccugcagcagcacauggagcugcucgaguccagcgugaucccccugaugcacccccuggcggaccccuccaccguguucaaggacggggacgaggccgaggacuucgucgaggugcaccucccggacgugcacaagcaggucagcgagaucgaccugggccugcccuccuggggcaaguaccuccugaugagcgccggggugcuggccacccucauccuggccaucuuccugaucacgugcugccgccgggcgaaccgcaccgaguccacccagcggggccgccgggagagcgggggcaagguguccgucgcgccccagaacgggaagaucaucagcagcugggagcuguacaaguccgagagcgagaccggccucuga

SEQ ID NO: 95382 - RNA, 1575 nt, Artificial Sequence
  derived and/or modified CDS sequence (opt1) from glycoprotein__RABV__JQ686002.1
augaucccccaggcccuccuguuccugccguuccuguuccccagccucugccugggcaaguuccccaucuacaccauccccgagaagcuggggccguggucccccaucgacauccaccaccucagcugccccaacaaccugguggucgaggacgagggcugcgacucccugagcggguucuccuacauggagcucaaggugggcuacaucagcgccaucaaggugaacggguucacgugcaccggcgucgugaccgaggcggagaccuacaccaacuucgugggcuacgucacgaccaccuucaagcgcaagcacuuccggcccaugccggacgccugccgcgccgccuacaacuggaagaccgccggggacccccgguacgaggagucccugcacaaccccuaccccgacuaccacuggcugcgcacggugaagaccaccaaggagagccucaucaucaucuccccgagcguggcggaccuggaccccuacgacaagucccugcacagccgggucuuccccggcgggaagugccucggcaucaccguguccagcacguacugcuccaccaaccacgacuacaccaucuggaugcccgaggaggcccgccuggggaccagcugcgacaucuucacgaacuccaagggcaagcgggccagcaagggcgggcggaccugcggcuucguggacgagcgcgggcuguacaagucccucaagggcgccugcaagcugaagcugugcggcgucccggggcuccgccugauggacggcaccuggguggcgauccagacccccggggagacgaaguggugcagccccgaccagcuggugaaccuccacgacuuccggagcgacgagaucgagcaccuggucguggaggagcugaucaagaagcgcgaggagugccucgacgcccuggaguccaucaugaccaccaagagcguguccuuccggcgccugagcaaccuccggaagcugguccccggcuucgggaaggccuacaccaucuucaacaagacgcugauggaggccgacgcccacuacaaguccgugcgcaccugggacgagaucaucccgagcaagggcugccuccgggugggcgggcgcugccacccccacgucaacggcguguucuucaacgggaucauccugggccccgacgggcacgugcugauccccgagaugcaguccagccuccugcagcagcacauggagcugcucgaguccagcgucaucccgcugauccacccccuggcggaccccuccaccguguucaaggacggcgacgaggccgaggacuucgucgaggugcaccuccccgacgugcacaagcaggucagcggcguggaccuggggcugccgaacuggggcaaguacgugcucaugggggccggcguccuggccaccgugauccugacgauccuccugcugaccugcugccggcgcgugaaccggaccaagcccaagcagcagucccuggaggagagcgggcgcaaggucuccgugacgccccagaacggcaaggugaugagcuccugggaguacuacaagagcgagggccgcaccucccucuga

SEQ ID NO: 95383 - RNA, 1575 nt, Artificial Sequence; identical to SEQ ID NO: 95318
  derived and/or modified CDS sequence (opt1) from glycoprotein__RABV__JQ686003.1

SEQ ID NO: 95384 - RNA, 1575 nt, Artificial Sequence
  derived and/or modified CDS sequence (opt1) from glycoprotein__RABV__JQ686004.1
augaucccccaggcccuccuguucgugccgcugcugauccccagccucugccugggcaaguuccccaucuacaccauccccgacaagcuggggccguggucccccaucgacauccaccaccucagcugccccaacaaccuggucgccgaggacgagggcugcaccucccugagcggguucuccuacauggagcucaaggugggcuacaucagcgccaucaaggugaacggguucacgugcaccggcgucgugaccgaggccgagaccuacacgaacuucgugggcuacgucaccaccaccuucaagcgcaagcacuuccggcccaugccggacgccugccgcgccgcccacgacuggaagauggcgggggacccccgguacgaggacucccugcagaaccccuaccccgacuaccacuggcugcgcacggugaagaccaccaaggagagccucgugaucaucuccccgagcgucgccgaccuggaccccuacgacaagucccugcacagccggguguuccccuccggcaagugccucgggaucaccgugagcuccacguacugcagcaccaaccacgacuacaccaucuggaugcccgucgaggcccgccugggcaccuccugcgacaucuucacgaacagcaaggggaagaaggccuccaagggcggccggaccugcggguucguggacgagcgcggccuguacaagagccucaagggggcgugcaagcugaagcugugcggcgugccgggccuccggcugauggacgggaccugggccagcauccagaccuccgacgacaucaaguggugcccgcccgaccagcuggucaaccuccacgacuuccacagcgacgagaucgagcaccuggugguggaggagcugaucaagaagcgcgagggcugccucgacgcccuggaguccaucaugacgaccaagagcgucuccuuccggcgccugagccaccuccggaagcuggugcccggguucggcaaggccuacaccaucuucaacaacacccugauggaggccgacgcgcacuacaaguccgugcgcacguggaacgaggucauccccagcaaggggugccucaaggugggcggccggugccacccgcccgugaacggggucuucuucaacggcaucauccuggggcccgacggcaacgugcugauccccgagaugcaguccagccuccugcagcagcacauggagcugcucgaguccagcgucaucccccugaugcacccccuggccgaccccuccaccguguucaaggacggggacgaggccgaggacuucguggagguccaccucccggacgugcacaagcaggucagcgagaucgaccugggccugcccuccuggggcaaguaccuccugaugagcgccggggugcuggccacccucauccuggcgaucuuccugaucacgugcugccgccgggccaaccgcaccgaguccacccagcggggccgccgggagagcgggggcaagguguccguggcgccccagaacgggaagaucaucagcagcugggagcuguacaaguccgagcgcgagaccggccucuga

SEQ ID NO: 95385 - RNA, 1575 nt, Artificial Sequence
  derived and/or modified CDS sequence (opt1) from glycoprotein__RABV__JQ686005.1
augaucccccaggcccugcucagccugcugcuccugaucuccagccugugccucggcaaguucccgaucuacaccauccccgacaagcuggggcccuggucccccaucgacauccaccaccugagcugcccgaacaaccucguggucgaggacgagggcugcaccucccugagcggguucuccuacauggagcugaaggugggcuacaucagcgccaucaaggugaacggguucacgugcaccggcgucgugaccgaggcggagaccuacaccaacuucgugggcuacgucaccaccaccuucaagcgcaagcacuuccggcccaugcccgacgccugccgcgccgcccacgaguggaagauggccggggacccccgguacgaggacucccuccagaacccguaccccgacuaccacuggcugcgcacggugaagaccaccaaggagagccugaucaucaucucccccagcguggcggaccucgaccccuacgacaagucccugcacagccgggucuucccgggcgggaacugccugggcaucaccaucuccagcacguacugcuccaccaaccacgacuacaccaucuggaugcccgaggaggcccgccucgggaccagcugcgacaucuucacgaacucccggggcaagcgcgccagcaagggcgggaagaucugcggcuucguggacgagcgggggcuguacaagagccugaagggcgccugcaagcucaagcugugcggcgugcccgggcugcgccucauggacggcaccugggucuccauccagaccagcgacgagaccaaguggugcccgcccgaccagcuggugaacgugcacgacuuccacuccgacgagaucgagcaccugaucgucgaggagcucgugaagaagcgggaggagugccuggacgcgcuggagagcaucaugacgaccaaguccgugagcuuccgccggcucucccaccuccgcaagcugguccccggguucggcaaggccuacaccaucuucaacaagacccugauggaggccgacgcccacuacaagagcgugcggacguggaacgagaucauccccuccaaggggugccugaaggugggcggcaugugccacccccacgucgggggcguguucuucaacgggaucauccugggcccggacgggaccgugcucauccccgagaugcagagcucccugcugcagcagcacauggagcuccuggagagcuccgucaucccccugaugcacccccucgccgacccgagcaccguguucaaggagggcgacgaggcggaggacuucgucgagauccaccuccccgacgugcacaagcagaucuccggcguggaccuggggcugcccagcuggggcaaguaccugcugaucuccgccggggcccucgccacccugauccugacgaucuuccugaucacgugcugccgcaaggucaaccggaccgagagcgugcagcgcggccaccgggaguccgagcgcaaggugcccgucagcccgcagaacgggcgggugaucagcuccugggagcucuacaagagcggcggcgagaccaaccuguga

SEQ ID NO: 95386 - RNA, 1575 nt, Artificial Sequence
  derived and/or modified CDS sequence (opt1) from glycoprotein__RABV__JQ686006.1
augaucccccaggcccuccuguucgugccgcugcugaucagcucccucugcuucggcaaguuccccaucuacaccauccccgagaagcuggggcccuggagcccgaucgacauccaccaccuguccugccccaacaaccucgucgccgaggacgagggcugcaacagccuguccggguucagcuacauggagcugaaggugggcuacaucuccgcgaucaaggugaacggguucacgugcaccggcgucgugaccgaggccgagaccuacaccaacuucgugggcuacgucacgaccaccuucaagcgcaagcacuuccggcccacccccgacgccugccgcgccgccuacaacuggaagauggcgggggacccgcgguacgaggagagccuccacaaccccuaccccgacuaccacuggcugcgcacggugaagaccaccaaggagucccuggugaucaucagccccuccgucgccgaccucgacccguacgacaagagccugcacucccggguguuccccgacggcaagugccuggggaucaccaucagcuccacguacugcagcaccaaccacgacuacaccaucuggaugcccgaggaggcccgccucggcaccuccugcgacaucuucacgaccagcaaggggaagcgggccuccaagggcgacaagaucugcggcuucguggacgagcgcgggcuguacaagagccugaagggcgcgugcaagcucaagcugugcgggguccugggccuccggcugauggacggcaccugggugagcauccagacccccggggagacgaaguggugcuccccggaccagcuggugaaccuccacgacuuccacagcgacgagaucgagcaccuggucgccgaggagcuggugaagaagcgcgaggagugccucgacgcccuggaguccaucaugaccaccaagagcguguccuuccggcgccugagccaccuccggaagcugguccccggcuucgggaaggccuacaccaucuucaacaagacgcugauggaggccgacgcgcacuacaaguccgugcgcaccuggaacgaggugauccccagcaagggcugccucuccgucgggggccggugccacccccacgugaacggcguguucuucaacgggaucauccugggcccggacgggagcguccugauccccgagaugcaguccagccuccugcagcagcacauggagcugcucgaguccagcgugaucccccugaugcacccccuggccgacccguccaccgucuucaaggacggcgacgaggccgagaacuucguggaggugcaccuccccgacguccacaagcaggucagcgggguggaccugggccugcccaacuggggcaaguaccuccugaugaucgccggggcccuggcgacccucaugcugacgaucuuccugaugaccugcugccgccggaccaagcgcgccgaguccauccagcacggccugggggagagcggccggaagguguccgugacgccccagagcgggaaggugaucagcuccugggagagcuacaaguccggcggcgagacccgccucuga

SEQ ID NO: 95387 - RNA, 1575 nt, Artificial Sequence
  derived and/or modified CDS sequence (opt1) from glycoprotein__RABV__JQ686007.1
augaucccccgcgcccuccuguucgugccgcugcugauccccagccucugccugggcgaguuccccaucuacaccauccccgacaagcuggggccguggucccccaucgacauccaccaccucagcugccccaacaaccuggucgccgagaacgacggcugcaccucccugagcggguucuccuacauggagcucaaggugggcuacaucagcgcgaucaaggugaacggguucacgugcaccggcgucgugaccgaggccgagaccuacacgaacuucgugggcuacgucaccaccaccuucaagcggaagcacuuccgccccacgccggacgccugccgggccgcccacgacuggaagauggcgggggacccccgcuacgaggccucccugcagaaccccuaccccgacuaccacuggcugcggaccgugaagaccaccaaggagagccucgugaucaucuccccgagcgucgccgaccuggaccccuacgacaagucccugcacagccgcguguuccccuccggcaagugccucgggaucacggugagcuccaccuacugcagcaccaaccacgacuacaccaucuggaugcccgucgagccgcggcugggcacguccugcgacaucuucaccaacagccgcgggaagcgggccuccaagggcggccgcgugugcggguucguggacgagcggggccuguacaagagccucaagggggcgugccgccugaagcugugcggcguccccggcauccggcuccuggacgggaccugggugagcauccagaccuccgaggacaucaaguggugcccgcccgaccgccuggugaaccuccacgacuuccacagcgacgagaucgagcaccuggucguggccgagcugaucaagcggcgcgagaacugccucgacgcccuggaguccaucaugacgaccaagagcguguccuuccggcgccugagccaccuccggaagcugguccccggcuucgggaaggccuacaccaucuucaacaagacccugauggaggccgacgcgcacuacaaguccgugaagacguggaacgaggugauccccagcaagggcugccucgaggucgggggccgcugccacccccacgugaacggcgucuucuucaacgggaucauccugggccccgacgggaacgugcugaucccggagaugcaguccagccuccugcagcagcacauggagcugcucgaguccagcgugaucccccugaugcacccccuggccgaccccuccaccgucuucaaggagggcgacgaggccgaggacuucguggaggugcaccucccggacguccacaagcaggucagcgacguggaccuggggcugcccuccuggggcaaguaccuccugaucagcgccggcgcccuggcgauccucauccuggccaucgugcugaucaucugcugccggcgcgugaacaagacccgcuccacccagcgggggcaccgcgagagcggcgggaagauguccguggucccccagaacggcaagaucaucagcagcugggagcuguacaaguccgagagcgagacggggcucuga

SEQ ID NO: 95388 - RNA, 1575 nt, Artificial Sequence
  derived and/or modified CDS sequence (opt1) from glycoprotein__RABV__JQ686008.1
augaucagccaggccuuccuguucgugcccuuccucaucuccagccugugcuucggcaaguucccgaucuacaccauccccgacaagaucgggcccuggucccccaucgacauccaccaccugagcugcccgaacaaccucgucguggaggacgagggcugcaccucccugagcggguucuccuacauggagcugaaggugggcuacaucagcgccaucaaggucaacggguucacgugcaccggcguggugaccgaggcggagaccuacacgaacuucgucggcuacgugaccaccaccuucaagcgcaagcacuuccggcccaugcccgacgccugccgcgccgccuacaacuggaagauggccggggacccccgguacgaggagucccuccagaacccguaccccgacuacaacuggcugcgcacggugaagaccaccaaggagagccugaucaucaucucccccagcgucgcggaccucgaccccuacgacaagucccugcacagccggguguucccgaacggcaagugccuggggaucaccguguccagcacguacugcuccaccaaccacgacuacaccaucuggaugcccgaggaggcccgccucggcaccagcugcgacaucuucacgaacuccaaggggaagcgggccagcaagggcggcaagaccugcggguucgucgacgagcgcggccuguacaagagccugcgcggggccugcaagcucaagcugugcggcgugcccggccugcggcucauggacgggaccuggguguccauccagaccagcgacgagacgaaguggugcccgcccgaccagcuggucaacgugcacgacuuccacuccgacgagaucgagcaccugguggucgaggagcucgugcggaagcgcgaggagugccuggacgcgcuggagagcaucaugaccaccaaguccgugagcuuccggcgccucucccaccuccggaagcugguccccggcuucgggaaggccuacaccaucuucaacaagacgcugauggaggccgacgcccacuacaagagcauccagaccuggaacgagaucauccccuccaagggcugccugaaggucgggggcaugugccacccccaccuggacggcguguucuucaacgggaucauccucggcccggacgggaacgugcugauccccgagaugcagagcucccugcuccagcagcacauggagcugcuggagagcuccgugaucccccucaugcacccccuggccgacccgagcaccgucuucaaggacggcgacgaggcggaggacuucguggaggugcaccuccccgacauccacaagcaggucuccgggaucgaccugggccugcccgacuggggcaaguaccugcucaugagcgccggggcccuggccauccugcuccugaccaucuuccugaugacgugcugccgccgggugaaccgcaccgaguccgcccagcgggaccccggcgagagcgggcgcaagguguccgucaccccgcagaacggcaaggugaucagcagcugggagcucuacaaguccgggggcgacacccggcuguga

SEQ ID NO: 95389 - RNA, 1575 nt, Artificial Sequence
  derived and/or modified CDS sequence (opt1) from glycoprotein__RABV__JQ686009.1
augaucccccaggcccuccuguucgugccgcugcugauccccagccucugccugggcaaguuccccaucuacaccauccccgacaagcuggggccguggucccccaucgacauccaccaccucagcugccccaacaaccuggucguggaggacgagggcugcaccucccugagcggguucuccuacauggagcucaaggugggcuacaucagcgccaucaaggucaacggguucacgugcaccggcguggugaccgaggccgagaccuacacgaacuucgucggcuacgugaccaccaccuucaagcgcaagcacuuccggcccaugccggacgccugccgcgccgcccacgacuggaagaucgccggggacccccgguacgaggacucccugcagaaccccuaccccgacuaccacuggcugcgcacggugaagaccaccaaggagagccucgucaucaucuccccgagcguggcggaccuggaccccuacgacaagucccugcacagccggguguuccccuccggcaagugccucgggaucaccgucagcuccacguacugcagcaccaaccacgacuacaccaucuggaugcccguggaggcccgccugggcaccuccugcgacaucuucacgaacagccgggggaagaaggccuccaagggcggccggaccugcggguucguggacgagcgcggccuguacaagagccucaagggggccugcaagcugaagcugugcggcgucccgggccuccgccugauggacgggaccugggugagcauccagaccuccgacgacaucaaguggugcccgcccgaccagcuggugaaccuccacgacuuccacagcgacgagaucgagcaccuggucguggaggagcugaucaagaagcgggagggcugccucgacgcgcuggaguccaucaugacgaccaagagcguguccuuccgccggcugagccaccuccgcaagcugguccccggguucggcaaggccuacaccaucuucaacaacacccugauggaggccgacgcccacuacaaguccgugcggacguggaacgaggugauccccagcaaggggugccucaaggucggcggccgcugccacccgcccgugaacggggucuucuucaacggcaucauccuggggcccgacggcaacgugcugauccccgagaugcaguccagccuccugcagcagcacauggagcugcucgaguccagcgugaucccccugaugcacccccuggccgaccccuccaccgucuucaaggacggggacgaggcggaggacuucguggaggugcaccucccggacguccacaagcaggucagcgacguggaccugggccugcccuccuggggcaaguaccuccugaugagcgccggggcccuggccacccucauccuggccaucuuccugaucacgugcugccggcgcgcgaaccggaccgaguccacccagcgcggccaccgggagagcgggggcaagguguccguggcgccccagaacgggaagaucaucagcagcugggagcuguacaaguccgagagcgagaccggcauguga

SEQ ID NO: 95390 - RNA, 1575 nt, Artificial Sequence; identical to SEQ ID NO: 95358
  derived and/or modified CDS sequence (opt1) from glycoprotein__RABV__JQ686011.1

SEQ ID NO: 95391 - RNA, 1575 nt, Artificial Sequence
  derived and/or modified CDS sequence (opt1) from glycoprotein__RABV__JQ699230.1
auggugccccagguccugcuguucgugccgcugcugguguucagcuccugcuucggcaaguuccccaucuacaccauccccgacaagcucgggcccuggagcccgaucgacauccgccaccuguccugccccaacaaccuggucguggaggacgagggcugcaccaaccucagcggguucuccuacauggagcugaaggugggcuacaucagcgccaucaaggucaacggguucacgugcaccggcguggugaccgaggccgagaccuacacgaacuucgucggcuacgugaccaccaccuucaagcggaagcacuuccgccccaugcccgacgcgugccgggccgccuacaacuggaagauggccggggacccgcgcuacgaggagucccugcacaaccccuaccccgacuaccacuggcuccggacggugaagaccaccaaggagagccuggucaucaucucccccagcguggccgaccuggacccguacgacaagucccuccacagccgcguguuccccggcgggaagugcuccggcaucaccgucagcuccacgugcugcagcaccaaccacgacuacaccaucuggaugcccgagaacccccggcuggggaccuccugcgacaucuucacgaacagccgcggcaagcgggcguccaagggcgggaagaccugcggcuucguggacgagcgcgggcuguacaagagccucaagggcgccugcaagcugaagcugugcggcgugcucgggcugcggcugauggacggcaccugggucgccauccagaccagcgacgagaucaaguggugcuccccggaccagcucgugaaccugcacgacuuccacagcgacgagaucgagcaccugguggucgaggagcucgugaagaagcgcgaggagugccuggacgcccuggagacgaucaugaccaccaaguccgugagcuuccggcgccucucccaccuccggaagcugguccccggguucggcaaggcguacaccaucuucaacaagacgcucauggaggccgacgcccacuacaagagcauccgcaccuggaacgagaucauccccuccaaggggugccugcgggugggcggccgcugccacccccacgucaacgggguguucuucaacggcaucauccuggggccggacggccacgugcucauccccgagaugcagagcucccugcugcaccagcacauggagcuccuggagagcuccgucaucccccugaugcacccccucgccgacccgagcaccguguucaaggacggggacgaggccgaggacuucguggagguccaccuccccgacgugcacaagcagaucuccggcguggaccugggccugcccaacugggggaaguacguccugaucagcgcgggcgcccugaccgcccucaugcugaugaucuuccugaugacgugcugccggaaggccaaccgcgccgaguccauccagcacaaccccggggagaccggccggaaggugagcgugaccucccacaacgggcgcgucaucagcuccugggagagcuacaagagcggcggcgagaccaagcucuga

SEQ ID NO: 95392 - RNA, 1575 nt, Artificial Sequence
  derived and/or modified CDS sequence (opt1) from glycoprotein__RABV__JQ699231.1
auggugccccagguccugcuguucgugccgcugcugguguucagcuccugcuucggcaaguuccccaucuacaccauccccgacaagcucgggcccuggagcccgaucgacauccaccaccuguccugccccaacaaccuggucguggaggacgagggcugcaccaaccucagcggguucuccuacauggagcugaaggugggcuacaucagcgccaucaaggucaacggguucacgugcaccggcguggugaccgaggccgagaccuacacgaacuucgucggcuacgugaccaccaccuucaagcgcaagcacuuccggcccaugcccgacgcgugccgcgccgccuacaacuggaagauggccggggacccgcgguacgaggagucccugcacaaccccuaccccgacuaccacuggcuccgcacggugaagaccaccaaggagagccuggucaucaucucccccagcguggccgaccuggacccguacgacaagucccuccacagccggguguuccccggcgggaagugcuccggcaucaccgucagcuccacgugcugcagcaccaaccacgacuacaccaucuggaugcccgagaacccccgccuggggaccuccugcgacaucuucacgaacagccggggcaagcgcgcguccaagggcgggaagaccugcggcuucguggacgagcgggggcuguacaagagccucaagggcgccugcaagcugaagcugugcggcgugcucgggcugcgccugauggacggcaccugggucgccauccagaccagcgacgagaucaaguggugcuccccggaccagcucgugaaccugcacgacuuccacagcgacgagaucgagcaccugguggucgaggagcucgugaagaagcgggaggagugccuggacgcccuggagacgaucaugaccaccaaguccgugagcuuccgccggcucucccaccuccgcaagcugguccccggguucggcaaggcguacaccaucuucaacaagacgcucauggaggccgacgcccacuacaagagcauccggaccuggaacgagaucauccccuccaaggggugccugcgcgugggcggccggugccacccccacgucaacgggguguucuucaacggcaucauccuggggccggacggccacgugcucauccccgagaugcagagcucccugcugcaccagcacauggagcuccuggagagcuccgucaucccccugaugcacccccucgccgacccgagcaccguguucaaggacggggacgaggccgaggacuucguggagguccaccuccccgacgugcacaagcugaucuccggcguggaccugggccugcccaacugggggaaguacguccugaucagcgcgggcgcccucaccgcccugaugcugaugaucuuccucaugacgugcugccgcaaggccaaccgggccgaguccauccagcacaaccccggggagaccggccgcaaggugagcgugaccucccacaacgggcgggucaucagcuccugggagagcuacaagagcggcggcgagaccaagcuguga

SEQ ID NO: 95393 - RNA, 1575 nt, Artificial Sequence; identical to SEQ ID NO: 94870
  derived and/or modified CDS sequence (opt1) from glycoprotein__RABV__JQ699255.1

SEQ ID NO: 95394 - RNA, 1575 nt, Artificial Sequence; identical to SEQ ID NO: 94870
  derived and/or modified CDS sequence (opt1) from glycoprotein__RABV__JQ699257.1

SEQ ID NO: 95395 - RNA, 1575 nt, Artificial Sequence
  derived and/or modified CDS sequence (opt1) from glycoprotein__RABV__JQ699258.1
augaucccccaggugcugcuguucgucacccugcugguguucagcuccugcuucggcaaguucccgaucuacaccauccccgacaagcucgggcccuggagccccaucgacauccaccaccuguccugcccgaacaaccugguggucgaggacgagggcugcacgaaccucagcggguucuccuacauggagcugaaggugggcuacaucagcgccaucaaggugaacggguucacgugcaccggcgucgugaccgaggccgagaccuacaccaacuucgugggcuacgucaccaccacguucaagcgcaagcacuuccggcccaugcccgacgcgugccgcgccgccuacaacuggaagauggccggggacccccgguacgaggagucccugcacaacccguaccccgacuaccacuggcuccgcaccgugaagaccaccaaggagagccuggugaucaucucccccagcgucgccgaccuggaccccuacgacaagucccuccacagccggguguucccgggcgggaagugcuccggcaucacggugagcuccacgugcugcagcaccaaccacgacuacaccaucuggaugcccgagagcccccgccuggggaccuccugcgacaucuucaccaacucccggggcaagcgcgcgagcaagggcgggaagaccugcggcuucgucgacgagcgggggcuguacaagagccucaagggcgccugcaagcugaagcugugcggcgugcucgggcugcgccugauggacggcaccuggguggccauccagacguccgacgagaucaaguggugcccgcccgaccagcucgucaaccugcacgacuuccacagcgacgagaucgagcaccuggugguggaggagcucgucaagaagcgggaggagugccuggacgcccuggagaccaucaugaccaccaaguccgugagcuuccgccggcucucccaccuccgcaagcuggugcccggguucggcaaggcguacacgaucuucaacaagacccucauggaggccgacgcccacuacaagagcauccggaccuggaacgagaucauccccuccaaggggugccugcgcgucggcggccggugccacccccacgugaacggggucuucuucaacggcaucauccuggggccggacggccacgugcucauccccgagaugcagagcucccugcugcaccagcacauggagcuccuggagagcuccgugaucccccugaugcacccccucgccgacccgagcaccgucuucaaggacggggacgaggccgaggacuucguggaggugcaccuccccgacguccacaagcagaucuccggcguggaccugggccugcccaacugggggaaguacgugcugaucagcgcgggcgcccugacggcccucaugcugaccaucuuccugaugaccugcugccgcaagaccaacggggccggcuccauccagcacagccccggggagacgggccggaaggucuccgugaccagccacaacggccgcgugaucuccagcugggagagcuacaaguccgggagcgagaccaagcucuga

SEQ ID NO: 95396 - RNA, 1575 nt, Artificial Sequence
  derived and/or modified CDS sequence (opt1) from glycoprotein__RABV__JQ699259.1
augaucccccaggcccugcuguucgugccgcugcuggucuucagcuccugcuucggcaaguuccccaucuacaccauccccgacaagcucgggcccuggagcccgaucgacauccaccaccuguccugccccaacaaccuggugguggaggacgagggcugcaccaaccucagcggguucuccuacauggagcugaaggucggcuacaucagcgccaucaaggugaacggguucacgugcaccggcguggucaccgaggcggagaccuacacgaacuucgugggcuacgugaccaccaccuucaagcgcaagcacuuccggcccaugcccgacgccugccgcuccgccuacaacuggaagauggccggggacccgcgguacgaggagagccugcacaaccccuaccccgacuaccacuggcuccgcacggucaagaccaccaaggagucccuggugaucaucagccccuccguggccgaccuggacccguacgacaagagccuccacucccgggucuucccccgcggcaagugcagcgggaucaccguguccagcacgugcugcuccaccaaccacgacuacaccaucuggaugcccgagaacccccggcugggcaccagcugcgacaucuucacgaacucccgcgggaagcgggcgagcaagggcagcaagaccugcggcuucguggacgagcgcgggcuguacaagucccucaagggcgccugcaagcugaagcugugcgggguccucggccugcggcugauggacggcaccuggguggccauccagaccagcaacgagaucaaguggugcccgcccgaccagcucgugaaccugcacgacuuccacuccgacgagaucgagcaccuggucguggaggagcucgugaagaagcgcgaggagugccuggacgcccuggagacgaucaugaccaccaagagcgucuccuuccggcgccucagccaccuccggaagcuggugcccggguucggcaaggcguacaccaucuucaacaagacgcucauggaggccgacgcccacuacaaguccauccgcaccuggaacgagaucauccccagcaaggggugccugcgggugggcgggcgcugccacccgcacgucaacggcguguucuucaacggcaucauccuggggcccgacggccacguccucauccccgagaugcaguccagccugcugcaccagcacauggagcuccuggaguccagcgugaucccccugaugcacccgcucgccgaccccuccaccguguucaaggacggggacgaggccgaggacuucgucgaggugcaccuccccgacgugcacaagcagaucagcggcgucgaccuggggcugcccaacuggggcaaguacgugcugaucuccgcgggcgcccugaccgcccucaugcugacgaucuuccugaucacgugcugccggaagaccaaccgcgccgggagcauccagcacuccccgggcgagaccgggcggaaggugagcgucaccucccacaacggccgcgugaucagcagcugggaguccuacaagagcggguccgagaccaagcucuga

SEQ ID NO: 95397 - RNA, 1575 nt, Artificial Sequence
  derived and/or modified CDS sequence (opt1) from glycoprotein__RABV__JQ699260.1
auggugccccaggccuuccuguucgucccguuccucgccgugccccugugcuucggcaaguuccccaucuacaccauccccgacaagcuggggccguggagccccaucgacauccaccaccucuccugccccaacaaccugguggucgaggacgagggcugcaccaaccugagcggguucuccuacauggagcucaaggugggcuacaucagcgcgaucaaggugacgggguucacgugcaccggcgucgugaccgaggccgagaccuacaccaacuucgugggcuacgucaccaccacguucaagcgcaagcacuuccggcccaccccggacgccugccgcuccgccuacaacuggaagaucgccggggacccccgguacgaggagagccugcacaaccccuaccccgacuaccacuggcugcgcaccgugaagaccacgaaggaguccuucgugaucaucagcccguccgucgcggaccucgaccccuacgacaagagccugcacucccggguguucccccgcggcaagugcagcgggaucaccguguccagcaccuacugcuccaccaaccacgacuacacgaucuggaugcccgagaacccgcggcugggcaccagcugcgacaucuucaccaacucccgcgggaagcgggccagcaagggcuccaagaccugcggcuucgucgacgagcgcgggcucuacaagagccugaagggcgccugcaagcugaagcucugcggggugcugggccugcggcucauggacggcacguggguggccauccagaccagcgacgagaccaaguggugcccgcccgaccagcuggucaaccugcacgacuuccacuccgacgagaucgagcaccucgugguggaggagcuggucaagaagcgcgaggagugccuggacgcgcucgagagcaucaugaccacgaaguccgugagcuuccggcgccugucccaccuccggaagcuggugcccggguucggcaaggccuacaccaucuucaacaagacccugauggaggccgacgcccacuacaagagcguccgcaccuggaacgagaucauccccuccaaggggugccugcgggugggcgggcgcugccacccccacgucaacggcguguucuucaacggcaucauccucgggcccgacggccacgugcugauccccgagaugcagagcucccugcuccagcagcacauggagcugcuggagagcuccgucaucccgcucaugcacccccuggccgaccccagcacgguguucaaggacggggacgaggcggaggacuucguggagguccaccuccccgacgugcacaagcaggucuccggcguggaccuggggcugccgagcuggggcaaguacgugcugauguccgccggcauccucaccgcccugaugcugaugaucuuccucaugaccugcugccggcgcaccaaccgggccgagagcauccagcacucccugggggagacgggccgcaaggugagcgucaccucccagaacgggcgcgugaucagcagcugggaguccuacaagagcggcggggagaccaagcuguga

SEQ ID NO: 95398 - RNA, 1575 nt, Artificial Sequence
  derived and/or modified CDS sequence (opt1) from glycoprotein__RABV__JQ699262.1
auggugccccaggcccugcuguucgucccgcugcuggccgugccccucugcuucggcaaguuccccaucuacaccauccccgacaagcuggggccguggagccccaucgacauccaccaccuguccugccccaacaaccucguggucgaggacgagggcugcaccaaccugagcggguucuccuacauggagcugaaggugggcuacaucagcgcgaucaaggugacgggguucacgugcaccggcgucgugaccgaggccgagaccuacaccaacuucgugggcuacgucaccaccacguucaagcgcaagcacuuccggcccaccccggacgccugccgcuccgccuacaacuggaagaucgccggggacccccgguacgaggagagccuccacaaccccuaccccgacuaccacuggcugcgcaccgugaagaccacgaaggaguccuucgugaucaucagcccguccgucgcggaccuggaccccuacgacaagagccuccacucccggguguucccccgcggcaagugcagcgggaucaccguguccagcaccuacugcuccaccaaccacgacuacacgaucuggaugcccgagaacccgcggcugggcaccagcugcgacaucuucaccaacucccgcgggaagcgggccagcaagggcuccaagaccugcggcuucgucgacgagcgcgggcuguacaagagccucaagggcgccugcaagcugaagcugugcggggugcucggccugcggcugauggacggcacguggguggccauccagaccagcgacgagaccaaguggugcccgcccgaccagcucgucaaccugcacgacuuccacuccgacgagaucgagcaccuggugguggaggagcucgucaagaagcgcgaggagugccuggacgcgcuggagagcaucaugaccacgaaguccgugagcuuccggcgccucucccaccuccggaagcuggugcccggguucggcaaggccuacaccaucuucaacaagacccucauggaggccgacgcccacuacaagagcguccgcaccuggaacgagaucauccccuccaaggggugccugcgggugggcgggcgcugccacccccacgucaacggcguguucuucaacggcaucauccuggggcccgacggccacgugcucauccccgagaugcagagcucccugcugcagcagcacauggagcuccuggagagcuccgucaucccgcugaugcacccccucgccgaccccagcacgguguucaaggacggggacgaggcggaggacuucguggagguccaccuccccgacgugcacaagcaggucuccggcguggaccuggggcugccgagcuggggcaaguacgugcugauguccgccggcauccugaccgcccucaugcugaugaucuuccugaugaccugcugccggcgcaccaaccgggccgagagcauccagcacucccucggggagacgggccgcaaggugagcgucaccucccagaacgggcgcgugaucagcagcugggaguccuacaagagcggcggggagaccaagcuguga

SEQ ID NO: 95399 - RNA, 1575 nt, Artificial Sequence
  derived and/or modified CDS sequence (opt1) from glycoprotein__RABV__JQ699264.1
auggugccccaggcccugcuguucgucccgcugcuggccgugccccucugcuucggcaaguuccccaucuacaccauccccgacaagcuggggccguggagccccaucgacauccaccaccuguccugccccaacaaccucguggucgaggacgagggcugcaccaaccugagcggguucuccuacauggagcugaaggugggcuacaucagcgcgaucaaggugaacggguucacgugcaccggcgucgugaccgaggccgagaccuacacgaacuucgugggcuacgucaccaccaccuucaagcgcaagcacuuccggcccacgccggacgccugccgcuccgccuacaacuggaagauggccggggacccccgguacgaggagagccuccacaaccccuaccccgacuaccacuggcugcgcaccgugaagaccaccaaggaguccuucgugaucaucagcccguccgucgcggaccuggaccccuacgacaagagccuccacucccggguguucccccgcggcaagugcagcgggaucacgguguccagcaccuacugcuccaccaaccacgacuacaccaucuggaugcccgagaacccgcggcugggcacgagcugcgacaucuucaccaacucccgcgggaagcgggccagcaagggcuccaagaccugcggcuucgucgacgagcgcgggcuguacaagagccucaagggcgccugcaagcugaagcugugcggggugcucggccugcggcugauggacggcaccuggguggccauccagacgagcgacgagaccaaguggugcccgcccgaccagcucgucaaccugcacgacuuccacuccgacgagaucgagcaccuggugguggaggagcucgucaagaagcgcgaggagugccuggacgcgcuggagagcaucaugaccaccaaguccgugagcuuccggcgccucucccaccuccggaagcuggugcccggguucggcaaggccuacacgaucuucaacaagacccucauggaggccgacgcccacuacaagagcauccgcaccuggaacgagaucauccccuccaaggggugccugcgggucggcgggcgcugccacccccacgugaacggcgucuucuucaacggcaucauccuggggcccgacggccacgugcucauccccgagaugcagagcucccugcugcagcagcacauggagcuccuggagagcuccgugaucccgcugaugcacccccucgccgaccccagcaccgucuucaaggacggggacgaggcggaggacuucguggaggugcaccuccccgacguccacaagcaggucuccggcguggaccuggggcugccgagcuggggcaaguacgugcugauguccgccggcauccugacggcccucaugcugaugaucuuccugaugaccugcugccggcgcaccaaccgggccgagagcauccagcacucccucggggagaccggccgcaaggugagcgugacgucccagaacgggcgcgucaucagcagcugggaguccuacaagagcggcggggagaccaagcuguga

SEQ ID NO: 95400 - RNA, 1575 nt, Artificial Sequence; identical to SEQ ID NO: 95077
  derived and/or modified CDS sequence (opt1) from glycoprotein__RABV__JQ699267.1

SEQ ID NO: 95401 - RNA, 1575 nt, Artificial Sequence; identical to SEQ ID NO: 94551
  derived and/or modified CDS sequence (opt1) from glycoprotein__RABV__JQ699272.1

SEQ ID NO: 95402 - RNA, 1575 nt, Artificial Sequence
  derived and/or modified CDS sequence (opt1) from glycoprotein__RABV__JQ730682.1
augaucccccagacccugcuguucgugccgcugcuggucuucagccucugcuucggcaaguuccccaucuacaccauccccgacaagcuggggcccugguccccgaucgacauccaccaccugagcugccccaacaaccucgugguggaggacgagggcugcacgaaccuguccggguucagcuacauggagcugaaggucggcuacaucuccgccaucaaggugaacggguucacgugcaccggcguggucaccgaggccgagaccuacaccaacuucgugggcuacgugaccaccacguucaagcgcaagcacuuccggcccacccccgacgcgugccgcgccgccuacaacuggaagauggccggggacccgcgguacgaggagagccuccacaaccccuaccccgacuaccacuggcugcgcaccgucaagaccacgaaggagucccuggugaucaucagccccuccgugagcgaccucgacccguacgacaagucccugcacagccgggucuuccccuccggcaagugcagcgggaucaccguguccagcaccuacugccccaccaaccacgacuacacgaucuggaugcccgagaacccgcgccugggcaccuccugcgacaucuucaccaacagccgggggaagcgcgccuccaagggcagcaagaccugcggcuucguggacgagcgggggcucuacaagagccugaagggcgcgugcaagcugaagcucugcgggguccugggccugcgccucauggacggcacgugggccgccauccagaccuccgacgaggccaaguggugcccgcccgaccagcuggugaacauccacgacuuccggagcgacgagaucgagcaccugguggucgaggagcucgugaagaagcgcgaggagugccuggacgcgcuggaguccaucaugaccaccaagagcguguccuuccggcgccucagccaccuccggaagcugguccccggguucggcaaggccuacacgaucuucaacaagacccucauggaggccgacgcccacuacaaguccgugcgcaccuggaacgagaucauccccagcaaggggugccugcgggugggcgggcgcugccacccccacgucaacggcguguucuucaacggcaucauccuggggcccgacggccacguccucauccccgagaugcaguccagccugcugcagcagcacauggagcuccuggaguccagcgugaucccgcugaugcacccccucgccgaccccuccaccguguucaaggacggggacgaggcggaggacuucgucgaggugcaccuccccgacgugcacaagcaggucagcggcguggaccuggggcugccguccuggggcaaguacgugcugaugagcgucggcacgcugaucgcccucaugcugaugauccugcucacgaccugcugccggaaggccaacggggccgaguccauccagcaccgccugggcgagaccgggcggaaggugagcgugaccucccagaacggccgcgucaucagcagcugggaguccuacaagagcgggggcgagaccaagcuguga

SEQ ID NO: 95403 - RNA, 1575 nt, Artificial Sequence
  derived and/or modified CDS sequence (opt1) from glycoprotein__RABV__JQ824889.1
augaucccccacgcccugcucagcgugccgcugcugaucuccagccucugcuucggcaaguuccccaucuacaccauccccgagaagcuggggcccugguccccgaucgacauccaccaccugagcugccccaacaaccucgucguggaggacgagggcugcaacucccugagcggguucuccuacauggagcugaaggugggcuacaucagcgccaucaaggucaacggguucacgugcaccggcguggugaccgaggcggagaccuacaccaacuucgucggcuacgugaccaccaccuucaagcgcaagcacuuccggcccaugcccgacgccugccgcgccgccuacaacuggaagaccgccggggacccgcgguacgaggagucccuccacaaccccuaccccgacuaccacuggcugcgcacggugaagaccaccaaggagagccugaucaucaucucccccagcgucgcggaccucgacccguacgacaagucccugcacagccggaucuuccccggcgggaagugccugggcaucaccaucuccagcacguacugcuccaccaaccacgacuacaccaucuggaugcccgaggaggcccgccucgggaccagcugcgacaucuucacgaacuccaagggcaagcgggccagcaagggcgggcggaccugcggcuucguggacgagcgcgggcuguacaagagccugaagggcgccugcaagcucaagcugugcggcgugcccgggcugcgccucauggacggcaccugggucgcgauccagaccccgaacgagacgaaguggugcucccccgaccagcuggugaacgugcacgacuuccggagcgacgagaucgagcaccuggucguggaggagcucauccgcaagcgggaggagugccuggacgcccuggaguccaucaugaccaccaagagcguguccuuccgccggcucagcaaccugcgcaagcugguccccggguucggcaaggccuacaccaucuucaacaagacgcucauggaggccgacgcccacuacaaguccgugcggaccuggaacgagaucauccccagccgcgggugccugaaggugggcggccggugccacccgcacgucaacgggguguucuucaacggcaucauccuggggcccgacggccacauccucauccccgagaugcaguccagccugcugcagcagcacauggagcuccuggaguccagcgugaucccccugauccacccgcucgcggaccccuccaccgucuucaaggacggggacgaggccgaggacuucguggagguccaccuccccgacgugcaccagcaggucagcggcguggaccugggccugcccgacugggggaaguacgugcugauguccgccggcgcccuggccaccgugaugcucacgaucuuccugaucacgugcugccgccgggucaagcgcaccgagagcgugcagcaggggcugggcgaguccgggcgcaaggugagcgucgcgccgcagaacggcaaggugauguccagcugggaguacuacaagagcggcgggggcacccggcucuga

SEQ ID NO: 95404 - RNA, 1575 nt, Artificial Sequence
  derived and/or modified CDS sequence (opt1) from glycoprotein__RABV__JQ944704.1
auggacccccaggcccugcuccuggugccgcugcucggcuucagccugugcuucgggaaguuccccaucuacaccauccccgacaagcugggccccuggaucccgaucgacauccaccaccucuccugccccaacaaccuggucguggaggacgaggggugcaccaaccugagcggcuucuccuacauggagcucaaggugggguacaucagcuccaucaaggucaacggcuucacgugcaccggcguggugaccgaggccgagaccuacacgaacuucgucggguacgugaccaccaccuuccgccggaagcacuuccgccccacgcccgacgcgugccgggccgccuacaacuggaagauggccggcgacccgcgcuacgaggagagccugcacaaccccuaccccgacuaccacuggcugcggaccgugaagaccaccaaggagucccucgucaucaucagccccuccguggccgaccuggacccguacgacaagagccugcacucccgcguguuccccagcgggaagugcuccggcaucacggucagcuccaccuacugcagcaccaaccacgacuacaccaucuggaugcccgagaaccuccggcuggggacguccugcgacaucuucaccaacagccgcggcaagcgggcguccaagggcagcaagaccugcggguucguggacgagcgcggccuguacaagagccucaagggggccugcaagcugaagcugugcggcgugcucggccugcggcugauggacgggaccugggucgccaugcagacguccgacgagaccaaguggugcccgcccgaccagcucgugaaccugcacgacuuccgcagcgacgagaucgagcaccugguggucgaggagcucgugaagaagcgggaggagugccuggacgcccuggaguccaucaugaccaccaagagcguguccuuccgccggcucagccaccuccgcaagcugguccccggcuucgggaaggcguacacgaucuucaacaagacccugauggaggccgacgcccacuacaaguccgugcggaccuggaacgaggugauccccagccgcggcugccugcgggucgggggccgcugccacccccacgugaacggcgucuucuucaacgggaucauccugggcccggacgggcacgugcucauccccgagaugcaguccagccugcugcagcagcacaucgagcuccuggaguccagcgugaucccccugaugcacccccucgccgacccguccaccgucuucaaggacggcgacgaggccgaggacuucguggaggugcaccuccccgacguccacaagcaggucagcgggguggaccugggccugcccaacuggggcaaguacgugcugcuguccgcgggggcccucaucgcccugaugcugaucaucuuccugaucacgugcugccggcgcgugaaccgccccgagagcacccagcggucccuccgcggcgccgggcggaaggugagcaucaccucccagagcggcaaggucaucagcuccugggagagcuacaaguccgggggcgagacccgccuguga

SEQ ID NO: 95405 - RNA, 1575 nt, Artificial Sequence
  derived and/or modified CDS sequence (opt1) from glycoprotein__RABV__JQ944705.1
auggugccccaggucuuccuguucgugccgcugcugguguucccccugugcagcggcaaguuccccaucuacaccauccccgacaagcucgggccguggucccccaucgacauccaccaccugagcugccccaacaaccuggucguggaggacgagggcugcaccaaccucuccggguucagcuacauggagcugaaggugggcuacaucuccgccaucaaggucaacggguucacgugcaccggcguggugaccgaggccgagaccuacacgaacuucgucggcuacgugaccaccaccuuccgccggaagcacuuccgccccacgccggacgcgugccgggccgccuacaacuggaagauggccggggacccccgcuacgaggagagccugcacaaccccuaccccgacuaccacuggcuccggaccgugaagaccaccaaggagucccuggucaucaucagcccguccguggccgaccuggaccccuacgacaagagccuccacucccgcguguuccccagcggcaagugccuggggaucacggucuccagcacccacugcuccaccaaccacgacuacaccaucuggaugcccgagaacccgcggcccggcacgagcugcgacaucuucaccaacucccgcgggaagcgggcgagcaagggcuccaagaccugcggcuucguggacgagcgcgggcuguacaagagccucaagggcgccugcaagcugaagcugugcggggugcucggccugcggcugauggacggcaccugggucgccaugcagacgagcgacgagaccaaguggugcccgcccgaccagcucgugaaccugcacgacuuccgcuccgacgagaucgagcaccugguggucgaggagcucgugaagaagcgggaggagugccuggacgcccuggagagcaucaugaccaccaaguccgugagcuuccgccggcucucccaccuccgcaagcugguccccggguucggcaaggcguacacgaucuucaacaagacccugauggaggccgacgcccacuacaagagcgugcggaccuggaacgagaucauccccuccaaggggugccugcgcgucggcgggcggugccacccccacgugaacggcguguucuucaacggcaucauccuggggcccgacggccacguccucaucccggagaugcagagcucccugcugcagcagcacauggagcuccuggagagcuccgugaucccccugaugcacccccucgccgaccccagcaccguguucaaggacggggacgaggccgaggacuucgucgaggugcaccucccggacgugcacaagcaggucuccggcguggaccuggggcugcccaacuggggcaaguacgugcugcugagcgcgggcgcccucaucgcccugaugcugaugaucuuccucaugacgugcugccgcaaggucaaccggcccgaguccacccagcgcagccucgggggcaccgggcgcaagguguccaucaccagccaguccggcaaggugaucagcagcugggaguccuacaagagcgggggcgagacgcggcuguga

SEQ ID NO: 95406 - RNA, 1575 nt, Artificial Sequence
  derived and/or modified CDS sequence (opt1) from glycoprotein__RABV__JQ944706.1
auggcgccccaggcccugcuguucgugccgcugcuggucuucccccugugcuucggcaaguuccccaucuacaccauccccgacaagcuggggccguggagccccaucgacauccaccaccuguccugccccaacaaccucgugguggaggacgagggcugcaccaaccugagcggguucuccuacauggagcugaaggucggcuacaucagcgccaucaaggugaacggguucacgugcaccggcguggucaccgaggccgagaccuacacgaacuucgugggcuacgugaccaccaccuucaagcgcaagcacuuccggcccaucccggacgccugccgcgccgccuacaacuggaagauggcgggggacccccgguacgaggagucccuccacaaccccuaccccgacuaccacuggcugcgcacggucaagaccaccaaggagagccuggugaucaucuccccgagcguggccgaccucgaccccuacgacaagucccugcacagccgggucuuccccuccggcaagugcagcgggaucaccguguccagcacguacugcuccaccaaccacgacuacaccaucuggaugcccgagaacccgcgccugggcaccagcugcgacaucuucgccaacucccgggggaagcgcgccagcaagggcuccaagacgugcggcuucguggacgagcgggggcucuacaagagccugaagggcgcgugcaagcugaagcucugcgggguccugggccugcgccucauggacggcaccuggguggccaugcagaccagcgacgagaccaaguggugcccgcccgaccagcuggugaaccugcacgacuuccgguccgacgagaucgagcaccucgucguggaggagcuggugaagaagcgcgaggagugccuggacgcccucgagagcaucaugacgaccaaguccgucagcuuccggcgccugucccaccuccggaagcucgugcccggguucggcaaggccuacaccaucuucaacaagacccugauggaggccgacgcgcacuacaagagcgugcgcacguggaacgagaucauccccuccaaggggugccugcgggucggcgggcgcugccacccccacgugaacggcgucuucuucaacggcaucauccucgggcccgacggccacgugcugauccccgagaugcagagcucccugcuccagcagcacauggagcugcuggagagcuccgugaucccgcucaugcacccccuggccgaccccagcaccgucuucaaggacggggacgaggccgaggacuucguggaggugcaccuccccgacguccacaagcaggucuccggcguggaccuggggcugccgaacuggggcaaguacgugcugcucagcgccggcgcccugaucgcgcugaugcucaucaucuuccugaugaccugcugccggcgcgugaaccggcccgaguccacccagcgcugccucgggggcacggggcgcaaggugagcgucaccucccagagcggcaaggugaucuccagcugggagagcuacaaguccgggggcgagacccggcuguga

SEQ ID NO: 95407 - RNA, 1575 nt, Artificial Sequence
  derived and/or modified CDS sequence (opt1) from glycoprotein__RABV__JQ944707.1
augaucccccaggcccugcuguucgugccgcugcuggccuuccccaugugcuucggcaaguuccccaucuacaccauccccgacaagcucgggccguggagccccaucgacauccaccaccuguccugccccaacaaccuggucguggaggacgagggcugcaccaaccucagcggguucuccuacauggagcugaaggugggcuacaucagcgcgaucaaggucaacggguucacgugcaccggcgugaucaccgaggccgagaccuacacgaacuucgugggcuacgucaccaccaccuucaagcgcaagcacuuccggcccacgccggacgccugccgcgccgccuacaacuggaagauggcgggggacccccgguacgaggagucccugcacaaccccuaccccgacuaccacuggcuccgcaccgugaagaccaccaaggagagccugaucaucaucuccccgagcguggccgaccuggaccccuacgacaagucccuccacagccgggucuuccccuccggcaagugccuggggaucacgaucagcuccaccuacugcagcaccaaccacgacuacaccaucuggaugcccgagaaccugcgccucggcacguccugcgacaucuucaccaacagccgggggaagcgcgccuccaagggcagcaagaccugcggcuucguggacgagcgggggcuguacaagucccugaagggcgccugcaagcucaagcugugcggggugcugggccuccgccugauggacggcaccugggucgcgaugcagacgagcgacgagaccaaguggugcccgcccgaccagcuggugaaccuccacgacuuccggagcgacgagaucgagcaccugguggucgaggagcuggugaagaagcgcgaggagugccucgacgcccuggaguccaucaugaccaccaagagcguguccuuccggcgccugagccaccuccggaagcugguccccggguucggcaaggccuacacgaucuucaacaagacccugauggaggccgacgcccacuacaaguccgugcgcaccuggaacgagaucauccccagcaaggggugccuccgggugggcgggcgcugccacccgcacgucaacggcguguucuucaacggcaucauccuggggcccgacggccacgugcugauccccgagaugcaguccagccuccugcagcagcacauggagcugcucgaguccagcgucaucccccugaugcacccgcuggcggaccccuccaccguguucaaggacggggacgaggccgaggacuucgucgaggugcaccuccccgacgugcacaagcagaucagcggcgucgaccuggggcugcccaacuggggcaaguacgugcucaucaucgccggcgugcugaucgccaugauccugacgaucuuccucaugaccugcugcgggcggggcaaccgcccgaaguccacccagcacagccucgggggcaucgggcggaaggucuccgccaccagccaguccggcaaggugaucagcuccugggagagcuacaagagcggcggggagacgcgccuguga

SEQ ID NO: 95408 - RNA, 1575 nt, Artificial Sequence
  derived and/or modified CDS sequence (opt1) from glycoprotein__RABV__JQ944708.1
auggugccccaggcccuccuguucgucccgcugcugguguucccccucugcuucggcaaguuccccaucuacaccauccccgacaagcuggggccguggagccccaucgacauccaccaccuguccugccccaacaaccucguggucgaggacgagggcugcaccaaccugagcggguucuccuacauggagcugaaggugggcuacaucagcgccaucaaggugaacggguucacgugcaccggcgucgugaccgaggcggagaccuacacgaacuucgugggcuacgucaccaccaccuucaagcgcaagcacuuccggcccacgccggacgccugccgcgccgccuacaacuggaagaccgccggggacccccgguacgaggagucccuccacaaccccuaccccgacuaccacuggcugcgcaccgugaagaccacgaaggagagccuggugaucaucuccccgagcgucgcggaccucgaccccuacgacaagucccugcacagccggguguuccccuccggcaagugcagcgggaucaccguguccagcaccuacugcuccaccaaccacgacuacacgaucuggaugcccgagaaccugcgccucggcaccagcugcgacaucuucaucaacucccgggggaagcgcgccagcaagggcucccagaccugcggcuucaucgacgagcgggggcuguacaagagccugaagggcgccugcaagcucaagcugugcgggguccugggccuccgccugauggacggcaccuggguggccaugcagacgagccacgagaccaaguggugcccgcccgaccagcuggugaaccuccacgacuuccgguccgacgagaucgagcaccuggucguggaggagcuggugaagaagcgcgaggagugccucgacgcgcuggagagcaucaugaccaccaaguccgucagcuuccggcgccugucccaccuccggaagcuggugcccggguucggcaaggccuacacgaucuucaacaagacccugauggaggccgacgcccacuacaagagcgugcgcaccuggaacgagaucauccccuccaaggggugccuccgggucggcgggcgcugccacccgcacgugaacggcgucuucuucaacggcaucauccuggggcccgagggccacgugcugauccccgagaugcagagcucccuccugcagcagcacauggagcugcucgagagcuccgugaucccccugaugcacccgcuggccgaccccagcaccgucuucaaggagggggacgaggcggagaacuucguggaggugcaccuccccgacguccacaagcaggucuccggcguggaccuggggcugcccaacuggggcaaguacgugcuccugagcuccggcgcccugaucgcccucaugcugaucaucuuccugcugacgugcugccggcgcgugaaccggccggagagcacccagcacucccucgggggcaagcgccgcaaggugagcaucaccucccagagcgggaaggucaucagcuccugggagagcuacaaguccggcggggagacccggcuguga

SEQ ID NO: 95409 - RNA, 1575 nt, Artificial Sequence
  derived and/or modified CDS sequence (opt1) from glycoprotein__RABV__JQ944709.1
auggugccccagguccugcuguucgugccgcugcugggcuucagccucugcuucgggaaguuccccaucuacaccauccccgacgagcugggccccugguccccgaucgacauccaccaccugagcugccccaacaaccucguggucgaggacgaggggugcaccaaccuguccgaguucagcuacauggagcugaaggugggcuacaucuccgccaucaaggugaacggguucacgugcaccggcgucgugaccgaggccgagaccuacacgaacuucgugggcuacgucaccaccaccuucaagcgcaagcacuuccggcccacgcccgacgcgugccgcgccgccuacaacuggaagauggccggggacccgcgguacgaggagagccuccacaaccccuaccccgacuaccacuggcugcagaccgugcgcaccaccaaggagucccugaucaucaucagccccuccgugacggaccucgacccguacgacaagagccugcacucccgggucuuccccggcgggaagugcagcggcaucaccguguccagcaccuacugcuccaccaaccacgacuacacgaucuggaugcccgagaacccccgcccgcggacccccugcgacaucuucaccaacagccgcgggaagcgggccuccaagggcaacaagaccugcggcuucguggacgagcgcgggcuguacaagagccucaagggcgcgugccggcugaagcugugcgggguccucggccugcgccugauggacggcacguggguggccaugcagaccuccgacgagaccaaguggugcccgcccgaccagcucgugaaccugcacgacuuccggagcgacgagaucgagcaccuggucguggaggagcucgugaagaagcgcgaggagugccuggacgcccuggagagcaucaugaccacgaaguccgucagcuuccggcgccucucccaccuccggaagcuggugcccggguucggcaaggccuacaccaucuucaacaagacccucauggaggcggacgcccacuacaagagcgugcgcaccuggaacgagaucauccccuccaaggggugccugaaggucggcgggcggugccacccccacgugaacggcgucuucuucaacggcaucauccuggggcccgacggccacgugcucaucccggagaugcagagcucccugcugcagcagcacauggagcuccuggagagcuccgugaucccccugaugcacccccucgccgaccccagcacggucuucaaggagggggacgaggccgaggacuucguggaggugcaccucccggacgucuacaagcagaucuccggcguggaccuggggcugcccaacuggggcaaguacgugcugaugaccgccggcgcgaugaucgggcugguccucaucuucagccugaugaccuggugccgccgggccaaccgccccgaguccaagcagcgcagcuucggcgggaccggccggaacguguccgugacgagccaguccgggaaggucaucccgagcugggaguccuacaagagcggcggcgagauccgccuguga

SEQ ID NO: 95410 - RNA, 1575 nt, Artificial Sequence
  derived and/or modified CDS sequence (opt1) from glycoprotein__RABV__JQ950447.1
augaucccccaggccuuccuguucgugccgcuccuggucgugccccugugcuucggcaaguuccccaucuacaccauccccgacaagcucgggccguggagccccaucgacauccaccaccuguccugccccaacaaccugguggucgaggacgagggcugcaccaaccucagcggguucuccuacauggagcugaaggugggcuacaucagcgccaucaaggugaacggguucacgugcaccggcgucgugaccgaggcggagaccuacacgaacuucgugggcuacgucaccaccaccuucaagcgcaagcacuuccggcccacgccggacgccugccgcuccgccuacaacuggaagauggccggggacccccgguacgaggagagccugcacaaccccuaccccgacuaccacuggcuccgcaccgugaagaccaccaaggaguccuucgugaucaucagcccguccgucgccgaccuggaccccuacgacaagagccugcacucccggguguucccccgcggcaagugcagcgggaucacgguguccagcaccuacugccccaccaaccacgacuacaccaucuggaugccggagaacccccggcucggcacguccugcgacaucuucaccaacagccgcgggaagcgggcguucaagggcuccaagaccugcggcuucgucgacgagcgcgggcuguacaagagccugaagggcgccugcaagcucaagcugugcggggugcugggccuccggcugauggacggcaccuggguggccauccagacguccgacgagaccaaguggugcccgcccgaccagcuggucaaccuccacgacuuccacagcgacgagaucgagcaccuggugguggaggagcuggucaagaagcgcgaggagugccucgacgcccuggagagcaucaugaccaccaaguccgugagcuuccggcgccugucccaccuccggaagcuggugcccggguucggcaaggcguacacgaucuucaacaagacccugauggaggccgacgcccacuacaagagcguccgcaccuggaacgagaucauccccuccaaggggugccuccgggugggcgggcgcugccacccccacgucaacggcguguucuucaacggcaucauccuggggcccgacggccacgugcugaucccggagaugcagagcucccuccugcagcagcacauggagcugcucgagagcuccgucaucccccugaugcacccccuggccgaccccagcaccguguucaagaacggggacgaggccgaggacuucguggagguccaccucccggacgugcacaagcaggucuccggcguggaccuggggcugcccagcuggggcaaguacgugcucauguccgcgggcauccugacggcccugaugcucaugaucuuccugaugaccugcugccggcgcaccaaccggagcgaguccauccagcacagccugggggagaccggccgcaagguguccgucacgagccaguccgggcgcgugaucagcagcugggaguccuacaagagcggcggggagaccaagcucuga

SEQ ID NO: 95411 - RNA, 1575 nt, Artificial Sequence
  derived and/or modified CDS sequence (opt1) from glycoprotein__RABV__JQ950449.1
augaucccccaggccuuccuguucgugccgcuccuggucgugccccugugcuucggcaaguuccccaucuacaccauccccgacaagcucgggccguggagccccaucgacauccaccaccuguccugccccaacaaccugguggucgaggacgagggcugcaccaaccucagcggguucuccuacauggagcugaaggugggcuacaucagcgccaucaaggugaacggguucacgugcaccggcgucgugaccgaggcggagaccuacacgaacuucgugggcuacgucaccaccaccuucaagcgcaagcacuuccggcccacgccggacgccugccgcuccgccuacaacuggaagauggccggggacccccgguacgaggagagccugcacaaccccuaccccgacuaccacuggcuccgcaccgugaagaccaccaaggaguccuucgugaucaucagcccguccgucgccgaccuggaccccuacgacaagagccugcacucccggguguucccccgcggcaagugcagcgggaugacgguguccagcaccuacugccccaccaaccacgacuacaccaucuggaugccggagaacccccggcucggcacguccugcgacaucuucaccaacagccgcgggaagcgggcguucaagggcuccaagaccugcggcuucgucgacgagcgcgggcuguacaagagccugaagggcgccugcaagcucaagcugugcggggugcugggccuccggcugauggacggcaccuggguggccauccagacguccgacgagaccaaguggugcccgcccgaccagcuggucaaccuccacgacuuccacagcgacgagaucgagcaccuggugguggaggagcuggucaagaagcgcgaggagugccucgacgcccuggagagcaucaugaccaccaaguccgugagcuuccggcgccugucccaccuccggaagcuggugcccggguucggcaaggcguacacgaucuucaacaagacccugauggaggccgacgcccacuacaagagcguccgcaccuggaacgagaucauccccuccaaggggugccuccgggugggcgggcgcugccacccccacgucaacggcguguucuucaacggcaucauccuggggcccgacggccacgugcugaucccggagaugcagagcucccuccugcagcagcacauggagcugcucgagagcuccgucaucccccugaugcacccccuggccgaccccagcaccguguucaagaacggggacgaggccgaggacuucguggagguccaccucccggacgugcacaagcaggucuccggcguggaccuggggcugcccagcuggggcaaguacgugcucauguccgcgggcauccugacggcccugaugcucaugaucuuccugaugaccugcugccggcgcaccaaccggagcgaguccauccagcacagccugggggagaccggccgcaagguguccgucacgagccaguccgggcgcgugaucagcagcugggaguccuacaagagcggcggggagaccaagcucuga

SEQ ID NO: 95412 - RNA, 1575 nt, Artificial Sequence
  derived and/or modified CDS sequence (opt1) from glycoprotein__RABV__JX088694.1
auggugccccaggcccugcuguucgucccgcugcuggccgugccccucugcuucggcaaguuccccaucuacaccauccccgacaagcuggggccguggagccccaucgacauccaccaccuguccugccccaacaaccucguggucgaggacgagggcugcaccaaccugagcggguucuccuacauggagcugaaggugggcuacaucagcgcgaucaaggugaacggguucacgugcaccggcgucgugaccgaggccgagaccuacacgaacuucgugggcuacgucaccaccgccuucaagcgcaagcacuuccggcccaccccggacgccugccgcuccgccuacaacuggaagauggcgggggacccccgguacgaggagagccuccacaaccccuaccccgacuaccacuggcugcgcacggugaagaccaccaaggaguccuucgugaucaucagcccguccgucgccgaccuggaccccuacgacaagagccuccacucccggguguucccccgcggcaagugcagcgggaucaccguguccagcacguacugcuccaccaaccacgacuacaccaucuggaugcccgagaacccgcggcugggcaccagcugcgacaucuucacgaacucccgcgggaagcgggccagcaagggcuccaagaccugcggcuucgucgacgagcgcgggcuguacaagagccucaagggcgccugcaagcugaagcugugcggggugcucggccugcggcugauggacggcaccuggguggcgauccagaccagcgacgagacgaaguggugcccgcccgaccagcucgucaaccugcacgacuuccacuccgacgagaucgagcaccuggugguggaggagcucgucaagaagcgcgaggagugccuggacgcccuggagagcaucaugaccaccaaguccgugagcuuccggcgccucucccaccuccggaagcuggugcccggguucggcaaggccuacaccaucuucaacaagacgcucauggaggccgacgcccacuacaagagcguccgcaccuggaacgagaucauccccuccaaggggugccugcgggugggcgggcgcugccacccccacgucaacggcguguucuucaacggcaucauccuggggcccgacggccacgugcucauccccgagaugcagagcucccugcugcagcagcacauggagcuccuggagagcuccgucaucccgcugaugcacccccucgcggaccccagcaccguguucaaggacggggacgaggccgaggacuucguggagguccaccuccccgacgugcacaagcaggucuccggcguggaccuggggcugccgagcuggggcaaguacgugcugauguccgccggcauccugaccgcccucaugcugaugaucuuccugaugacgugcugccggcgcaccaaccgggccgagagcauccagcacucccucggggagaccggccgcaaggugagcgucaccucccagaacgggcgcgugaucagcagcugggaguccuacaagagcggcggggagacgaagcuguga

SEQ ID NO: 95413 - RNA, 1575 nt, Artificial Sequence
  derived and/or modified CDS sequence (opt1) from glycoprotein__RABV__JX473838.1
auggugccccaggcccuccuguucaucccgcugcuggucuucccccucugccugggcaaguuccccaucuacaccauccccgacaagcuggggccguggagccccaucgacauccaccaccucuccugccccaacaaccuggugguggaggacgagggcugcaccaaccugagcggguucuccuacauggagcucaaggucggcuacaucagcgccaucaaggugaacggguucacgugcaccggcguggucaccgaggcggagaccuacacgaacuucgugggcuacgugaccaccaccuucaagcgcaagcacuuccggcccaucccggacgccugccgcgccgccuacaacuggaagauggccggggacccccgguacgaggagucccugcacaaccccuaccccgacuaccacuggcugcgcacggucaagaccaccaaggagagccucgugaucaucuccccgagcguggcggaccuggaccccuacgacaagucccugcacagccggaucuuccccuccggcaagugcagcgggaucaccgucuccagcacguacugcuccaccaaccacgacuacaccaucuggaugcccgagaacccgcgccucggcaccagcugcgacaucuucgccaacucccgggggaagcgcgccagcaagggcggcaagacgugcgggcugguggacgagcggggccuguacaagucccucaagggggccugcaagcugaagcugugcggcgugcucggccugcgccugauggacgggaccugggucgcgaugcagaccagcgacgagaccaaguggugcccgcccgaccagcucgugaacaugcacgacuuccggagcgacgagaucgagcaccugguggucgaggagcuggugaagaagcgcgaggagugccucgacgcccuggaguccaucaugacgaccaagagcguguccuuccggcgccugagccaccuccggaagcugguccccggcuucgggaaggccuacaccaucuucaacaagacccugauggaggccgacgcccacuacaaguccgugcgcacguggaacgagaucauccccagcaagggcugccuccgggucgggggccgcugccacccccacgugaacggcguguucuucaacgggaucauccugggccccgacgggcacguccugauccccgagaugcaguccagccuccugcagcagcacauggagcugcucgaguccagcgugaucccgcugaugcacccccuggcggaccccuccaccguguucaaggacggcgacgaggccgaggacuucgucgaggugcaccuccccgacgugcacaagcaggucagcgggguggaccugggccugccgaacuggggcaaguacgugcuccuguccgccgggacccugaucgcccucaugcugaucaucuuccugaugaccugcugccggcgcgucaaccggcccgagagcacgcagcgcucccugggcggggccggccgccgggugagcgugaccucccagagcgggaaggucaucuccagcugggagagcuacaaguccggcggcgagacccgccucuga

SEQ ID NO: 95414 - RNA, 1575 nt, Artificial Sequence; identical to SEQ ID NO: 95413
  derived and/or modified CDS sequence (opt1) from glycoprotein__RABV__JX473839.1

SEQ ID NO: 95415 - RNA, 1575 nt, Artificial Sequence
  derived and/or modified CDS sequence (opt1) from glycoprotein__RABV__JX473840.1
auggugccccgcgcccugcuguucaucccgcugcuggucuucagccucugcuucggcaaguuccccaucuacaccauccccgacaagcuggggcccuggaacccgaucgacauccaccaccuguccugccccaacaaccucgugguggaggacgagggcugcaccaaccugagcggguucuccuacauggagcugaaggucggcuacaucagcgccaucaaggugaacggguucacgugcaccggcguggucaccgaggcggagaccuacacgaacuucgugggcuacgugaccaccaccuucaagcggaagcacuuccgccccauccccgacacgugccgggccgccuacaacuggaagauggccggggacccgcgcuacgaggagucccuccacaaccccuaccccgacuaccacuggcugcggaccgucaagaccaccaaggagagccuggugaucaucucccccagcguggccgaccucgacccguacgacaagucccugcacagccgcaucuuccccuccggcaagugcagcgggaucacggucuccagcaccuacugcuccaccagccacgacuacaccaucuggaugcccgagaacccccggcugggcacguccugcgacaucuucgcgaacagccgcgggaagcgggccuccaagggcggcaagaccugcgggcucguggacgagcgcggccuguacaagagccugaagggggccugcaagcucaagcugugcggcgugcugggccuccggcugauggacgggaccugggucgccaugcagaccagcgacgagacgaaguggugcccgcccgaccagcuggugaacaugcacgacuuccgcuccgacgagaucgagcaccucguggucgaggagcuggugaagaagcgggaggagugccuggacgcgcucgagagcaucaugaccaccaaguccgugagcuuccgccggcugucccaccuccgcaagcucguccccggcuucgggaaggccuacaccaucuucaacaagacgcugauggaggccgacgcccacuacaagagcgugcggaccuggaacgagaucauccccuccaagggcugccugcgcgucgggggccggugccacccgcacgugaacggcguguucuucaacgggaucauccucggccccgacgggcacguccugauccccgagaugcagagcucccugcuccagcagcacauggagcugcuggagagcuccgugaucccccucaugcacccgcuggccgaccccagcaccguguucaaggacggcgacgaggcggaggacuucgucgaggugcaccuccccgacgugcacaagcaggucuccgggguggaccugggccugcccaacuggggcaaguacgugcugcucagcgccgggacccugaucgcccugaugcucaugaucuuccugaugacgugcugccgccgggucaaccgcccggaguccacccagcgcagccugggcggggccggccggcgcguguccgugaccagccaguccgggaaggucaucagcagcugggaguccuacaagagcggcggcgagacccggcuguga

SEQ ID NO: 95416 - RNA, 1575 nt, Artificial Sequence
  derived and/or modified CDS sequence (opt1) from glycoprotein__RABV__JX473841.1
auggugccccaggcccugcuguucaucccgcugcuggucuucagccucugcuucggcaaguuccccaucuacaccauccccgacaagcuggggcccuggaacccgaucgacauccaccaccuguccugccccaacaaccucgugguggaggacgagggcugcaccaaccugagcggguucuccuacauggagcugaaggucggcuacaucagcgccaucaaggugaacggguucacgugcaccggcguggucaccgaggcggagaccuacacgaacuucgugggcuacgugaccaccaccuucaagcgcaagcacuuccggcccauccccgacacgugccgcgccgccuacaacuggaagauggccggggacccgcgguacgaggagucccuccacaaccccuaccccgacuaccacuggcugcgcaccgucaagaccaccaaggagagccuggugaucaucucccccagcguggccgaccucgacccguacgacaagucccugcacagccggaucuuccccuccggcaagugcagcgggaucacggucuccagcaccuacugcuccaccagccacgacuacaccaucuggaugcccgagaacccccgccugggcacguccugcgacaucuucgcgaacagccgggggaagcgcgccuccaagggcggcaagaccugcgggcucguggacgagcggggccuguacaagagccugaagggggccugcaagcucaagcugugcggcgugcugggccuccgccugauggacgggaccugggucgccaugcagaccagcgacgagacgaaguggugcccgcccgaccagcuggugaacaugcacgacuuccgguccgacgagaucgagcaccucguggucgaggagcuggugaagaagcgcgaggagugccuggacgcgcucgagagcaucaugaccaccaaguccgugagcuuccggcgccugucccaccuccggaagcucguccccggcuucgggaaggccuacaccaucuucaacaagacgcugauggaggccgacgcccacuacaagagcgugcgcaccuggaacgagaucauccccuccaagggcugccugcgggucgggggccgcugccacccgcacgugaacggcguguucuucaacgggaucauccucggccccgacgggcacguccugauccccgagaugcagagcucccugcuccagcagcacauggagcugcuggagagcuccgugaucccccucaugcacccgcuggccgaccccagcaccguguucaaggacggcgacgaggcggaggacuucgucgaggugcaccuccccgacgugcacaagcaggucuccgggguggaccugggccugcccaacuggggcaaguacgugcugcucagcgccgggacccugaucgcccugaugcucaugaucuuccugaugacgugcugccggcgcgucaaccggccggaguccacccagcgcagccugggcggggccggccgccggguguccgugaccagccaguccgggaaggucaucagcagcugggaguccuacaagagcggcggcgagacccgccuguga

SEQ ID NO: 95417 - RNA, 1575 nt, Artificial Sequence
  derived and/or modified CDS sequence (opt1) from glycoprotein__RABV__JX871837.1
augaucccccaggcccuccuguucgugccgcugcugauccccagccucugccugggcaaguuccccaucuacaccauccccgacaagcuggggccguggucccccaucgacauccaccaccucagcugccccaacaaccuggucguggaggacgagggcugcaccucccugagcggguucuccuacauggagcucaaggugggcuacaucagcgccaucaaggucaacggguucacgugcaccggcguggugaccgaggcggagaccuacacgaacuucgucggcuacgugaccaccaccuucaagcgcaagcacuuccggcccaugccggacgccugccgcgccgcccacgacuggaagaucgccggggacccccgguacgaggacucccugcagaaccccuaccccgacuaccacuggcugcgcacggugaagaccaccaaggagagccucgucaucaucuccccgagcguggcggagcuggaccccuacgacaagucccugcacagccggguguuccccuccggcaagugccucgggaucaccgucagcuccacguacugcagcaccaaccacgacuacaccaucuggaugcccguggaggcccgccugggcaccuccugcgacaucuucacgaacagccgggggaagaaggccuccaagggcggccggaccugcggguucguggacgagcgcggccuguacaagagccucaagggggccugcaagcugaagcugugcggcgucccgggccuccgccugauggacgggaccugggugagcauccagaccuccgacgacaucaaguggugcccgcccgaccagcuggugaaccuccacgacuuccacagcgacgagaucgagcaccuggucguggaggagcugaucaagaagcgggagggcugccucgacgcgcuggaguccaucaugacgaccaagagcguguccuuccgccggcugagccaccuccgcaagcugguccccggguucggcaaggccuacaccaucuucaacaacacccugauggaggccgacgcccacuacaaguccgugcggacguggaacgaggugauccccagcaaggggugccucaaggucggcggccgcugccacccgcccgugaacggggucuucuucaacggcaucauccuggggcccgacggcaacgugcugauccccgagaugcaguccagccuccugcagcagcacauggagcugcucgaguccagcgugaucccccugaugcacccccuggccgaccccuccaccgucuucaaggacggggacgaggcggaggacuucguggaggugcaccucccggacguccacaagcaggucagcgacguggaccugggccugcccuccuggggcaaguaccuccugaugagcgccggggugcuggccacccucauccuggccaucuuccugaucacgugcugccggcgcgccaaccggaccgaguccacccagcgcggccaccgggagagcgggggcaagguguccguggcgccccagaacgggaagaucaucagcagcugggagcuguacaaguccgagagcgagaccggcauguga

SEQ ID NO: 95418 - RNA, 1575 nt, Artificial Sequence; identical to SEQ ID NO: 95273
  derived and/or modified CDS sequence (opt1) from glycoprotein__RABV__JX871838.1

SEQ ID NO: 95419 - RNA, 1575 nt, Artificial Sequence; identical to SEQ ID NO: 95273
  derived and/or modified CDS sequence (opt1) from glycoprotein__RABV__JX871839.1

SEQ ID NO: 95420 - RNA, 1575 nt, Artificial Sequence
  derived and/or modified CDS sequence (opt1) from glycoprotein__RABV__JX871840.1
augaucagccagacccugcuguucgugccccugcugaucuccagccucugcuucggcgaguucccgaucuacaccauccccgagaagcuggggcccuggucccccaucgacauccaccaccugagcugcccgaacaaccucgucguggaggacgagggcugcaacucccugagcggguucuccuacauggagcugaaggugggcuacaucagcuccaucaaggucaacggguucacgugcaccggcguggugaccgaggccgagaccuacacgaacuucgucggcuacgugaccaccaccuucaagcgcaagcacuuccggcccaugcccgacgccugccgcgcggccuacaacuggaagaugagcggggacccccgguacgaggagucccuccacaacccguaccccgacuaccacuggcugcgcacggugaagaccaccaaggagagccuggucaucaucucccccagcguggccgaccucgaccccuacgacaagucccugcacagccggguguucuccggcgggaagugccugggcaucaccaucagcuccacguacugcagcaccaaccacgacuacacccucuggaugccggaggaggcccgccuggggaccagcugcgacaucuucaucaacuccaagggcaagcgggccagcaagggcgggcgcacgugcggcuucgucgacgagcgggggcuguacaagucccucaagggcgcgugcaagcugaagcugugcggcgugcccgggcuccgccugauggacggcaccugggugagcauccagaccuccgacgagaccaaguggugcccgcccgaccagcuggucaacauccacgacuuccggagcgacgagaucgagcaccucgugguggaggagcuggucaagaagcgcgaggagugccuggacgcccucgacuccaucaugacgaccaagagcguguccuuccggcgccugagccaccuccggaagcucgugcccggguucggcaaggccuacaccaucuucaacaagacccugauggaggccgacgcgcacuacaaguccguccgcacguggaacgaggugauccccagcaaggggugccuguccgugggcggccggugccacccccacgucgacgggguguucuucaacggcaucauccucgggcccgacggcagcguccugaucccggagaugcaguccagccugcuccagcagcacauggagcugcuggaguccagcgugaucccccucaugcacccccuggccaaccccuccaccguguucaaggacggggacgaggccgaggacuucgucgaggugcaccucccggacgugcaggagcaggucagcggcguggaccugggccugcccaacugggggaaguacaugcugaugagcgccggcgcccucgcgauccugcugcucaccaucuuccugaugaccugcugccgccgggccaaccgcacgaaguccauccggcaggggcccgaggagagccgccgcaagguguccgugcccccgcagagcggcaaggucaucuccagcugggaguccuucaagagcgggggcgagaccggccuguga

SEQ ID NO: 95421 - RNA, 1575 nt, Artificial Sequence
  derived and/or modified CDS sequence (opt1) from glycoprotein__RABV__JX871841.1
augaucccccaggcccuccuguucgugccgcugcugauccccagccucugccugggcgaguuccccaucuacaccauccccgacaagcuggggccguggucccccaucgacauccaccaccucagcugccccaacaaccuggucgccgagaacgacggcugcaccucccugagcggguucuccuacauggagcucaaggugggcuacaucagcgcgaucaaggugaacggguucacgugcaccggcgucgugaccgaggccgagaccuacacgaacuucgugggcuacgucaccaccaccuucaagcgcaagcacuuccggcccacgccggacgccugccgcgccgcccacgacuggaagauggcgggggacccccgguacgaggccucccugcagaaccccuaccccgacuaccacuggcugcgcaccgugaagaccaccaaggagagccucgugaucaucuccccgagcgucgccgaccuggaccccuacgacaagucccugcacagccggguguuccccuccggcaagugccucgggaucacggugagcuccaccuacugcagcaccaaccacgacuacaccaucuggaugcccgucgagccgcgccugggcacguccugcgacaucuucaccaacagccgggggaagcgcgccuccaagggcggccgggugugcggguucguggacgagcgcggccuguacaagagccucaagggggcgugccggcugaagcugugcggcguccccggcauccgccuccuggacgggaccugggugagcauccagaccuccgaggacaucaaguggugcccgcccgaccggcuggugaaccuccacgacuuccacagcgacgagaucgagcaccuggucguggccgagcugaucaagcgccgggagaacugccucgacgcccuggaguccaucaugacgaccaagagcguguccuuccgccggcugagccaccuccgcaagcugguccccggcuucgggaaggccuacaccaucuucaacaagacccugauggaggccgacgcgcacuacaaguccgugaagacguggaacgaggugauccccagcaagggcugccucgaggucgggggccggugccacccccacgugaacggcgucuucuucaacgggaucauccugggccccgacgggaacgugcugaucccggagaugcaguccagccuccugcagcagcacauggagcugcucgaguccagcgugaucccccugaugcacccccuggccgaccccuccaccgucuucaaggagggcgacgaggccgaggacuucguggaggugcaccucccggacguccacaagcaggucagcgacguggaccuggggcugcccuccuggggcaaguaccuccugaucagcgccggcgcccuggcgauccucauccuggccaucgugcugaucaucugcugccgcaaggugaacaagaccggguccacccagcggggccaccgcgagagcgggggcaagauguccguggucccccagaacgggaagaucaucagcagcugggagcuguacaaguccgagagcgagacgggccucuga

SEQ ID NO: 95422 - RNA, 1575 nt, Artificial Sequence
  derived and/or modified CDS sequence (opt1) from glycoprotein__RABV__JX871842.1
augaucccccaggcccuccuguucgugccguuccuguuccccagccugugccucggcaaguuccccaucuacaccauccccgagaagcuggggccguggucccccaucgacauccaccaccugagcugccccaacaaccucgucguggaggacgagggcugcgacucccugagcggguucuccuacauggagcugaaggugggcuacaucagcgccaucaaggucaacggguucacgugcaccggcguggugaccgaggcggagaccuacaccaacuucgucggcuacgugacgaccaccuucaagcgcaagcacuuccggcccaugccggacgccugccgcgccgccuacaacuggaagaccgccggggacccccgguacgaggagucccuccacaaccccuaccccgacuaccacuggcugcgcacggugaagaccaccaaggagagccugaucaucaucuccccgagcgucgcggaccucgaccccuacgacaagucccugcacagccggguguuccccggcgggaagugccugggcaucaccguguccagcacguacugcuccaccaaccacgacuacaccaucuggaugcccgaggaggcccgccucgggaccagcugcgacaucuucacgaacuccaagggcaagcgggccagcaagggcgggcggaccugcggcuucgucgacgagcgcgggcuguacaagucccugaagggcgccugcaagcucaagcugugcggcgugccggggcugcgccucauggacggcaccuggguggcgauccagacccccggggagacgaaguggugcagccccgaccagcuggucaaccugcacgacuuccggagcgacgagaucgagcaccucgugguggaggagcugaucaagaagcgcgaggagugccuggacgcccucgacuccaucaugaccaccaagagccuguccuucggccggcugagcaaccuccgcaagcugguccccggguucggcaaggccuacaccaucuucaacaagacgcugauggaggccgacgcccacuacaaguccuuccggaccugggacgagaucaucccgagcaagggcugccuccgcgucgggggccggugccacccccacgugaacgggguguucuucaacggcaucauccuggggcccgacggccacgugcugauccccgagaugcaguccagccuccugcagcagcacauggagcugcucgaguccagcgugaucccgcugauccacccccuggcggaccccuccaccgucuucaaggacggcgacgaggccgaggacuucguggagguccaccuccccgacgugcacaagcaggucagcgggguggaccugggccugccgaacugggggaaguacgugcucaugggcgccggggugcuggccaccgucauccugacgaucuuccuccugaccugcugccgccgggugaaccgcaccaagcccaagcagcagucccuggaggagagcggccggaagguguccgucacgccccagaacggcaaggugaugagcuccugggaguacuacaagagcgaggggcgcaccucccuguga

SEQ ID NO: 95423 - RNA, 1575 nt, Artificial Sequence
  derived and/or modified CDS sequence (opt1) from glycoprotein__RABV__JX871844.1
augaucccccaggcccugcuguucgugccgcugcugauccccagccucugccugggcaaguuccccaucuacaccauccccgacaagcuggggccguggucccccaucgacauccaccaccucagcugccccaacaaccuggucguggaggacgagggcugcaccucccugagcggguucuccuacauggagcucaaggugggcuacaucagcgccaucaaggucaacggguucacgugcaccggcguggugaccgaggccgagaccuacacgaacuucgucggcuacgugaccaccaccuucaagcgcaagcacuuccggcccaugccggacgccugccgcgccgcccacgacuggaagaucgccggggacccccgguacgaggacucccugcagaaccccuaccccgacuaccacuggcugcgcacggugaagaccaccaaggagagccucgucaucaucuccccgagcguggcggaccuggaccccuacgacaagucccugcacagccggguguuccccuccggcaagugccucgggaucaccgucagcuccacguacugcagcaccaaccacgacuacaccaucuggaugcccguggaggcccgccugggcaccuccugcgacaucuucacgaacagccgggggaagaaggccuccaagggcggccggaccugcggguucguggacgagcgcggccuguacaagagccucaagggggccugcaagcugaagcugugcggcgucccgggccuccgccugauggacgggaccugggugagcauccagaccuccgacgacaucaaguggugcccgcccgaccagcuggugaaccuccacgacuuccacagcgacgagaucgagcaccuggucguggaggagcugaucaagaagcgggagggcugccucgacgcgcuggaguccaucaugacgaccaagagcguguccuuccgccggcugagccaccuccgcaagcugguccccggguucggcaaggccuacaccaucuucaacaacacccugauggaggccgacgcccacuacaaguccgugcggacguggaacgaggugauccccagcaaggggugccucaaggucggcggccgcugccacccgcccgugaacggggucuucuucaacggcaucauccuggggcccgacggcaacgugcugauccccgagaugcaguccagccuccugcagcagcacauggagcugcucgaguccagcgugaucccccugaugcaccccuccgccgaccccagcaccgucuucaaggacggggacgaggcggaggacuucguggaggugcaccucccggacguccacaagcaggucuccgacguggaccucggccugcccagcuggggcaaguaccugcucauguccgccggggcccuggccacccugauccucgccaucuuccugaucacgugcugccggcgcgcgaaccggaccgagagcacccagcgcggccaccgggaguccgggggcaaggugagcguggcgccccagaacgggaagaucaucagcuccugggagcuguacaagagcgaguccgagaccggcauguga

SEQ ID NO: 95424 - RNA, 1575 nt, Artificial Sequence; identical to SEQ ID NO: 95303
  derived and/or modified CDS sequence (opt1) from glycoprotein__RABV__JX871846.1

SEQ ID NO: 95425 - RNA, 1575 nt, Artificial Sequence
  derived and/or modified CDS sequence (opt1) from glycoprotein__RABV__JX871847.1
augaucccccaggcccugcuguucgugccgcugcugauccccagccucugccugggcgaguuccccaucuacaccauccccgacaagcuggggccguggacccccaucgacauccaccaccucuccugccccaacaaccuggucgccgagaacgacggcugcacgagccuguccggguucagcuacauggagcucaaggugggcuacaucuccgcgaucaaggugaacggguucacgugcaccggcgucgugaccgaggccgagaccuacaccaacuuccugggcuacgugaccaccacguucaagcgcaagcacuuccggcccaugccggacgccugccgcgccgcccacgacuggaagauggcgggggacccccgguacgaggacagccugcagaaccccuaccccgacuaccacuggcuccgcaccgucaagaccaccaaggagucccuggugaucaucagcccguccguggccgaccuggaccccuacgacaagagccuccacucccgggucuuccccagcggcaagugccuggggaucacgguguccagcaccuacugcuccaccaaccacgacuacaccaucuggaugcccguggagccgcgccugggcacgagcugcgacaucuucaccaacucccgggggaagcgcgccagcaagggcggccgggucugcggguucguggacgagcgcggccucuacaagucccugaagggggccugcaagcugaagcucugcggcgugcccggcauccggcugauggacgggaccugggucagcauccagaccagcgaggacaucaaguggugcccgcccgaccgccuggugaaccuccacgacuuccacuccgacgagcuggagcaccugguggucgaggagcucaucaagcggcgcgagaacugccuggacgcgcuggagagcaucaugacgaccaaguccgugagcuuccggcgccucucccaccuccggaagcuggugcccggcuucgggaaggccuacaccaucuucaacaagacccucauggaggccgacgcccacuacaagagcgucaagacguggaacgaggugauccccuccaagggcugccuggaggucgggggcaagugccacccgcccgugaacggcguguucuucaacgggaucauccugggccccgacgggaacguccucauccccgagaugcagagcucccugcugcagcagcacauggagcuccuggagagcuccgugaucccccugaugcacccccucgccgacccgagcaccguguucaaggagggcgacgaggcggaggacuucgucgaggugcaccuccccgacgugcacaagcaggucuccgacguggaccuggggcugcccagcuggggcaaguaccugcugauguccgccggcgcccucgccauccugauccuggccaucgugcugaucaucugcugcgggcgcgucaacaagaccggcagcacccagcgggggcaccgcgagucccggggcaagaugagcguggcgccgcagaacgggaagaucaucuccagcugggagcucuacaagagcgaguccgagacgggccuguga

SEQ ID NO: 95426 - RNA, 1575 nt, Artificial Sequence
  derived and/or modified CDS sequence (opt1) from glycoprotein__RABV__JX871848.1
augaucccccaggcccugcuguucgugccgcugcugaucagcucccucugccugggcgaguuccccaucuacaccauccccgagaagcuggggcccuggagcccgaucgacauccaccaccucuccugccccaacaaccuggucguggaggacgagggcugcaacagccuguccggguucagcuacauggagcucaaggugggcuacaucuccagcaucaaggucaacggguucacgugcaccggcguggugaccgaggccgagaccuacaccaacuucgucggcuacgugacgaccaccuucaagcgcaagcacuuccggcccaugcccgacgcgugccgcgccgccuacaacuggaagauguccggggacccgcgguacgaggagagccugcacaaccccuaccccgacuaccacuggcugcgcaccgugaagacgaccaaggagucccucgucaucaucagccccuccguggccgaccuggacccguacgacaagagccugcacucccggguguucagcggcgggaagugccucggcaucaccgucuccagcaccuacugcuccacgaaccacgacuacaccaucuggaugcccgaggaggcccgccuggggaccagcugcgacaucuucaccaacagcaagggcaagcgggcguccaagggcgggaagacgugcggcuucguggacgagcgcgggcuguacaagagccucaagggcgccugcaagcugaagcugugcggcgugcccgggcuccggcugauggacggcaccugggucuccauccagaccagcgacgagaccaaguggugcccgcccgaccagcuggugaacauccacgacuuccgcuccgacgagaucgagcaccucguggucgaggagcuggugaagaagcgggaggagugccuggacgcccucgagagcaucaugacgaccaaguccgugagcuuccgccggcugucccaccuccgcaagcucguccccggguucggcaaggccuacaccaucuucaacaagacccugauggaggcggacgcccacuacaagagcgugcggacguggaacgaggugauccccuccaaggggugccugagcgucggcggccgcugccacccccacguggacggggucuucuucaacggcaucauccucgggccggacggcuccgugcugauccccgagaugcagagcucccugcuccagcagcacauggagcugcuggagagcuccgugaucccccucaugcacccccuggccaacccgagcaccgucuucaaggacggggacgaggccgaggacuucguggaggugcaccuccccgacguccaggagcaggucuccggcguggaccugggccugcccaacugggggaaguacgugcugaugagcgccggcgcgcucgccgugcugcugcucaccaucuuccugaugaccugccggcgccgggccaaccgcacgaacagcauccagcaggggcccggcgaguccgggcggaagaucagcgugccgccccagaacggcaaggucaucuccagcugggaguccuucaagagcggcggggagaccggccuguga

SEQ ID NO: 95427 - RNA, 1575 nt, Artificial Sequence
  derived and/or modified CDS sequence (opt1) from glycoprotein__RABV__JX871849.1
augaucccccaggcccugcucagcgugccgcugcugaucuccagccucugcuucggcaaguuccccaucuacaccauccccgagaagcuggggcccugguccccgaucgacauccaccaccugagcugccccaacaaccucgucguggaggacgagggcugcaacucccugagcggguucuccuacauggagcugaaggugggcuacaucagcgccaucaaggucaacggguucacgugcaccggcguggugaccgaggcggagaccuacaccaacuucgucggcuacgugaccaccaccuucaagcgcaagcacuuccggcccauguccgacgccugccgcgccgccuacaacuggaagaccgccggggacccccgguacgaggagagccuccacaacccguaccccgacuaccacuggcugcgcacggugaagaccaccaaggagucccugaucaucaucagccccuccgucgcggaccucgaccccuacgacaagagccugcacucccggaucuucccgggcgggaagugccugggcaucaccaucagcuccacguacugcagcaccaaccacgacuacaccaucuggaugcccgaggaggcccgccucgggaccuccugcgacaucuucacgaacagcaagggcaagcgggccagcaagggcgggcggaccugcggcuucguggacgagcgcgggcuguacaagucccugaagggcgccugcaagcucaagcugugcggcgugcccgggcugcgccucauggacggcaccugggucgcgauccagacccccaacgagacgaaguggugcagcccggaccagcuggugaacgugcacgacuuccgguccgacgagaucgagcaccuggucguggaggagcucauccgcaagcgggaggagugccuggacgcccuggagagcaucaugaccaccaaguccgugagcuuccgccggcucuccaaccugcgcaagcugguccccggguucggcaaggccuacaccaucuucaacaagacgcucauggaggccgacgcccacuacaagagcgugcggaccuggaacgagaucauccccucccgcgggugccugaaggugggcggccggugccacccccacgucaacgggguguucuucaacggcaucauccuggggccggacggccacauccucauccccgagaugcagagcucccugcugcagcagcacauggagcuccuggagagcuccgugaucccccugauccacccccucgcggacccgagcaccgucuucaaggacggggacgaggccgaggacuucguggagguccaccuccccgacgugcaccagcaggucuccggcguggaccugggccugcccgacugggggaaguacgugcugaugagcgccggcgcccuggccaccgugaugcucacgaucuuccugaucacgugcugccgccgggucaagcgcaccgaguccauccagcaggggcugggcgagagcgggcgcaagguguccgugacgccccagaacggcaaggucaugagcagcugggaguacuacaaguccggcgggggcacccggcucuga

SEQ ID NO: 95428 - RNA, 1575 nt, Artificial Sequence
  derived and/or modified CDS sequence (opt1) from glycoprotein__RABV__JX871853.1
augaucagccaggcccuccuguucgugccccugcugaucccgucccucugccugggcaaguuccccaucuacaccauccccgacaagcuggggcccuggagcccgaucgacauccaccaccucuccugccccaacaaccuggucguggaggacgagggcugcaccagccuguccggguucagcuacauggagcucaaggugggcuacaucuccgccaucaaggucaacggguucacgugcaccggcguggugaccgaggccgagaccuacacgaacuucgucggcuacgugaccaccaccuucaagcgcaagcacuuccggcccaugcccgacgccugccgcgccgcccacgacuggaagaucgccggggacccgcgguacgaggacagccugcagacgcccuaccccgacuaccacuggcugcgcaccgugaagaccaccaaggagucccucgucaucaucagccccuccguggcggaccuggacccguacgacaagagccugcacucccggguguuccccagcggcaagugccucgggaucacggucuccagcaccuacugcuccaccaaccacgacuacaccaucuggaugcccguggaggcccgccugggcacgagcugcgacaucuucaccaacucccgggggaagaaggccagcaagggcggccggaccugcggguucguggacgagcgcggccuguacaagagccucaagggggccugcaagcugaagcugugcggcguccccggccuccgccugauggacgggaccuggguguccauccagacgagcgacgacaucaaguggugcccgcccgaccagcuggugaaccuccacgacuuccacuccgacgagaucgagcaccuggucguggaggagcugaucaagaagcgggagggcugccucgacgcgcuggagagcaucaugaccaccaaguccgugagcuuccgccggcugucccaccuccgcaagcugguccccggguucggcaaggccuacaccaucuucaacaacacgcugauggaggccgacgcccacuacaagagcgugcggaccuggaacgaggugauccccuccaaggggugccucaaggucggcggccgcugccacccgcccgugaacggggucuucuucaacggcaucauccuggggcccgacggcaacgugcugauccccgagaugcagagcucccuccugcagcagcacauggagcugcucgagagcuccgugaucccgcugaugcacccccuggccgaccccagcaccgucuucaaggacggggacgaggcggaggacuucguggaggugcaccuccccgacguccacaagcaggucuccgacguggaccugggccugccgagcuggggcaaguaccuccugauguccgccggggcccuggccacccucauccuggccaucuuccugaucacgugcugccggcgcgcgaaccggaccgagagcacccagcgcggccaccgggaguccgggggcaaggugagcguggcgccccagaacgggaagaucaucagcuccugggagcuguacaagagcgaguccgagaccggcauguga

SEQ ID NO: 95429 - RNA, 1575 nt, Artificial Sequence
  derived and/or modified CDS sequence (opt1) from glycoprotein__RABV__JX871854.1
augaucccccaggcccuccucuucgugccguuccuguuccccagccugugccucggcaaguuccccaucuacaccauccccgagaagcuggggccguggucccccaucgacauccaccaccugagcugccccaacaaccucgucguggaggacgagggcugcgacucccugagcggguucuccuacauggagcugaaggugggcuacaucagcgccaucaaggucaacggguucacgugcaccggcguggugaccgaggcggagaccuacaccaacuucgucggcuacgugacgaccaccuucaagcgcaagcacuuccggcccaugccggacgccugccgcgccgccuacaacuggaagaccgccggggacccccgguacgaggagucccuccacaaccccuaccccgacuaccacuggcugcgcacggugaagaccaccaaggagagccugaucaucaucuccccgagcgucgcggaccucgaccccuacgacaagucccugcacagccggguguuccccggcgggaagugccugggcaucaccaucuccagcacguacugcuccaccaaccacgacuacaccaucuggaugcccgaggaggcccgccucgggaccagcugcgacaucuucacgaacuccaagggcaagcgggccagcaagggcgggcggaccugcggcuucguggacgagcgcgggcuguacaagucccugaagggcgccugcaagcucaagcugugcggcgucccggggcugcgccucauggacggcaccuggguggcgauccagacccccggggagacgaaguggugcagccccgaccagcuggugaaccugcacgacuuccggagcgacgagaucgagcaccucgucguggaggagcugaucaagaagcgcgaggagugccuggacgcccucgaguccaucaugaccaccaagagcguguccuuccggcgccugagcaaccugcggaagcucguccccggcuucgggaaggccuacaccaucuucaacaagacgcugauggaggccgacgcccacuacaaguccauccgcaccugggacgagaucaucccgagcaagggcugccugcgggugggcgggcgcugccacccccacgugaacggcgucuucuucaacgggaucauccucggccccgacgggcacgugcugauccccgagaugcaguccagccugcuccagcagcacauggagcugcuggaguccagcgugaucccgcucauccacccccuggcggaccccuccaccgucuucaaggacggcgacgaggccgaggacuucguggagguccaccuccccgacgugcacgagcaggucagcggcguggaccuggggcugccgaacuggggcaaguacgugcugaucuccgccggggugcucgccaccgucauccugacgaucuuccugcugaccugcugccggcgcgugaaccggaccaagcccaagcagcagagccugggcgaguccgggcgcaaggugagcgucacgccccagaacggcaaggugauguccagcugggaguacuacaaguccgagggccgcaccagccuguga

SEQ ID NO: 95430 - RNA, 1575 nt, Artificial Sequence; identical to SEQ ID NO: 95273
  derived and/or modified CDS sequence (opt1) from glycoprotein__RABV__JX871855.1

SEQ ID NO: 95431 - RNA, 1575 nt, Artificial Sequence
  derived and/or modified CDS sequence (opt1) from glycoprotein__RABV__JX871856.1
augaucccccaggcccuccucuucgugccguuccuguuccccagccugugccucggcaaguuccccaucuacaccauccccgagaagcuggggccguggucccccaucgacauccaccaccugagcugccccaacaaccucgucguggaggacgagggcugcgacucccugagcggguucuccuacauggagcugaaggugggcuacaucagcgccaucaaggucaacggguucacgugcaccggcguggugaccgaggcggagaccuacaccaacuucgucggcuacgugacgaccaccuucaagcgcaagcacuuccggcccaugccggacgccugccgcgccgccuacaacuggaagaccgccggggacccccgguacgaggagucccuccacaaccccuaccccgacuaccacuggcugcgcacggugaagaccaccaaggagagccugaucaucaucuccccgagcgucgcggaccucgaccccuacgacaagucccugcacagccggguguuccccggcgggaagugccugggcaucaccguguccagcacguacugcuccaccaaccacgacuacaccaucuggaugcccgaggaggcccgccucgggaccagcugcgacaucuucacgaacuccaagggcaagcgggccagcaagggcgggcggaccugcggcuucgucgacgagcgcgggcuguacaagucccugaagggcgccugcaagcucaagcugugcggcgugccggggcugcgccucauggacggcaccuggguggcgauccagacccccggggagacgaaguggugcagccccgaccagcuggucaaccugcacgacuuccggagcgacgagaucgagcaccucgugguggaggagcugaucaagaagcgcgaggagugccuggacgcccucgaguccaucaugaccaccaagagcgucuccuuccggcgccugagcaaccugcggaagcucgugcccggcuucgggaaggccuacaccaucuucaacaagacgcugauggaggccgacgcccacuacaaguccgugcgcaccugggacgagaucaucccgagcaagggcugccugcgggucggcgggcgcugccacccccacgugaacggcguguucuucaacgggaucauccucggccccgacgggcacguccugauccccgagaugcaguccagccugcuccagcagcacauggagcugcuggaguccagcgugaucccgcucauccacccccuggcggaccccuccaccgucuucaaggacggcgacgaggccgaggacuucguggaggugcaccuccccgacguccacaagcaggucagcggcguggaccuggggcugccgaacuggggcaaguacgugcugauguccgccggggugcucgccaccgugauccugacgaucuuccugcugaccugcugccggcgcgucaaccggaccaagcccaagcagcagagccugggcgaguccgggcgcaaggugagcgugacgccccagaacggcaaggucauguccagcugggaguacuacaaguccgagggccgcaccagccuguga

SEQ ID NO: 95432 - RNA, 1575 nt, Artificial Sequence; identical to SEQ ID NO: 95273
  derived and/or modified CDS sequence (opt1) from glycoprotein__RABV__JX871857.1

SEQ ID NO: 95433 - RNA, 1575 nt, Artificial Sequence
  derived and/or modified CDS sequence (opt1) from glycoprotein__RABV__JX871858.1
augaucccccaggcccuccuguucgugccgcugcugauccccagccucugccugggcaaguuccccaucuacaccauccccgacaagcuggggccguggucccccaucgacauccaccaccucagcugccccaacaaccuggucguggaggacgagggcugcaccucccugagcggguucuccuacauggagcucaaggugggcuacaucagcgccaucaaggucaacggguucacgugcaccggcguggugaccgaggccgagaccuacacgaacuucgucggcuacgugaccaccaccuucaagcgcaagcacuuccggcccaugccggacgccugccgcgccgcccacgacuggaagaucgccggggacccccgguacgaggacucccugcagaaccccuaccccgacuaccacuggcugcgcacggugaagaccaccaaggagagccucgucaucaucuccccgagcguggcggagcuggaccccuacgacaagucccugcacagccggguguuccccggcgggaagugccucggcaucaccgucuccagcacguacugcuccaccaaccacgacuacaccaucuggaugcccguggaggcccgccuggggaccagcugcgacaucuucacgaacucccggggcaagaaggccagcaagggcgggcggaccugcggcuucguggacgagcgcgggcuguacaagucccucaagggcgccugcaagcugaagcugugcggcgucccggggcuccgccugauggacggcaccugggugagcauccagaccagcgacgacaucaaguggugcccgcccgaccagcuggugaaccuccacgacuuccacuccgacgagaucgagcaccuggucguggaggagcugaucaagaagcgggaggggugccucgacgcgcuggagagcaucaugacgaccaaguccgugagcuuccgccggcugucccaccuccgcaagcugguccccggcuucgggaaggccuacaccaucuucaacaacacccugauggaggccgacgcccacuacaagagcgugcggacguggaacgaggugauccccuccaagggcugccucaaggucggcgggcgcugccacccgcccgugaacggcgucuucuucaacgggaucauccugggccccgacgggaacgugcugauccccgagaugcagagcucccuccugcagcagcacauggagcugcucgagagcuccgugaucccccugaugcacccccuggccgaccccagcaccgucuucaaggacggcgacgaggcggaggacuucguggaggugcaccucccggacguccacaagcaggucuccgacguggaccugggccugcccagcugggggaaguaccuccugauguccgccggcgcccuggccacccucauccuggccaucuuccugaucacgugcugccggcgcgcgaaccggaccgagagcacccagcgcgggcaccgggaguccggcgggaaggugagcguggcgccccagaacggcaagaucaucuccagcugggagcuguacaagagcgaguccgagaccggcauguga

SEQ ID NO: 95434 - RNA, 1575 nt, Artificial Sequence
  derived and/or modified CDS sequence (opt1) from glycoprotein__RABV__JX871859.1
augaucccccaggcccugcucagcgugccgcugcugaucuccagccucugcuucggcaaguuccccaucuacaccauccccgagaagcuggggcccugguccccgaucgacauccaccaccugagcugccccaacaaccucgucguggaggacgagggcugcaacucccugagcggguucuccuacauggagcugaaggugggcuacaucagcgccaucaaggucaacggguucacgugcaccggcguggugaccgaggcggagaccuacaccaacuucgucggcuacgugacgaccaccuucaagcgcaagcacuuccggcccaugcccgacgccugccgcgccgccuacaacuggaagaccgccggggacccgcgguacgaggagucccuccacaaccccuaccccgacuaccacuggcugcgcacggugaagaccaccaaggagagccugaucaucaucucccccagcgucgcggaccucgacccguacgacaagucccugcacagccggaucuuccccggcgggaagugccugggcaucaccaucuccagcacguacugcuccaccaaccacgacuacaccaucuggaugcccgaggaggcccgccucgggaccagcugcgacaucuucacgaacuccaagggcaagcgggccagcaagggcgggcggaccugcggcuucguggacgagcgcgggcuguacaagagccugaagggcgccugcaagcucaagcugugcggcgugcccgggcugcgccucauggacggcaccugggucgcgauccagaccccgaacgagacgaaguggugcucccccgaccagcuggugaacgugcacgacuuccggagcgacgagaucgagcaccuggucguggaggagcucauccgcaagcgggaggagugccuggacgcccuggaguccaucaugaccaccaagagcguguccuuccgccggcucagcaaccugcgcaagcugguccccggguucggcaaggccuacaccaucuucaacaagacgcucauggaggccgacgcccacuacaaguccgugcggaccuggaacgagaucauccccagccgcgggugccugaaggugggcggccggugccacccgcacgucaacgggguguucuucaacggcaucauccuggggcccgacggccacauccucauccccgagaugcaguccagccugcugcagcagcacauggagcuccuggaguccagcgugaucccccugauccacccgcucgcggaccccuccaccgucuucaaggacggggacgaggccgaggacuucguggagguccaccuccccgacgugcaccagcaggucagcggcguggaccugggccugcccgacugggggaaguacgugcugauguccgccggcgcccuggccaccgugaugcucacgaucuuccugaucacgugcugccgccgggucaagcgcaccgagagcauccagcaggggcugggcgaguccgggcgcaaggugagcgugaccccgcagaacggcaaggucauguccagcugggaguacuacaagagcggcgggggcacccggcucuga

SEQ ID NO: 95435 - RNA, 1575 nt, Artificial Sequence; identical to SEQ ID NO: 95381
  derived and/or modified CDS sequence (opt1) from glycoprotein__RABV__JX871860.1

SEQ ID NO: 95436 - RNA, 1575 nt, Artificial Sequence; identical to SEQ ID NO: 95296
  derived and/or modified CDS sequence (opt1) from glycoprotein__RABV__JX871862.1

SEQ ID NO: 95437 - RNA, 1575 nt, Artificial Sequence
  derived and/or modified CDS sequence (opt1) from glycoprotein__RABV__JX871863.1
augaucccccaggcccuccuguucgugccgcugcugaucagcucccucugcuucggcaaguuccccaucuacaccauccccgagaagcuggggcccuggagcccgaucgacauccaccaccuguccugccccaacaaccucgucgccgaggacgagggcugcaacagccuguccggguucagcuacauggagcugaaggugggcuacaucuccgcgaucaaggugaacggguucacgugcaccggcgucgugaccgaggccgagaccuacaccaacuucgugggcuacgucacgaccaccuucaagcgcaagcacuuccggcccacccccgacgccugccgcgccgccuacaacuggaagauggcgggggacccgcgguacgaggagagccuccacaaccccuaccccgacuaccacuggcugcgcacggugaagaccaccaaggagucccuggugaucaucagccccuccgucgccgaccucgacccguacgacaagagccugcacucccggguguuccccgacggcaagugccuggggaucaccaucagcuccacguacugcagcaccaaccacgacuacaccaucuggaugcccgaggaggcccgccucggcaccuccugcgacaucuucacgaccagcaaggggaagcgggccuccaagggcgacaagaucugcggcuucguggacgagcgcgggcuguacaagagccugaagggcgcgugcaagcucaagcugugcgggguccugggccuccggcugauggacggcaccugggugagcauccagacccccggggagacgaaguggugcuccccggaccagcuggugaaccuccacgacuuccacagcgacgagaucgagcaccuggucgccgaggagcuggugaagaagcgcgaggagugccucgacgcccuggaguccaucaugaccaccaagagcguguccuuccggcgccugagccaccuccggaagcugguccccggcuucgggaaggccuacaccaucuucaacaagacgcugauggaggccgacgcgcacuacaaguccgugcgcaccuggaacgaggugauccccagcaagggcugccucuccgucgggggccggugccacccccacgugaacggcguguucuucaacgggaucauccugggcccggacgggagcguccugauccccgagaugcaguccagccuccugcagcagcacauggagcugcucgaguccagcgugaucccccugaugcacccccuggccgacccguccaccgucuucaaggacgacgacgaggccgagaacuucguggaggugcaccuccccgacguccacaagcaggucagcggcguggaccuggggcugcccaacuggggcaaguaccuccugaugaucgccggcgcccuggcgacccucaugcugacgaucuuccugaugaccugcugccgccggaccaagcgcaccgaguccauccagcaggggcugggcgagagcgggcggaagguguccgugacgccccagagcggcaaggugaucagcuccugggagagcuacaaguccgggggcgagacccgccucuga

SEQ ID NO: 95438 - RNA, 1575 nt, Artificial Sequence
  derived and/or modified CDS sequence (opt1) from glycoprotein__RABV__JX871864.1
augaucccccaggcccugcuguucgugccgcugcugauccccagccucugccugggcgaguuccccaucuacaccauccccgacaagcuggggccguggucccccaucgacauccaccaccucagcugccccaacaaccuggucgccgagaacgacggcugcaccucccugagcggguucuccuacauggagcucaaggugggcuacaucagcgcgaucaaggugaacggguucacgugcaccggcgucgugaccgaggccgagaccuacacgaacuucgugggcuacgucaccaccaccuucaagcgcaagcacuuccggcccacgccggacgccugccgcgccgcccacgacuggaagauggcgggggacccccgguacgaggccucccugcagaaccccuaccccgacuaccacuggcugcgcaccgugaagaccaccaaggagagccucgugaucaucuccccgagcgucgccgaccuggaccccuacgacaagucccugcacagccggguguuccccuccggcaagugccucgggaucacggugagcuccaccuacugcagcaccaaccacgacuacaccaucuggaugcccgucgagccgcgccugggcacguccugcgacaucuucaccaacagccgggggaagcgcgccuccaagggcggccgggugugcggguucguggacgagcgcggccuguacaagagccucaagggggcgugccggcugaagcugugcggcguccccggcauccgccuccuggacgggaccugggugagcauccagaccuccgaggacaucaaguggugcccgcccgaccggcuggugaaccuccacgacuuccacagcgacgagaucgagcaccuggucguggccgagcugaucaagcgccgggagaacugccucgacgcccuggaguccaucaugacgaccaagagcguguccuuccgccggcugagccaccuccgcaagcugguccccggcuucgggaaggccuacaccaucuucaacaagacccugauggaggccgacgcgcacuacaagcucgugaagacguggaacgaguucauccccuccaagggcugccuggaggucgggggccggugccacccccacgugaacggcguguucuucaacgggaucauccugggccccgacgggaacguccucaucccggagaugcagagcucccugcugcagcagcacauggagcuccuggagagcuccgugaucccccugaugcacccccucgccgaccccagcaccguguucaaggagggcgacgaggccgaggacuucgucgaggugcaccucccggacgugcacaagcaggucuccgacguggaccuggggcuccccagcuggggcaaguaccugcugaucuccgccggcgcccucgcgauccugauccuggccaucgugcugaucaucugcugccgccgggucaacaagaccgggagcacccagcgcggccaccgcgaguccgggggcaagaugagcguggugccccagaacgggaagaucaucuccagcugggagcucuacaagagcgaguccgagacgggccuguga

SEQ ID NO: 95439 - RNA, 1575 nt, Artificial Sequence
  derived and/or modified CDS sequence (opt1) from glycoprotein__RABV__JX871865.1
augaucccccaggcccugcucagcgugccgcugcugaucuccagccucugcuucggcaaguuccccaucuacaccauccccgagaagcuggggcccugguccccgaucgacauccaccaccugagcugccccaacaaccucgucguggaggacgagggcugcaacucccugagcggguucuccuacauggagcugaaggugggcuacaucagcgccaucaaggucaacggguucacgugcaccggcguggugaccgaggcggagaccuacaccaacuucgucggcuacgugacgaccaccuucaagcgcaagcacuuccggcccauggccgacgccugccgcgccgccuacaacuggaagaccgcgggggacccccgguacgaggagucccuccacaacccguaccccgacuaccacuggcugcgcacggugaagaccaccaaggagagccugaucaucaucucccccagcgucgccgaccucgaccccuacgacaagucccugcacagccggaucuucccgggcgggaagugccugggcaucaccaucuccagcacguacugcuccaccaaccacgacuacaccaucuggaugcccgaggaggcccgccucgggaccagcugcgacaucuucacgaacuccaagggcaagcgggccagcaagggcgggcggaccugcggcuucguggacgagcgcgggcuguacaagagccugaagggcgcgugcaagcucaagcugugcggcgugcccgggcugcgccucauggacggcaccugggucgccauccagacccccaacgagacgaaguggugcuccccggaccagcuggugaacgugcacgacuuccggagcgacgagaucgagcaccuggucguggaggagcucauccgcaagcgggaggagugccuggacgcccuggaguccaucaugaccaccaagagcguguccuuccgccggcucagcaaccugcgcaagcugguccccggguucggcaaggccuacaccaucuucaacaagacgcucauggaggccgacgcgcacuacaaguccgugcggaccuggaacgagaucauccccagccgcgggugccugaaggugggcggccggugccacccccacgucaacgggguguucuucaacggcaucauccuggggccggacggccacauccucauccccgagaugcaguccagccugcugcagcagcacauggagcuccuggaguccagcgugaucccccugauccacccccucgccgacccguccaccgucuucaaggacggggacgaggccgaggacuucguggagguccaccuccccgacgugcaccagcaggucagcggcguggaccugggccugcccgacugggggaaguacgugcugauguccgccggcgcccuggcgaccgugaugcucacgaucuuccugaucacgugcugccgccgggucaagcgcaccgagagcauccagcaggggcccggcgaguccgggcgcaaggugagcgugaccccgcagaacggcaaggucauguccagcugggaguacuacaagagcggcgggggcacccggcuguga

SEQ ID NO: 95440 - RNA, 1575 nt, Artificial Sequence
  derived and/or modified CDS sequence (opt1) from glycoprotein__RABV__JX871866.1
augaucccccaggccauccuguucgugccgcuccugauccccagccugugccucggcgaguuccccaucuacaccauccccgacaagcuggggccguggucccccaucgacauccaccaccugagcugccccaacaaccucgucgccgagaacgacggcugcaccucccugagcggguucuccuacauggagcugaaggugggcuacaucagcgcgaucaaggugaacggguucacgugcaccggcgucgugaccgaggccgagaccuacacgaacuucgugggcuacgucaccaccaccuucaagcgcaagcacuuccggcccacgccggacgccugccgcgccgcccacgacuggaagauggcgggggacccccgguacgaggccucccuccagaaccccuaccccgacuaccacuggcugcgcaccgugaagaccaccaaggagagccuggugaucaucuccccgagcgucgccgaccucgaccccuacgacaagucccugcacagccggguguuccccuccggcaagugccuggggaucacggugagcuccaccuacugcagcaccaaccacgacuacaccaucuggaugcccgucgagccgcgccucggcacguccugcgacaucuucaccaacagccgggggaagcgcgccuccaagggcggccgggugugcggguucguggacgagcgcggccuguacaagagccugaagggggcgugccggcucaagcugugcggcguccccggcauccgccugcucgacgggaccugggugagcauccagaccuccgaggacaucaaguggugcccgcccgaccggcuggugaaccugcacgacuuccacagcgacgagaucgagcaccucgucguggccgagcugaucaagcgccgggagaacugccuggacgcccucgaguccaucaugacgaccaagagcguguccuuccgccggcugagccaccuccgcaagcugguccccggcuucgggaaggccuacaccaucuucaacaagacccugauggaggccgacgcgcacuacaaguccgugaagacguggaacgaggugauccccagcaagggcugccuggaggucgggggccggugccacccccacgugaacggcgucuucuucaacgggaucauccucggccccgacgggaacgugcugaucccggagaugcaguccagccugcuccagcagcacauggagcugcuggaguccagcgugaucccccucaugcacccccuggccgaccccuccaccgucuucaaggagggcgacgaggccgaggacuucguggaggugcaccucccggacguccacaagcaggucagcgacguggaccuggggcugcccuccuggggcaaguaccugcucaucagcgccggcgcccuggcgauccugauccucgccaucgugcugaucaucugcugccgccgggugaacaagaccggguccacccagcgcggccaccgcgagagcgggggcaagauguccguggucccccagaacgggaagaucaucagcagcugggagcuguacaaguccgagagcgagacgggccuguga

SEQ ID NO: 95441 - RNA, 1575 nt, Artificial Sequence; identical to SEQ ID NO: 95273
  derived and/or modified CDS sequence (opt1) from glycoprotein__RABV__JX871867.1

SEQ ID NO: 95442 - RNA, 1575 nt, Artificial Sequence
  derived and/or modified CDS sequence (opt1) from glycoprotein__RABV__JX871868.1
augaucccccaggccuuccuguucgugccgcuccugauccccagccugugccucggcaaguuccccaucuacaccauccccgacaagcuggggccguggucccccaucgacauccaccaccugagcugccccaacaaccucgucguggaggacgagggcugcaccucccugagcggguucuccuacauggagcugaaggugggcuacaucagcgccaucaaggucaacggguucacgugcaccggcguggugaccgaggcggagaccuacacgaacuucgucggcuacgugaccaccaccuucaagcgcaagcacuuccggcccaugccggacgccugccgcgccgcccacgacuggaagaucgccggggacccccgguacgaggacucccuccagaaccccuaccccgacuaccacuggcugcgcacggugaagaccaccaaggagagccuggucaucaucuccccgagcguggcggaccucgaccccuacgacaagucccugcacagccggguguuccccuccggcaagugccuggggaucaccgucagcuccacguacugccccaccaaccacgacuacaccaucuggaugccgguggaggcccgccucggcaccagcugcgacaucuucacgaacucccgggggaagaaggccagcaagggcggccggaccugcggguucguggacgagcgcggccuguacaagucccugaagggggccugcaagcucaagcugugcggcguccccggccugcgccucauggacgggaccugggugagcauccagaccagcgacgacgugaaguggugcccgcccgaccagcuggucaaccugcacgacuuccacuccgacgagaucgagcaccucgugguggaggagcugaucaagaagcgggagggcugccuggacgcgcucgagagcaucaugacgaccaaguccgucagcuuccgccggcugucccaccuccgcaagcuggugcccggguucggcaaggccuacaccaucuucaacaacacccugauggaggccgacgcccacuacaagagcgugcggacguggaacgaggucauccccuccaaggggugccugaaggugggcggccgcugccacccgcccgucaacgggguguucuucaacggcaucauccucgggcccgacggcaacgugcugauccccgagaugcagagcucccugcuccagcagcacauggagcugcuggagagcuccgucaucccccucaugcacccccuggccgacccgagcaccguguucaaggacggggacgaggcggaggacuucguggagguccaccuccccgacgugcacaagcaggucuccgacguggaccugggccugcccagcuggggcaaguaccugcucauguccgccggggcccuggccacccugauccucgccaucuuccugaucacgugcugccggcgcgcgaaccggaccaagagcacccagcgcggccaccgggaguccgggggcaaggugagcguggccccgcagaacgggaagaucaucuccagcugggagcuguacaagagcgaguccgagaccggcauguga

SEQ ID NO: 95443 - RNA, 1575 nt, Artificial Sequence; identical to SEQ ID NO: 95434
  derived and/or modified CDS sequence (opt1) from glycoprotein__RABV__JX871869.1

SEQ ID NO: 95444 - RNA, 1575 nt, Artificial Sequence
  derived and/or modified CDS sequence (opt1) from glycoprotein__RABV__JX871870.1
augaucuuccaggcccugcuguucgugccccugcugaucagcucccucugccugggcaaguucccgaucuacaccauccccgacaagcuggggcccuggagccccaucgacauccaccaccucuccugcccgaacaaccuggucguggaggacgagggcugcaccagccuguccggguucagcuacauggagcucaaggugggcuacaucuccgccaucaaggucaacggguucacgugcaccggcguggugaccgaggcggagaccuacacgaacuucgucggcuacgugaccaccaccuucaagcgcaagcacuuccggcccauccccgacgccugccgcgccgccuacaacuggaagaucgccggggacccccgguacgaggagagccugcagaacccguaccccgacuaccacuggcugcgcacggugaagaccaccaaggagucccucaucaucaucagccccuccgucgcggaccuggaccccuacgacaagagccugcacucccgccucuucccgggcgggaagugccugggcaucaccaucagcuccacguacugcagcaccaaccacgacuacaccaucuggaugcccgaggagccccggcuggggaccuccugcgacaucuucacgaacagcaagggcaagaaggccuccaagggcgggaaggugugcggcuucguggacgagcgggggcucuacaagagccugaagggcgccugcaagcugaagcucugcggcgucagcgggcugcgccugauggacggcaccugggugaccauccagaccuccgacgagaucaaguggugcccgcccgaccagcucgugaaccugcacgacuuccacagcgacgagaucgagcaccuggucguggaggagcucgugaagaagcgggaggagugccuggacgcccuggaguccaucaugacgaccaagagcgucuccuuccgccggcucagcuaccugcgcaagcuggugcccggguucggcaaggcguacaccaucuucaacaagacccucauggaggccgacgcccacuacaaguccgugcggacguggaacgagaucauccccagcaaggggugccugaaggucuccgaccgcugccacccccacguggacggcguguucuucaacggcaucauccuggggccggacggcaacguccucauccccgagaugcagagcucccugcugcagcagcacauggagcuccuggagagcuccgugaucccccugaugcacccccucgccgacccgagcaccgucuucaaggacggggacgaggccgaggacuucguggaggugcaccuccccgacguccacaagcagaucuccggcguggaccuggggcuccccagcuggggcaaguaccugcugaugaucgcgggcgggcucgccacccuggugcugaucaucuuccugauggccugcugccggcgcaccaagcggacggagucccgccggcgcggcagcggggaguccggcgagaagguccucgccaccccgcagcccaagaagguggugagcagcugggagcuguacaagcgggagggggacgcccgccuguga

SEQ ID NO: 95445 - RNA, 1575 nt, Artificial Sequence
  derived and/or modified CDS sequence (opt1) from glycoprotein__RABV__JX871871.1
augaucccccaggcccuccuguucgugccgcugcugauccccagccucugccugggcgaguuccccaucuacaccauccccgacaagcuggggccguggucccccaucgacauccaccaccucagcugccccaacaaccuggucgccgagaacgacggcugcaccucccugagcggguucuccuacauggagcucaaggugggcuacaucagcgcgaucaaggugaacggguucacgugcaccggcgucgugaccgaggccgagaccuacacgaacuucgugggcuacgucaccaccaccuucaagcgcaagcacuuccggcccacgccggacgccugccgcgccgcccacgacuggaagauggcgggggacccccgguacgaggccucccugcagaaccccuaccccgacuaccacuggcugcgcaccgugaagaccaccaaggagagccucgugaucaucuccccgagcgucgccgaccuggaccccuacgacaagucccugcacagccggguguuccccuccggcaagugccucgggaucacggugagcuccaccuacugcagcaccaaccacgacuacaccaucuggaugcccgucgagccgcgccugggcacguccugcgacaucuucaccaacagccgggggaagcgcgccuccaagggcggccgggugugcggguucguggacgagcgcggccuguacaagagccucaagggggcgugccggcugaagcugugcggcguccccggcauccgccuccuggacgggaccugggugagcauccagaccuccgaggacaucaaguggugcccgcccgaccggcuggugaaccuccacgacuuccacagcgacgagaucgagcaccuggucguggccgagcugaucaagcgccgggagaacugccucgacgcccuggaguccaucaugacgaccaagagcguguccuuccgccggcugagccaccuccgcaagcugguccccggcuucgggaaggccuacaccaucuucaacaagacccugauggaggccgacgcgcacuacaaguccgugaagacguggaacgaggugauccccagcaagggcugccucgaggucgggggccggugccacccccacgugaacggcgucuucuucaacgggaucauccugggccccgacgggaacgugcugaucccggagaugcaguccagccuccugcagcagcacauggagcugcucgaguccagcgugaucccccugaugcacccccuggccgaccccuccaccgucuucaaggagggcgacgaggccgaggacuucguggaggugcaccucccggacguccacaagcaggucagcgacguggaccuggggcugcccuccuggggcaaguaccuccugaucagcgccggcgcccuggcgauccucauccuggccaucgugcugaucaucugcugccgccgggugaacaagacccgcuccacccagcgcgggcaccgggagagcggcgggaagauguccguggucccccagaacggcaagaucaucagcagcugggagcuguacaaguccgagagcgagacggggcucuga

SEQ ID NO: 95446 - RNA, 1575 nt, Artificial Sequence; identical to SEQ ID NO: 95273
  derived and/or modified CDS sequence (opt1) from glycoprotein__RABV__JX871872.1

SEQ ID NO: 95447 - RNA, 1575 nt, Artificial Sequence; identical to SEQ ID NO: 95445
  derived and/or modified CDS sequence (opt1) from glycoprotein__RABV__JX871873.1

SEQ ID NO: 95448 - RNA, 1575 nt, Artificial Sequence
  derived and/or modified CDS sequence (opt1) from glycoprotein__RABV__JX871874.1
augauccugcaggcccuccuguucgugcccuuccuguucccgagccucugccugggcaaguuccccaucuacaccauccccgagaagcuggggcccugguccccgaucgacauccaccaccucagcugccccaacaaccuggucguggaggacgagggcugcgacucccugagcggguucuccuacauggagcucaaggugggcuacaucagcgccaucaaggucaacggguucacgugcaccggcguggugaccgaggcggagaccuacaccaacuucgucggcuacgugacgaccaccuucaagcgcaagcacuuccggcccaugcccgacgccugccgcgccgccuacaacuggaagaccgccggggacccgcgguacgaggagucccugcacaaccccuaccccgacuaccacuggcugcgcacggugaagaccaccaaggagagccucaucaucaucucccccagcgucgcggaccuggacccguacgacaagucccugcacagccggguguuccccggcgggaagugccucggcaucaccguguccagcacguacugcuccaccaaccacgacuacaccaucuggaugcccgaggaggcccgccuggggaccagcugcgacaucuucacgaacuccaagggcaagcgggccagcaagggcgggcggaccugcggcuucgucgacgagcgcgggcuguacaagucccucaagggcgccugcaagcugaagcugugcggcgugcccgggcuccgccugauggacggcaccuggguggcgauccagaccccgggggagacgaaguggugcagccccgaccagcuggucaaccuccacgacuuccggagcgacgagaucgagcaccuggugguggaggagcugaucaagaagcgcgaggagugccucgacgcccuggaguccaucaugaccaccaagagcgucuccuuccggcgccugagcaaccuccggaagcuggugcccggcuucgggaaggccuacaccaucuucaacaagacgcugauggaggccgacgcccacuacaaguccgugcgcaccugggacgagaucauccccagcaagggcugccuccgggucggcgggcgcugccacccgcacgugaacggcguguucuucaacgggaucauccugggccccgacgggcacguccugauccccgagaugcaguccagccuccugcagcagcacauggagcugcucgaguccagcgugaucccccugauccacccgcuggcggaccccuccaccgucuucaaggacggcgacgaggccgaggacuucguggaggugcaccuccccgacguccacaagcaggucagcggcguggaccuggggcugcccaacuggggcaaguacgugcucaugggggccggcgugcuggccaccgugauccugacgaucuuccuccugaccugcugccggcgcgucaaccggaccaagccgaaccagcagucccugggggagagcggccgcaagguguccgugacgccccagaacggcaaggucaugagcuccugggaguacuacaagagcgaggggcgcaccucccuguga

SEQ ID NO: 95449 - RNA, 1575 nt, Artificial Sequence
  derived and/or modified CDS sequence (opt1) from glycoprotein__RABV__JX871875.1
augaucccccaggcccugcucuacgugccgcugcugauccccagccucugcuucggcggguuccccaucuacaccauccccgacaagcugggcccguggucccccaucgacauccaccaccugagcugccccaacaaccucgucguggaggacgaggggugcaccucccugagcggcuucuccuacauggagcugaaggugggguacaucagcgccaucaaggucaacggcuucacgugcaccggcguggugaccgaggcggagaccuacacgaacuucgucggguacgugaccaccaccuucaagcgcaagcacuuccggcccaugccggacgccugccgcgccgccuacaacuggaagauggccggcgacccccgguacgaggagucccuccagaaccccuaccccgacuacagcuggcugcgcacggugaagaccaccaaggagucccugaucaucaucagcccguccgucgcggaccucgaccccuacgacaagagccugcacucccggguguuccccgggggcaagugccuggggaucaccaucagcuccacguacugcagcaccaaccacgacuacaccaucuggaugcccgaggaggcccgccucggcaccuccugcgacaucuucacgaacagccggggcaagcgcgccuccaagggcgggaagaccugcggguucauggacgagcggggccuguacaagagccugaagggcgccugcaagcucaagcugugcggggugccgggccugcgccucauggacgggaccugggucaccauccagacgagcgacgagaccaaguggugccccuccgaccagcuggugaaccugcacgacuuccacagcgacgagaucgagcaccucguggucgaggagcuggugaagaagcgggaggagugccuggacgcgcucgaguccaucaugaccaccaagagcguguccuuccgccggcugagccaccuccgcaagcugguccccggcuucgggaaggccuacacgaucuucaacaagacccugauggaggccgacgcccacuacaaguccauccggaccuggaacgagaucauccccagcaagggcugccugaaggugggcgggcgcugccacccgcacguggacggcgucuucuucaacgggaucauccucggccccgacgggaacgugcugauccccgagaugcaguccagccugcuccagcagcacguggagcugcuggaguccagcgucaucccccucaugcacccgcuggccgaccccuccaccguguucaaggacggcgacgaggcggaggacuucgucgaggugcaccuccccgacauccacaagcaggucagcggcguggaccuggggcugcccaacuggggcaaguaccugcucauguccgccggggcccuggccacgcugaugcucaucauccugcugaugaccugcugccggcgcgccaaccggaccgagagcauccagcgcgacccgggcgaguccgggcggaaggugagcaucaccucccccgacggcaaggugaucagcagcugggagcuguacaaguccggcggggagacgcgccucuga

SEQ ID NO: 95450 - RNA, 1575 nt, Artificial Sequence; identical to SEQ ID NO: 95292
  derived and/or modified CDS sequence (opt1) from glycoprotein__RABV__JX871876.1

SEQ ID NO: 95451 - RNA, 1575 nt, Artificial Sequence; identical to SEQ ID NO: 95444
  derived and/or modified CDS sequence (opt1) from glycoprotein__RABV__JX871877.1

SEQ ID NO: 95452 - RNA, 1575 nt, Artificial Sequence; identical to SEQ ID NO: 95273
  derived and/or modified CDS sequence (opt1) from glycoprotein__RABV__JX871879.1

SEQ ID NO: 95453 - RNA, 1575 nt, Artificial Sequence
  derived and/or modified CDS sequence (opt1) from glycoprotein__RABV__JX871880.1
augaucccccaggcccuccucuucgugccguuccuguuccccagccugugccucggcaaguuccccaucuacaccauccccgagaagcuggggccguggucccccaucgacauccaccaccugagcugccccaacaaccucgucguggaggacgagggcugcgacucccugagcggguucuccuacauggagcugaaggugggcuacaucagcgccaucaaggucaacggguucacgugcaccggcguggugaccgaggcggagaccuacaccaacuucgucggcuacgugacgaccaccuucaagcgcaagcacuuccggcccaugccggacgccugccgcgccgccuacaacuggaagaccgccggggacccccgguacgaggagucccuccacaaccccuaccccgacuaccacuggcugcgcacggugaagaccaccaaggagagccugaucaucaucuccccgagcgucgcggaccucgaccccuacgacaagucccugcacagccggguguuccccggcgggaagugccugggcaucaccaucuccagcacguacugcuccaccaaccacgacuacaccaucuggaugcccgaggaggcccgccucgggaccagcugcgacaucuucacgaacuccaagggcaagcgggccagcaagggcgggcggaccugcggcuucguggacgagcgcgggcuguacaagucccugaagggcgccugcaagcucaagcugugcggcgucccggggcugcgccucauggacggcaccuggguggcgauccagacccccggggagacgaaguggugcagccccgaccagcuggugaaccugcacgacuuccggagcgacgagaucgagcaccucgucguggaggagcugaucaagaagcgcgaggagugccuggacgcccucgaguccaucaugaccaccaagagcguguccuuccggcgccugagcaaccugcggaagcucguccccggcuucgggaaggccuacaccaucuucaacaagacgcugauggaggccgacgcccacuacaaguccauccgcaccugggacgagaucaucccgagcaagggcugccugcgggugggcgggcgcugccacccccacgugaacggcgucuucuucaacgggaucauccucggccccgacgggcacgugcugauccccgagaugcaguccagccugcuccagcagcacauggagcugcuggaguccagcgugaucccgcucauccacccccuggcggaccccuccaccgucuucaaggacggcgacgaggccgaggacuucguggagguccaccuccccgacgugcacgagcagaucagcggcguggaccuggggcugccgaacuggggcaaguacguccugauguccgccggggugcucgccaccgugauccugacgaucuuccugcugaccugcugccggcgcgucaaccggaccaagcccaagcagcagagccugggcgaguccgggcgcaaggugagcgugacgccccagaacggcaaggucauguccagcugggaguacuacaaguccgagggccgcaccagccuguga

SEQ ID NO: 95454 - RNA, 1575 nt, Artificial Sequence
  derived and/or modified CDS sequence (opt1) from glycoprotein__RABV__JX871881.1
augaucccccaggcccugcucagcgugccgcugcugaucuccagccucugcuucggcaaguuccccaucuacaccauccccgagaagcuggggcccugguccccgaucgacauccaccaccugagcugccccaacaaccucgucguggaggacgagggcugcaacucccugagcggguucuccuacauggagcugaaggugggcuacaucagcgccaucaaggucaacggguucacgugcaccggcguggugaccgaggcggagaccuacaccaacuucgucggcuacgugacgaccaccuucaagcgcaagcacuuccggcccaugcccgacgccugccgcgccgccuacaacuggaagaccgccggggacccgcgguacgaggagucccuccacaaccccuaccccgacuaccacuggcugcgcacggugaagaccaccaaggagagccugaucaucaucucccccagcgucgcggaccucgacccguacgacaagucccugcacagccggaucuuccccggcgggaagugccugggcaucaccaucuccagcacguacugcuccaccaaccacgacuacaccaucuggaugcccgaggaggcccgccucgggaccagcugcgacaucuucacgaacuccaagggcaagcgggccagcaagggcgggcggaccugcggcuucguggacgagcgcgggcuguacaagagccugaagggcgccugcaagcucaagcugugcggcgugcccgggcugcgccucauggacggcaccugggucgcgauccagaccccgaacgagacgaaguggugcucccccgaccagcuggugaacgugcacgacuuccggagcgacgagaucgagcaccuggucguggaggagcucauccgcaagcgggaggagugccuggacgcccuggaguccaucaugaccaccaagagcguguccuuccgccggcucagcaaccugcgcaagcugguccccggguucggcaaggccuacaccaucuucaacaagacgcucauggaggccgacgcccacuacaaguccgugcggaccuggaacgagaucauccccagccgcgggugccugaaggugggcggccggugccacccgcacgucaacgggguguucuucaacggcaucauccuggggcccgacggccacauccucauccccgagaugcaguccagccugcugcagcagcacauggagcuccuggaguccagcgugaucccccugauccacccgcucgcggaccccuccaccgucuucaaggacggggacgaggccgaggacuucguggagguccaccuccccgacgugcaccagcaggucagcggcguggaccugggccugcccgacugggggaaguacgugcugauguccgccggcgcccuggccaccgugaugcucacgaucuuccugaucacgugcugccgccgggucaagcgcaccgagagcauccagcaggaccugggggaguccggccgcaaggugagcgugaccccgcagaacgggaaggucauguccagcugggaguacuacaagagcggcggcgggacccggcucuga

SEQ ID NO: 95455 - RNA, 1575 nt, Artificial Sequence
  derived and/or modified CDS sequence (opt1) from glycoprotein__RABV__JX944575.1
auggugccccaggcccugcuguucgucccccugcugguguucccccucugcuucggcaaguuccccaucuacaccauccccgacaagcuggggccguggagccccaucgacauccaccaccuguccugccccaacaaccucguggucgaggacgagggcugcaccaaccugagcggguucuccuacauggagcugaaggugggcuacaucagcgccaucaagaugaacggguucacgugcaccggcguggucaccgaggcggagaccuacacgaacuucgugggcuacgugaccaccaccuucaagcgcaagcacuuccggcccacgccggacgccugccgcgccgccuacaacuggaagauggccggggacccccgguacgaggagucccuccacaaccccuaccccgacuaccacuggcugcgcaccgucaagaccaccaaggagagccuggugaucaucuccccgagcguggcggaccucgaccccuacgaccggucccugcacagccgcgucuuccccggcgggaacugcuccggcguggccgugagcuccacguacugcagcaccaaccacgacuacaccaucuggaugcccgagaacccgcggcuggggauguccugcgacaucuucaccaacagccgcggcaagcgggccuccaagggcagcgagacgugcggguucgucgacgagcgcggccucuacaagucccugaagggggccugcaagcugaagcucugcggcgugcugggccugcggcucauggacgggaccuggguggcgaugcagaccagcaacgagaccaaguggugcccgcccggccagcuggucaaccugcacgacuuccgcagcgacgagaucgagcaccucgugguggaggagcuggucaagaagcgggaggagugccuggacgcccucgaguccaucaugacgaccaagagcguguccuuccgccggcugagccaccuccgcaagcucgugcccggguucggcaaggccuacaccaucuucaacaagacccugauggaggccgacgcccacuacaaguccguccggacguggaacgagaucauccccagcaaggggugccugcgcgugggcggccggugccacccccacgucaacgggguguucuucaacggcaucauccucgggcccgacggcaacgugcugauccccgagaugcaguccagccugcuccagcagcacauggagcugcuggucuccagcgugaucccgcucaugcacccccuggcggaccccuccaccguguucaagaacggggacgaggccgaggacuucgucgaggugcaccuccccgacgugcacgagcgcaucagcggcgucgaccugggccugccgaacugggggaaguacgugcugcucuccgccggcgcccugaccgcccugaugcucaucaucuuccugaugaccugcuggcggcgcgugaaccgcagcgagcccacgcagcacaaccugcgggggaccggccgcgaggucuccgugaccccgcagagcgggaagaucaucuccagcugggaguccuacaagagcggcggcgagaccgggcuguga

SEQ ID NO: 95456 - RNA, 1575 nt, Artificial Sequence
  derived and/or modified CDS sequence (opt1) from glycoprotein__RABV__JX944576.1
auggugcaccagguccugcuguucgugccccugcugguguucagccucugcuucggcaaguucccgaucuacaccauccccgacaagcuggggcccuggucccccaucgacauccaccaccugagcugcccgaacaaccucgucguggaggacgagggcugcaccaaccuguccggguucagcuacauggagcugaaggugggcuacaucuccgccaucaaggucaacggguucacgugcaccggcguggugaccgaggccgagaccuacacgaacuucgucggcuacgugaccaccaccuuccgccggaagcacuuccgccccacgcccgacgcgugccgggccgccuacaacuggaagcucgccggggacccccgcuacgaggagagccugcacaacccguaccccgacuaccacuggcugcggaccgugaagaccaccaaggagucccucgucaucaucagccccuccguggccgaccuggaccccuacgacaagagccugcacucccgcguguucccgggcgggaagugcagcggcaucacggucuccagcaccuacugcuccaccaaccacgacuacaccaucuggaugcccgagaacccccggcucgggacgagcugcgacaucuucgugaacucccgcggcaagcgggcgagcaagggcgggaagaccugcggcuucguggacgagcgcgggcuguacaagucccugaagggcgccugcaagcucaagcugugcggcguccccgggcugcggcucauggacggcaccugggccgccauccagaccagcgacgagacgaaguggugcccgcccgaccagcuggugaaccugcacgacuaccgcagcgacgagaucgagcaccucguggucgaggagcuggugaagaagcgggaggagugccuggacgcgcucgaguccaucaugaccaccaagagcguguccuuccgccggcugagccaccuccgcaagcucguccccggguucggcaaggccuacaccaucuucaacaagacgcugauggaggccgacgcccacuacaaguccgugcggaccuggaacgagaucauccccagcaaggggugccugcgcgucggcggccggugccacccgcacgugaacgggguguucuucaacggcaucauccucgggcccgacggccacguccugauccccgagaugcaguccagccugcuccagcagcacauggagcugcuggaguccagcgugaucccccucaugcacccgcuggccgaccccuccaccguguucaaggacggggacgaggcggaggacuucgucgaggugcaccuccccgacgugcacaagcugaucagcggcgucgaccugggccugcccuccugggggaaguacgugcucaugagcgccugcgugcugaccgcccugaugcucaugaucuuccugaugacgugcugccgccggggcaaccaggccggguccaagcagcacggccuggaggggaccggccgcaaggucagcgugaccucccagaacggcaaggugaucagcuccugggagagcuacaagagcgggggcgagacccgccuguga

SEQ ID NO: 95457 - RNA, 1575 nt, Artificial Sequence; identical to SEQ ID NO: 94923
  derived and/or modified CDS sequence (opt1) from glycoprotein__RABV__JX944577.1

SEQ ID NO: 95458 - RNA, 1575 nt, Artificial Sequence
  derived and/or modified CDS sequence (opt1) from glycoprotein__RABV__JX944578.1
auggugccccagguccugcuguucgugccgcugcugguguucagccucugcuucggcaaguuccccaucuacaccauccccgacaagcuggggcccugguccccgaucgacauccaccaccugagcugccccaacaaccucgucguggaggacgagggcugcaccaaccuguccggguucagcuacauggagcugaaggugggcuacaucuccgccaucaaggucaacggguucacgugcaccggcguggugaccgaggccgagaccuacacgaacuucgucggcuacgugaccaccaccuuccgccggaagcacuuccgccccacgcccgacgcgugccgggccgccuacaacuggaagcucgccggggacccgcgcuacgaggagagccugcacaaccccuaccccgacuaccacuggcugcggaccgugaagaccaccaaggagucccucgucaucaucagccccuccguggccgaccuggacccguacgacaagagccugcacucccgcguguuccccggcgggaagugcagcggcaucacgaucuccagcaccuacugcuccaccaaccacgacuacaccaucuggaugcccgagaacccccggcucgggacgagcugcgacaucuucgucaacucccgcggcaagcgggcgagcaagggcgggaagaccugcggcuucguggacgagcgcgggcuguacaagucccugaagggcgccugcaagcucaagcugugcggcgugccggggcugcggcucauggacggcaccugggccgccauccagaccagcgacgagacgaaguggugcccgcccgaccagcuggucaaccugcacgacuuccgcagcgacgagaucgagcaccucgugguggaggagcuggucaagaagcgggaggagugccuggacgcgcucgaguccaucaugaccaccaagagcguguccuuccgccggcugagccaccuccgcaagcucgugcccggguucggcaaggccuacaccaucuucaacaagacgcugauggaggccgacgcccacuacaaguccguccggaccuggaacgagaucauccccagcaaggggugccugcgcgugggcggccggugccacccccacgucaacgggguguucuucaacggcaucauccucgggcccgacggccacgugcugauccccgagaugcaguccagccugcuccagcagcacauggagcugcuggaguccagcgucaucccgcucaugcacccccuggccgaccccuccaccguguucaaggacggggacgaggcggaggacuucguggagguccaccuccccgacgugcacaagcugaucagcggcguggaccugggccugccguccugggggaaguacguccucaugagcgccggcgugcugaccgcccugaugcucaugaucuuccugaugacgugcugccgccgggggaaccaggccggcuccaagcagcacgggcuggagggcaccggccgcaaggugagcgucaccucccagaacgggaaggugaucagcuccugggagagcuacaagagcggcggggagacccgccuguga

SEQ ID NO: 95459 - RNA, 1575 nt, Artificial Sequence; identical to SEQ ID NO: 94923
  derived and/or modified CDS sequence (opt1) from glycoprotein__RABV__JX944579.1

SEQ ID NO: 95460 - RNA, 1575 nt, Artificial Sequence; identical to SEQ ID NO: 94923
  derived and/or modified CDS sequence (opt1) from glycoprotein__RABV__JX944580.1

SEQ ID NO: 95461 - RNA, 1575 nt, Artificial Sequence; identical to SEQ ID NO: 94923
  derived and/or modified CDS sequence (opt1) from glycoprotein__RABV__JX944581.1

SEQ ID NO: 95462 - RNA, 1575 nt, Artificial Sequence
  derived and/or modified CDS sequence (opt1) from glycoprotein__RABV__JX944582.1
auggugccgcagguccugugguucgugccgcuccugguguucagcaugugcuucggcaaguuccccaucuacaccauccccgacaagcuggggcccugguccccgaucgacauccaccaccucagcugccccaacaaccuggucguggaggacgagggcugcaccaaccuguccggguucagcuacauggagcucaaggugggcuacaucuccgccaucaaggucaacggguucacgugcaccggcguggugaccgaggccgagaccuacacgaaccuggucggcuacgugaccaccaccuucaagcgcaagcacuuccggcccacgcccgacgcgugccgcgccgccuacaacuggaagauggccggggacccgcgguacgaggagagccugcacaaccccuaccccgacuaccacuggcuccgcaccgugaagaccaccaaggagucccuggucaucaucagccccuccguggccgaccuggacccguacgacaagagccuccacucccggguguuccccagcggcaagugcuccgggaucacgaucagcuccaccuacugcagcaccaaccacgacuacaccaucuggaugcccgagaacccccgccugggcacguccugcgacaucuucaccaacagccgggggaagcgcgcguccaagggcagcaagaccugcggcuucgucgacgagcgggggcuguacaagagccucaagggcgccugcaagcugaagcugugcggggugcucggccugcgccugauggacggcaccuggguggccaugcagacguccgacgagaccaaguggugcccgcccgaccagcucgucaaccugcacgacuuccggagcgacgagaucgagcaccuggugguggaggagcucgucaagaagcgcgaggagugccuggacgcccuggaguccaucaugaccaccaagagcguguccuuccggcgccucagccaccuccggaagcuggugcccggguucggcaaggcguacacgaucuucaacaagacccugauggaggccgacgcccacuacaaguccguccgcaccuggaacgagaucauccccagcaaggggugccugcgggugggcgggcgcugccacccgcacgucaacggcguguucuucaacggcaucauccuggggcccgacggccacgugcucauccccgagaugcaguccagccugcugcagcagcacauggagcuccuggaguccagcgucaucccccugaugcacccgcucgccgaccccuccaccguguucaaggacggggacgaggccgaggacuucguggagguccaccuccccgacgugcacaagcagaucagcggcguggaccuggggcugcccaacuggggcaaguacguccugguguccgcgggcgugcuggucgugcucaugcuggccauccugaucaugacgugcugcgggcgggugaaccgccccaagagcacccagcacucccucgagggcaccgggcggaaggucagcgugaccucccagagcggcaaggugaucagcuccugggagagcuacaaguccgggggcgagacgcgccuguga

SEQ ID NO: 95463 - RNA, 1575 nt, Artificial Sequence
  derived and/or modified CDS sequence (opt1) from glycoprotein__RABV__JX944583.1
augaucccccaggugcugugguucgucccgcuccugguguucagcaugugcuucggcaaguuccccaucuacaccauccccgacaagcuggggcccugguccccgaucgacauccaccaccucagcugccccaacaaccugguggucgaggacgagggcugcaccaaccuguccggguucagcuacauggagcucaaggugggcuacaucuccgccaucaaggugaacggguucacgugcaccggcgucgugaccgaggccgagaccuacacgaacuucgugggcuacgucaccaccaccuucaagcgcaagcacuuccggcccacgcccgacgcgugccgcgccgccuacaacuggaagauggccggggacccgcgguacgaggagagccugcacaaccccuaccccgacuaccacuggcugcgcaccgugaagaccaccaaggagucccucgugaucaucagccccuccgucgccgaccuggacccguacgacaagagccugcacucccggguguuccccagcggcaagugcuccgggaucacgaucagcuccaccuacugcagcaccaaccacgacuacaccaucuggaugcccgagaacccccgccucggcacguccugcgacaucuucaccaacagccgggggaagcgcgcguccaagggcagcaagaccugcggcuucguggacgagcgggggcuguacaagagccugaagggcgccugcaagcucaagcugugcgggguccugggccuccgccugauggacggcaccuggguggccaugcagacguccgacgagaccaaguggugcccgcccgaccagcuggugaaccuccacgacuuccggagcgacgagaucgagcaccuggucguggaggagcuggugaagaagcgcgaggagugccucgacgcccuggaguccaucaugaccaccaagagcgucuccuuccggcgccugagccaccuccggaagcuggugcccggguucggcaaggcguacacgaucuucaacaagacccugauggaggccgacgcccacuacaaguccgugcgcaccuggaacgagaucauccccagcaaggggugccuccgggucggcgggcgcugccacccgcacgugaacggcgucuucuucaacggcaucauccuggggcccgacggccacgugcugauccccgagaugcaguccagccuccugcagcagcacauggagcugcucgaguccagcgugaucccccugaugcacccgcuggccgaccccuccaccgucuucaaggacggggacgaggccgaggacuucguggaggugcaccuccccgacguccacaagcagaucagcggcguggaccuggggcugcccaacuggggcaaguacgugcucgucuccgcgggcgugcuggugguccugaugcucgccaucuucaucaugacgugcugcgggcgggugaaccgcccgaaguccacccagcacagccuggagggcaccgggcggaaggugagcgucaccucccagagcggcaaggugaucagcuccugggagagcuacaaguccgggggcgagacgcgccuguga

SEQ ID NO: 95464 - RNA, 1575 nt, Artificial Sequence; identical to SEQ ID NO: 94923
  derived and/or modified CDS sequence (opt1) from glycoprotein__RABV__JX944584.1

SEQ ID NO: 95465 - RNA, 1575 nt, Artificial Sequence
  derived and/or modified CDS sequence (opt1) from glycoprotein__RABV__JX944586.1
auggugccgcagguccugcuguucgugccgcugcugguguucagcaugugcuucggcaaguuccccaucuacaccauccccgacaagcucgggcccugguccccgaucgacauccaccaccugagcugccccaacaaccuggucguggaggacgagggcugcaccaaccucuccggguucagcuacauggagcugaaggugggcuacaucuccgccaucaaggucaacggguucacgugcaccggcguggugaccgaggccgagaccuacacgaacuucgucggcuacgugaccaccaccuucaagcgcaagcacuuccggcccacgcccgacgcgugccgcgccgccuacaacuggaagauggccggggacccgcgguacgaggagagccugcacaaccccuaccccgacuaccacuggcuccgcaccgugaagaccaccaaggagucccuggucaucaucagccccuccguggccgaccuggacccguacgacaagagccuccacucccggguguuccccagcggcaagugcuccgggaucacgaucagcuccaccuacugcagcaccaaccacgacuacaccaucuggaugcccgagaacccccgccugggcacguccugcgacaucuucaccaacagccgggggaagcgcgcguccaagggcggcaagaccugcggguucgucgacgagcggggccuguacaagagccucaagggggccugcaagcugaagcugugcggcgugcucggccugcgccugauggacgggaccuggguggccaugcagacgagcgacgagaccaaguggugcccgcccgaccagcucgucaaccugcacgacuuccgguccgacgagaucgagcaccuggugguggaggagcucgucaagaagcgcgaggagugccuggacgcccuggagagcaucaugaccaccaaguccgugagcuuccggcgccucucccaccuccggaagcuggugcccggcuucgggaaggcguacacgaucuucaacaagacccucauggaggccgacgcccacuacaagagcauccgcaccuggaacgagaucauccccuccaagggcugccugcgggucgggggccgcugccacccgcacgugaacggcgucuucuucaacgggaucauccugggccccgacgggcacgugcucauccccgagaugcagagcucccugcugcagcagcacauggagcuccuggagagcuccgugaucccccugaugcacccgcucgccgaccccagcaccgucuucaaggacggcgacgaggccgaggacuucguggaggugcaccuccccgacguccacaagcagaucuccgggguggaccugggccugcccagcuggggcaaguacgugcuggucuccgcgggggugcuggugguccucaugcugacgaucuucaucaugaccugcugcggccgggugcgccggcccaagagcacccagcacucccugggggagaccggccgcaaggugagcgucacgucccagagcgggaaggugaucagcuccugggagagcuacaaguccggcggcgagacccgccucuga

SEQ ID NO: 95466 - RNA, 1575 nt, Artificial Sequence; identical to SEQ ID NO: 94923
  derived and/or modified CDS sequence (opt1) from glycoprotein__RABV__JX944587.1

SEQ ID NO: 95467 - RNA, 1575 nt, Artificial Sequence
  derived and/or modified CDS sequence (opt1) from glycoprotein__RABV__JX944588.1
auggugccccagguccugcuguucgugccgcugcugguguucagccucugcuucggcaaguuccccaucuacaccauccccgacaagcuggggcccugguccccgaucgacauccaccaccugagcugccccaacaaccucgucguggaggacgagggcugcaccaaccuguccggguucagcuacauggagcugaaggugggcuacaucuccgccaucaaggucaacggguucacgugcaccggcguggugaccgaggccgagaccuacacgaacuucgucggcuacgugaccaccaccuuccgccggaagcacuuccgccccacgcccgacgcgugccgggccgccuacaacuggaagcucgccggggacccgcgcuacgaggagagccugcacaaccccuaccccgacuaccacuggcugcggaccgugaagaccaccaaggagucccucgucaucaucagccccuccguggccgaccuggacccguacgacaagagccugcacucccgcguguuccccggcgggaagugcagcggcaucacgaucuccagcaccuacugcuccaccaaccacgacuacaccaucuggaugcccgagaacccccggcucgggacgagcugcgacaucuucgucaacucccgcggcaagcgggcgagcaagggcgggaagaccugcggcuucguggacgagcgcgggcuguacaagucccugaagggcgccugcaagcucaagcugugcggcgugccggggcugcggcucauggacggcaccugggccgccauccagaccagcgacgagacgaaguggugcccgcccaaccagcuggucaaccugcacgacuuccgcagcgacgagaucgagcaccucgugguggaggagcuggucaagaagcgggaggagugccuggacgcgcucgaguccaucaugaccaccaagagcguguccuuccgccggcugagccaccuccgcaagcucgugcccggguucggcaaggccuacaccaucuucaacaagacgcugauggaggccgacgcccacuacaaguccguccggaccuggaacgagaucauccccagcaaggggugccugcgcgugggcggccggugccacccccacgucaacgggguguucuucaacggcaucauccucgggcccgacggccacgugcugauccccgagaugcaguccagccugcuccagcagcacauggagcugcuggaguccagcgucaucccgcucaugcacccccuggccgaccccuccaccguguucaaggacggggacgaggcggaggacuucguggagguccaccuccccgacgugcacaagcugaucagcggcguggaccugggccugccguccugggggaaguacguccucaugagcgccggcgugcugaccgcccugaugcucaugaucuuccugaugacgugcugccgccgggggaaccaggccggcuccaagcagcacgggcuggagggcaccggccgcaaggugagcgucaccucccagaacgggaaggugaucagcuccugggagagcuacaagagcggcggggagacccgccuguga

SEQ ID NO: 95468 - RNA, 1575 nt, Artificial Sequence
  derived and/or modified CDS sequence (opt1) from glycoprotein__RABV__JX944593.1
auggugccgcagguccugcuguucgugccgcugcuggccuucagcaugugcuucggcaaguuccccaucuacaccauccccgacaagcucgggcccugguccccgaucgacauccaccaccugagcugccccaacaaccugguggucgaggacgagggcugcaccaaccucuccggguucagcuacauggagcugaaggugggcuacaucuccgccaucaaggugaacggguucacgugcaccggcgucgugaccgaggcggagaccuacacgaacuucgugggcuacgucaccaccaccuucaagcgcaagcacuuccggcccacgcccgacgccugccgcgccgccuacaacuggaagauggccggggacccgcgguacgaggagagccugcacaaccccuaccccgacuaccacuggcuccgcaccgugaagaccaccaaggagucccuggugaucaucagccccuccgucgcggaccuggacccguacgacaagagccuccacucccggguguuccccagcggcaagugcuccgggaucacgaucagcuccaccuacugcagcaccaaccacgacuacaccaucuggaugcccgagaacccccgccugggcacguccugcgacaucuucaccaacagccgggggaagcgcgccuccaagggcggcaagaccugcggguucguggacgagcggggccuguacaagagccucaagggggccugcaagcugaagcugugcggcguccucggccugcgccugauggacgggaccuggguggccaugcagacgagcgacgagaccaaguggugcccgcccgaccagcucgugaaccugcacgacuuccgguccgacgagaucgagcaccuggucguggaggagcucgugaagaagcgcgaggagugccuggacgcgcuggagagcaucaugaccaccaaguccgucagcuuccggcgccucucccaccuccggaagcuggugcccggcuucgggaaggccuacacgaucuucaacaagacccucauggaggccgacgcccacuacaagagcgugcgcaccuggaacgagaucauccccuccaagggcugccugcgggucgggggccgcugccacccgcacgugaagggcgucuucuucaacgggaucauccugggccccgacgggcacgugcucauccccgagaugcagagcucccugcugcagcagcacauggagcuccuggagagcuccgugaucccccugaugcacccgcucgccgaccccagcaccgucuucaaggacggcgacgaggcggaggacuucguggaggugcaccuccccgacguccacaagcagaucuccgggguggaccugggccugcccagcuggggcaaguacgugcuggucuccgccggggugcuggugguccucaugcugacgaucuucaucaucacgugcugcggccgggugcaccgccccaagagcacccagcacgggcugggcgggaccggccggaagguguccgucaccagccaguccggcaaggugaucagcagcugggaguccuacaagagcgggggcgagacccgccucuga

SEQ ID NO: 95469 - RNA, 1575 nt, Artificial Sequence
  derived and/or modified CDS sequence (opt1) from glycoprotein__RABV__JX987718.1
auggugccgcagguccugcuguucgugccgcugcugguguucagcaugugcuucggcaaguuccccaucuacaccauccccgacaagcucgggcccugguccccgaucgacauccaccaccugagcugccccaacaaccuggucguggaggacgagggcugcaccaaccucuccggguucagcuacauggagcugaaggugggcuacaucuccgccaucaaggucaacggguucacgugcaccggcguggugaccgaggccgagaccuacacgaacuucgucggcuacgugaccaccaccuucaagcgcaagcacuuccggcccacgcccgacgcgugccgcgccgccuacaacuggaagauggccggggacccgcgguacgaggagagccugcacaaccccuaccccgacuaccacuggcuccgcaccgugaagaccaccaaggagucccuggucaucaucagccccuccguggccgaccuggacccguacgacaagagccuccacucccggguguuccccagcggcaagugccuggggaucacgaucuccagcaccuacugcuccaccaaccacgacuacaccaucuggaugcccgagaacccccgccugggcacgagcugcgacaucuucaccaacucccgggggaagcgcgcgagcaagggcuccaagaccugcggcuucgucgacgagcgggggcucuacaagagccugaagggcgccugcaagcugaagcucugcggggugcugggccugcgccucauggacggcaccuggguggccaugcagacgagcgacgagaccaaguggugcccgcccgaccagcuggucaaccugcacgacuuccgguccgacgagaucgagcaccucgugguggaggagcuggucaagaagcgcgaggagugccuggacgcccucgagagcaucaugaccaccaaguccgugagcuuccggcgccugucccaccuccggaagcucgugcccggguucggcaaggcguacacgaucuucaacaagacccugauggaggccgacgcccacuacaagagcguccgcaccuggaacgagaucauccccuccaaggggugccugcgggugggcgggcgcugccacccgcacgucaacggcguguucuucaacggcaucauccucgggcccgacggccacgugcugauccccgagaugcagagcucccugcuccagcagcacauggagcugcuggagagcuccgucaucccccucaugcacccgcuggccgaccccagcaccguguucaaggagggggacgaggccgaggacuucguggagguccaccuccccgacgugcacaagcagaucuccggcguggaccuggggcugcccagcuggggcaaguacguccugguguccgcgggcgugcucgucgugcugaugcugacgaucuucaucaugaccugcugcgggcgggugcaccgccccaagagcacccagcacucccucggcgggaccggccggaaggucagcgugacgucccagagcgggaaggugaucagcuccugggagagcuacaaguccggcggcgagacccgccuguga

SEQ ID NO: 95470 - RNA, 1575 nt, Artificial Sequence
  derived and/or modified CDS sequence (opt1) from glycoprotein__RABV__JX987719.1
auggugccgcagguccuccuguucgugccgcugcugguguucagcaugugcuucggcaaguuccccaucuacaccauccccgacaagcucgggcccugguccccgaucgacauccaccaccugagcugccccaacaaccuggucguggaggacgagggcugcaccaaccucuccggguucagcuacauggagcugaaggugggcuacaucuccgccaucaaggucaacggguucacgugcaccggcguggugaccgaggccgagaccuacacgaacuucgucggcuacgugaccaccaccuucaagcgcaagcacuuccggcccacgcccgacgcgugccgcgccgccuacaacuggaagcuggccggggacccgcgguacgaggagagccuccacaaccccuaccccgacuaccacuggcugcgcaccgugaagaccaccaaggagucccuggucaucaucagccccuccguggccgaccucgacccguacgacaagagccugcacucccggguguuccccagcggcaagugccuggggaucacgaucuccagcaccuacugcuccaccaaccacgacuacaccaucuggaugcccgagaacccccgccucggcacgagcugcgacaucuucaccaacucccgggggaagcgcgcgagcaagggcuccaagaccugcggcuucgucgacgagcgggggcuguacaagagccugaagggcgccugcaagcucaagcugugcggggugcugggccuccgccugauggacggcaccuggguggccaugcagacgagcgacgagaccaaguggugcccgcccgaccagcuggucaaccuccacgacuuccgguccgacgagaucgagcaccuggugguggaggagcuggucaagaagcgcgaggagugccucgacgcccuggagagcaucaugaccaccaaguccgugagcuuccggcgccugucccaccuccggaagcuggugcccggguucggcaaggcguacacgaucuucaacaagacccugauggaggccgacgcccacuacaagagcauccgcaccuggaacgagaucauccccuccaaggggugccuccgggucggcgggcgcugccacccgcacgugaacggcgucuucuucaacggcaucauccuggggcccgacggccacgugcugauccccgagaugcagagcucccuccugcagcagcacauggagcugcucgagagcuccgugaucccccugaugcacccgcuggccgaccccagcaccgucuucaaggacggggacgaggccgaggacuucguggaggugcaccuccccgacguccacaagcagaucuccggcguggaccuggggcugcccagcuggggcaaguacgugcucgucuccgcgggcgugcuggugguccugaugcucacgaucuucaucaugaccugcugcgggcgggugcgccggcccaagagcacccagcacucccugggcgggaccggccgcaaggugagcgucacgucccagagcgggaaggugaucagcuccugggagagcuacaaguccggcggcgagacccgccuguga

SEQ ID NO: 95471 - RNA, 1575 nt, Artificial Sequence; identical to SEQ ID NO: 95469
  derived and/or modified CDS sequence (opt1) from glycoprotein__RABV__JX987720.1

SEQ ID NO: 95472 - RNA, 1575 nt, Artificial Sequence
  derived and/or modified CDS sequence (opt1) from glycoprotein__RABV__JX987721.1
auggugccccagguccugcuguucgugccgcugcugguguucagccucugcuucggcaaguuccccaucuacaccauccccgacaagcuggggcccugguccccgaucgacauccaccaccugagcugccccaacaaccucgucguggaggacgagggcugcaccaaccuguccggguucagcuacauggagcugaaggugggcuacaucuccgccaucaaggucaacggguucacgugcaccggcguggugaccgaggccgagaccuacacgaacuucgucggcuacgugaccaccaccuuccgccggcgccacuuccggcccacgcccgacacgugccgcgcggccuacaacuggaagcucgccggggacccgcgguacgaggagagccugcacaaccccuaccccgacuaccacuggcugcgcaccgugaagaccaccaaggagucccucgucaucaucagccccuccguggccgaccuggacccguacgacaagagccugcacucccggguguuccccggcgggaagugcagcggcaucaccgucuccagcaccuacugcuccaccaaccacgacuacacgaucuggaugcccgagaacccccgccucgggaccagcugcgacaucuucgugaacucccggggcaagcgcgccagcaagggcgggaagaccugcggcuucguggacgagcgggggcuguacaagucccugaagggcgcgugcaagcucaagcugugcggcgucccggggcugcgccucauggacggcaccugggccgccauccagacgagcgacgagaccaaguggugcccgcccgaccagcuggugaaccugcacgacuuccggagcgacgagaucgagcaccucguggucgaggagcuggugaagaagcgcgaggagugccuggacgcccucgaguccaucaugaccaccaagagcguguccuuccggcgccugagccaccuccggaagcucguccccggguucggcaaggcguacacgaucuucaacaagacccugauggaggccgacgcccacuacaaguccgugcgcaccuggaacgagaucauccccagcaaggggugccugcgggucggcggccgcugccacccccacgugaacgggguguucuucaacggcaucauccucgggcccgacggccacguccugauccccgagaugcaguccagccugcuccagcagcacauggagcugcuggaguccagcgugaucccgcucaugcacccccuggccgaccccuccaccguguucaaggacgggggcgaggccgaggacuucgucgaggugcaccuccccgacgugcacaagcugaucagcggcgucgaccuggggcugccguccuggggcaaguacgugcucaugagcgcgggggugcugacggcccugaugcucaugaucuuccugaugaccugcugccggcgcggcaaccaggccggguccaagcagcacggccuggagggcaccgggcgcaaggucagcgugaccucccagaacggcaaggugaucagcuccugggagagcuacaagagcgggggcgagacgcggcuguga

SEQ ID NO: 95473 - RNA, 1575 nt, Artificial Sequence; identical to SEQ ID NO: 95469
  derived and/or modified CDS sequence (opt1) from glycoprotein__RABV__JX987723.1

SEQ ID NO: 95474 - RNA, 1575 nt, Artificial Sequence
  derived and/or modified CDS sequence (opt1) from glycoprotein__RABV__JX987724.1
auggugccccagguccugcuguucgugccgcugcugguguucagccucugcuucggcaaguuccccaucuacaccauccccgacaagcuggggcccugguccccgaucgacauccaccaccugagcugccccaacaaccucgucguggaggacgagggcugcaccaaccuguccggguucagcuacauggagcugaaggugggcuacaucuccgccaucaaggucaacggguucacgugcaccggcguggugaccgaggccgagaccuacacgaacuucgucggcuacgugaccaccaccuuccgccggaagcacuuccgccccacgcccgacgcgugccgggccgccuacaacuggaagcucgccggggacccgcgcuacgaggagagccugcacaaccccuaccccgacuaccacuggcugcggaccgugaagaccaccaaggagucccucgucaucaucagccccuccguggccgaccuggacccguacgacaagagccugcacucccgcguguuccccggcgggaagugcagcggcaucacggucuccagcaccuacugcuccaccaaccacgacuacaccaucuggaugcccgagaacccccggcucgggacgagcugcgacaucuucgugaacucccgcggcaagcgggcgagcaagggcgggaagaccugcggcuucguggacgagcgcgggcuguacaagucccugaagggcgccugcaagcucaagcugugcggcgucccggggcugcggcucauggacggcaccugggccgccauccagaccagcgacgagacgaaguggugcccgcccgaccagcuggugaaccugcacgacuuccgcagcgacgagaucgagcaccucguggucgaggagcuggugaagaagcgggaggagugccuggacgcgcucgaguccaucaugaccaccaagagcguguccuuccgccggcugagccaccuccgcaagcucguccccggguucggcaaggccuacaccaucuucaacaagacgcugauggaggccgacgcccacuacaaguccgugcggaccuggaacgagaucauccccagcaaggggugccugcgcgucggcggccggugccacccccacgugaacgggguguucuucaacggcaucauccucgggcccgacggccacguccugauccccgagaugcaguccagccugcuccagcagcacauggagcugcuggaguccagcgugaucccgcucaugcacccccuggccgaccccuccaccguguucaaggacggggacgaggcggaggacuucgucgaggugcaccuccccgacgugcacaagcugaucagcggcgucgaccugggccugccguccugggggaaguacgugcucaugagcgccggcgugcugaccgcccugaugcucaugaucuuccugaugacgugcugccgccgggggaaccaggccggcuccaagcagcacgggcuggagcgcaccggccgcaaggucagcgugaccucccagaacggcaaggugaucagcuccugggagagcuacaagagcgggggcgagacccggcuguga

SEQ ID NO: 95475 - RNA, 1575 nt, Artificial Sequence
  derived and/or modified CDS sequence (opt1) from glycoprotein__RABV__JX987725.1
auggugccgcagguccugugguucgugccgcuccugguguucagcaugugcuucggcaaguuccccaucuacaccauccccgacaagcuggggcccugguccccgaucgaccuccaccaccugagcugccccaacaaccuggucguggaggacgagggcugcaccaaccucuccggguucagcuacauggagcugaaggugggcuacaucuccgccaucaaggucaacggguucacgugcaccggcguggugaccgaggccgagaccuacacgaacuucgucggcuacgugaccaccaccuucaagcgcaagcacuuccggcccacgcccgacgcgugccgcgccgccuacaacuggaagauggccggggacccgcgguacgaggagagccugcacaaccccuaccccgacuaccacuggcuccgcaccgugaagaccaccaaggagucccuggucaucaucagccccuccguggccgaccuggacccguacgacaagagccuccacucccggguguuccccagcggcaagugcuccgggaucacgaucagcuccaccuacugcagcaccaaccacgacuacaccaucuggaugcccgagaacccccgccugggcacguccugcgacaucuucaccaacagccgggggaagcgcgcguccaagggcagcaagaccugcggcuucgucgacgagcgggggcuguacaagagccucaagggcgccugcaagcugaagcugugcggggugcucggccugcgccugauggacggcaccuggguggccaugcagacguccgacgagaccaaguggugcccgcccgaccagcucgucaaccugcacgacuuccggagcgacgagaucgagcaccuggugguggaggagcucgucaagaagcgcgaggagugccuggacgcccuggaguccaucaugaccaccaagagcguguccuuccggcgccucagccaccuccggaagcuggugcccggguucggcaaggcguacacgaucuucaacaagacccugauggaggccgacgcccacuacaaguccguccgcaccuggaacgagaucauccccagcaaggggugccugcgggugggcgggcgcugccacccgcacgucaacggcguguucuucaacggcaucauccuggggcccgacggccacgugcucauccccgagaugcaguccagccugcugcagcagcacauggagcuccuggaguccagcgucaucccccugaugcacccgcucgccgaccccuccaccguguucaaggacggggacgaggccgaggacuucguggagguccaccuccccgacgugcacaagcagaucagcggcguggaccuggggcugcccaacuggggcaaguacguccugguguccgcgggcgugcuggucgugcucaugcuggccaucuucaucaugacgugcugcgggcgggugaaccgccccaagagcacccagcacucccuggagggcaccgggcggaaggucagcgugaccucccagagcggcaaggugaucagcuccugggagagcuacaaguccgggggcgagacgcgccucuga

SEQ ID NO: 95476 - RNA, 1575 nt, Artificial Sequence; identical to SEQ ID NO: 94923
  derived and/or modified CDS sequence (opt1) from glycoprotein__RABV__JX987727.1

SEQ ID NO: 95477 - RNA, 1575 nt, Artificial Sequence
  derived and/or modified CDS sequence (opt1) from glycoprotein__RABV__JX987728.1
auggugccccaggcccugcuguucgucccgcugcugguguucagccugugcuucggcaaguuccccaucuacaccauccccgacaagcuggggcccugguccccgaucgacauccaccaccugagcugccccaacaaccucguggucgaggacgagggcugcaccaaccuguccggguucagcuacauggagcugaaggugggcuacaucuccgccaucaaggugaacggguucacgugcaccggcgucgugaccgaggcggagaccuacacgaacuucgugggcuacgucaccaccaccuucaagcgcaagcacuuccggcccacgcccgacgccugccgcgccgccuacaacuggaagauggccggggacccgcgguacgaggagagccuccacaaccccuaccccgacuaccacuggcugcgcaccgugaagaccaccaaggagucccuggugaucaucagccccuccgucgcggaccucgacccguacgacaagagccugcacucccggguguuccccagcggcaagugcuccgggaucacggugagcuccaccuacugcagcaccaaccacgacuacaccaucuggaugcccgagaacccccgccugggcacguccugcgacaucuucaccaacagccgggggaagcgcgccuccaagggcagcaagaccugcggcuucgucgacgagcgggggcucuacaagagccugaagggcgccugcaagcugaagcucugcggggugcugggccugcgccucauggacggcaccuggguggccaugcagacguccgacgagaccaaguggugcccgcccgaccagcuggucaaccugcacgacuuccggagcgacgagaucgagcaccucgugguggaggagcuggucaagaagcgcgaggagugccuggacgcgcucgaguccaucaugaccaccaagagcguguccuuccggcgccugagccaccuccggaagcucgugcccggguucggcaaggccuacacgaucuucaacaagacccugauggaggccgacgcccacuacaaguccguccgcaccuggaacgagaucauccccagcaaggggugccugcgggugggcgggcgcugccacccgcacgucaacggcguguucuucaacggcaucauccucgggcccgacggccacgugcugauccccgagaugcaguccagccugcuccagcagcacauggagcugcuggaguccagcgucaucccccucaugcacccgcuggccgaccccuccaccguguucaaggacggggacgaggcggaggacuucguggagguccaccuccccgacgugcacaagcaggucagcggcguggaccuggggcugcccaacuggggcaaguacgugcugcucuccgccggcgcccugaucgcccugaugcucaugaucuuccugaugacgugcugccggcgcgugaaccggccggagagcacccagcccucccucgggggcaccgggcgcaaggucagcaucaccucccagagcggcaaggugaucagcuccugggagagcuacaaguccgggggcgagacgcgccuguga

SEQ ID NO: 95478 - RNA, 1575 nt, Artificial Sequence
  derived and/or modified CDS sequence (opt1) from glycoprotein__RABV__JX987729.1
auggugccccagguccugcuguucgugccgcugcugguguucccccugugcagcggcaaguuccccaucuacaccauccccgacaagcuggggccguggucccccaucgacauccaccaccugagcugccccaacaaccucgucguggaggacgagggcugcaccaaccuguccggguucagcuacauggagcugaaggugggcuacaucuccgccaucaaggucaacggguucacgugcaccggcguggugaccgaggccgagaccuacacgaacuucgucggcuacgugaccaccaccuuccgccggaagcacuuccgccccacgccggacgcgugccgggccgccuacaacuggaagauggccggggacccccgcuacgaggagagccuccacaaccccuaccccgacuaccacuggcugcggaccgugaagaccaccaaggagucccuggucaucaucagcccguccguggccgaccucgaccccuacgacaagagccugcacucccgcguguuccccagcggcaagugcuccgggaucacggucagcuccaccuacugcagcaccaaccacgacuacaccaucuggaugcccgagaacccgcggcugggcacguccugcgacaucuucaccaacagccgcgggaagcgggcguccaagggcagcaagaccugcggcuucguggacgagcgcgggcucuacaagagccugaagggcgccugcaagcugaagcucugcggggugcugggccugcggcucauggacggcaccuggaucgccaugcagacguccgacgagaccaaguggugcccgcccgaccagcuggucaaccugcacgacuuccgcagcgacgagaucgagcaccucgugguggaggagcuggucaagaagcgggaggagugccuggacgcccucgaguccaucaugaccaccaagagcguguccuuccgccggcugagccaccuccgcaagcucgugcccggguucggcaaggcguacacgaucuucaacaagacccugauggaggccgacgcccacuacaaguccguccggaccuggaacgagaucauccccagcaaggggugccugcgcgugggcgggcggugccacccccacgucaacggcguguucuucaacggcaucauccucgggcccgacggccacgugcugauccccgagaugcaguccagccugcuccagcagcacauggagcugcuggaguccagcgucaucccgcucaugcacccccuggccgaccccuccaccguguucaaggacggggacgaggccgaggacuucguggagguccaccuccccgacgugcacaagcaggucagcggcguggaccuggggcugccgaacuggggcaaguacgugcugcucuccgcgggcgcccugaucgcccugaugcucaugaucuuccugaugacgugcugccgcaaggugaaccggcccgagagcacccagcgcucccucgggggcaccgggcgcaaggucagcaucaccucccagagcggcaaggugaucagcuccugggagagcuacaaguccgggggcgagacgcggcuguga

SEQ ID NO: 95479 - RNA, 1575 nt, Artificial Sequence
  derived and/or modified CDS sequence (opt1) from glycoprotein__RABV__JX987730.1
auggugccccaggcccugcuguucgucccgcugcuggccuuccccaugugcuucggcaaguuccccaucuacaccauccccgacaagcucgggccguggagccccaucgacauccaccaccuguccugccccaacaaccuggugguggaggacgagggcugcaccaaccucagcggguucuccuacauggagcugaaggucggcuacaucagcgcgaucaaggugaacggguucacgugcaccggcguggucaccgaggccgagaccuacacgaacuucgugggcuacgugaccaccaccuucaagcgcaagcacuuccggcccacgccggacgccugccgcgccgccuacaacuggaagauggcgggggacccccgguacgaggagucccugcacaaccccuaccccgacuaccacuggcuccgcaccgucaagaccaccaaggagagccugaucaucaucuccccgagcguggccgaccuggaccccuacgacaagucccuccacagccggguguuccccuccggcaagugccuggggaucacgaucagcuccaccuacugcagcaccaaccacgacuacaccaucuggaugcccgagaaccugcgccucggcacguccugcgacaucuucaccaacagccgggggaagcgcgccuccaagggcagcaagaccugcggcuucgucgacgagcgggggcuguacaagucccugaagggcgccugcaagcucaagcugugcggggugcugggccuccgccugauggacggcaccuggguggcgaugccgacgagcgacgagaccaaguggugcccgcccgaccagcuggucaaccuccacgacuuccggagcgacgagaucgagcaccuggugguggaggagcuggucaagaagcgcgaggagugccucgacgcccuggaguccaucaugaccaccaagagcguguccuuccggcgccugagccaccuccggaagcuggugcccggguucggcaaggccuacacgaucuucaacaagacccugauggaggccgacgcccacuacaaguccguccgcaccuggaacgagaucauccccagcaaggggugccuccgggugggcgggcgcugccacccccacgugaacggcgucuucuucaacggcaucauccuggggcccgacggccacgugcugauccccgagaugcaguccagccuccugcagcagcacauggagcugcucgaguccagcgucaucccgcugaugcacccccuggcggaccccuccaccguguucaaggacggggacgaggccgaggacuucguggagguccaccuccccgacgugcacaagcagaucagcggcguggaccuggggcugccgaacuggggcaaguacguccucaucaucgccggcgugcugaucgccaugauccugacgaucuuccucaugaccugcugcgggcggggcaaccgccccaaguccacccagcacagccucgggggcaucgggcggaagguguccagcaccucccagagcggcaaggucaucuccagcugggagagcuacaaguccggcggggagacgcgccuguga

SEQ ID NO: 95480 - RNA, 1575 nt, Artificial Sequence; identical to SEQ ID NO: 95479
  derived and/or modified CDS sequence (opt1) from glycoprotein__RABV__JX987731.1

SEQ ID NO: 95481 - RNA, 1575 nt, Artificial Sequence
  derived and/or modified CDS sequence (opt1) from glycoprotein__RABV__JX987732.1
auggugccccaggcccugcuguucgucccgcugcugguguucccccugugcuucggcaaguuccccaucuacaccauccccgacaagcuggggccguggagccccaucgacauccaccaccuguccugccccaacaaccucguggucgaggacgagggcugcaccaaccugagcggguucuccuacauggagcugaaggugggcuacaucagcgccaucaaggugaacggguucacgugcaccggcgucgugaccgaggcggagaccuacacgaacuucgugggcuacgucaccaccaccuucaagcgcaagcacuuccggcccacgccggacgccugccgcgccgccuacaacuggaagauggccggggacccccgguacgaggagucccuccacaaccccuaccccgacuaccacuggcugcgcaccgugaagaccaccaaggagagccuggugaucaucuccccgagcgucgcggaccucgaccccuacgacaagucccugcacagccggguguuccccuccggcaagugcagcgggaucacgguguccagcaccuacugcuccaccaaccacgacuacaccaucuggaugcccgagaacccgcgccugggcacgagcugcgacaucuucaccaacucccgggggaagcgcgccagcaagggcuccaagaccugcggcuucgucgacgagcgggggcucuacaagagccugaagggcgccugcaagcugaagcucugcggggugcugggccugcgccucauggacggcaccuggguggccaugcagacgagcgacgagaccaaguggugcccgcccgaccagcuggucaaccugcacgacuuccgguccgacgagaucgagcaccucgugguggaggagcuggucaagaagcgcgaggagugccuggacgcgcucgagagcaucaugaccaccaaguccgugagcuuccggcgccugucccaccuccggaagcucgugcccggguucggcaaggccuacacgaucuucaacaagacccugauggaggccgacgcccacuacaagagcguccgcaccuggaacgagaucauccccuccaaggggugccugcgggugggcgggcgcugccacccccacgucaacggcguguucuucaacggcaucauccucgggcccgacggccacgugcugauccccgagaugcagagcucccugcuccagcagcacauggagcugcuggagagcuccgucaucccgcucaugcacccccuggccgaccccagcaccguguucaaggacggggacgaggcggaggacuucguggagguccaccuccccgacgugcacaagcaggucuccggcguggaccuggggcugccgaacuggggcaaguacgugcugcucagcgccggcgcccugaucgcccugaugcucaucaucuuccugaugacgugcugccggcgcgugaaccggcccgaguccacccagcgcagccucgggggcaccgggcgcaaggucuccgugaccagccaguccggcaaggugaucagcagcugggaguccuacaagagcgggggcgagacgcggcuguga

SEQ ID NO: 95482 - RNA, 1575 nt, Artificial Sequence
  derived and/or modified CDS sequence (opt1) from glycoprotein__RABV__JX987733.1
auggugccccaggcccugcuguucgucccgcugcuggccuuccccaugugcuucggcaaguuccccaucuacaccauccccgacaagcucgggccguggagccccaucgacauccaccaccuguccugccccaacaaccuggugguggaggacgagggcugcaccaaccucagcggguucuccuacauggagcugaaggucggcuacaucagcgcgaucaaggugaacggguucacgugcaccggcguggucaccgaggccgagaccuacacgaacuucgugggcuacgugaccaccaccuucaagcgcaagcacuuccggcccacgccggacgccugccgcgccgccuacaacuggaagauggcgggggacccccgguacgaggagucccugcacaaccccuaccccgacuaccacuggcuccgcaccgucaagaccaccaaggagagccugaucaucaucuccccgagcguggccgaccuggaccccuacgacaagucccuccacagccggguguuccccuccggcaagugccuggggaucacgaucagcuccaccuacugcagcaccaaccacgacuacaccaucuggaugcccgagaaccugcgccucggcacguccugcgacaucuucaccaacagccgggggaagcgcgccuccaagggcagcaagaccugcggcuucgucgacgagcgggggcuguacaagucccugaagggcgccugcaagcucaagcugugcggggugcugggccuccgccugauggacggcaccuggguggcgaugcagacgagcgacgagaccaaguggugcccgcccgaccagcuggucaaccuccacgacuuccggagcgacgagaucgagcaccuggugguggaggagcuggucaagaagcgcgaggagugccucgacgcccuggaguccaucaugaccaccaagagcguguccuuccggcgccugagccaccuccggaagcuggugcccggguucggcaaggccuacacgaucuucaacaagacccugauggaggccgacgcccacuacaaguccguccgcaccuggaacgagaucauccccagcaaggggugccuccgggugggcgggcgcugccacccgcacgugaacggcgucuucuucaacggcaucauccuggggcccgacggccacgugcugauccccgagaugcaguccagccuccugcagcagcacauggagcugcucgaguccagcgucaucccccugaugcacccgcuggcggaccccuccaccguguucaaggacggggacgaggccgaggacuucguggagguccaccuccccgacgugcacaagcagaucagcggcguggaccuggggcugcccaacuggggcaaguacguccucaucaucgccggcgugcugaucgccaugauccugacgaucuuccucaugaccugcugcgggcggggcaaccgcccggaguccacccagcacagccucgggggcaucgggcggaagguguccgccaccagccaguccggcaaggucaucagcuccugggagagcuacaagagcggcggggagacgcgccuguga

SEQ ID NO: 95483 - RNA, 1575 nt, Artificial Sequence
  derived and/or modified CDS sequence (opt1) from glycoprotein__RABV__JX987734.1
auggugccccaggcccugagcuucgucccgcugcugguguucccccugugcuucggcaaguuccccaucuacaccauccccgacaagcucgggccguggucccccaucgacauccaccaccugagcugccccaacaaccugguggucgaggacgagggcugcaccaaccucuccggguucagcuacauggagcugaaggugggcuacaucuccgccaucaaggugaacggguucacgugcaccggcgucgugaccgaggcggagaccuacacgaacuucgugggcuacgucaccaccaccuucaagcgcaagcacuuccggcccacgccggacgccugccgcgccgccuacaacuggaagauggccggggacccccgguacgaggagagccugcacaaccccuaccccgacuaccacuggcuccgcaccgugaagaccaccaaggagucccuggugaucaucagcccguccgucgcggaccuggaccccuacgacaagagccuccacucccggguguuccccagcggcaagugccuggggaucacgguguccagcaccuacugcuccaccaaccacgacuacaccaucuggaugcccgagaacccgcgccugggcacgagcugcgacaucuucaccaacucccgggggaagcgcgccagcaagggcuccaagaccugcggcuucgucgacgagcgggggcucuacaagagccugaagggcgccugcaagcugaagcucugcggggugcugggccugcgccucauggacggcaccuggguggccaugcagacgagcgacgagaccaaguggugcccgcccgaccagcuggucaacauccacgacuuccgguccgacgagaucgagcaccuggugguggaggagcucgucaagaagcgcgaggagugccuggacgcgcuggagagcaucaugaccaccaaguccgugagcuuccggcgccucucccaccuccggaagcuggugcccggguucggcaaggccuacacgaucuucaacaagacccugauggaggccgacgcccacuacaagagcguccgcaccuggaacgagaucauccccuccaaggggugccugcgggugggcgggcgcugccacccccacgucaacggcguguucuucaacggcaucauccuggggcccgacggccacgugcucauccccgagaugcagagcucccugcugcagcagcacauggagcuccuggagagcuccgucaucccgcugaugcacccccucgccgaccccagcaccguguucaaggacggggacgaggcggaggacuucguggagguccaccuccccaacgugcacaagcaggucuccggcguggaccuggggcugccgaacuggggcaaguacgugcugcugagcgccggcgcccucaucgcccugaugcugaucaucuuccucaugacgugcugccggcgcgugaaccgguccgagagcacccagcgcucccucgggggcgccgggcgcaaggucagcaucaccucccagggcgggaaggugaucagcagcugggaguccuacaagagcggcggcgagacccggcuguga

SEQ ID NO: 95484 - RNA, 1575 nt, Artificial Sequence; identical to SEQ ID NO: 95362
  derived and/or modified CDS sequence (opt1) from glycoprotein__RABV__JX987749.1

SEQ ID NO: 95485 - RNA, 1575 nt, Artificial Sequence
  derived and/or modified CDS sequence (opt1) from glycoprotein__RABV__KC169986.1
augaucccccaggugcugcuguucgucccgcugcugguguucagcuccugcuucggcaaguuccccaucuacaccauccccgacaagcucgggcccuggagcccgaucgacauccaccaccuguccugccccaacaaccugguggucgaggacgagggcugcaccaaccucagcggguucuccuacauggagcugaaggugggcuacaucagcgccaucaaggugaacggguucacgugcaccggcgucgugaccgaggccgagaccuacacgaacuucgugggcuacgucaccaccaccuucaagcgcaagcacuuccggcccaugcccggggcgugccgcgccgccuacaacuggaagauggccggcgacccgcgguacgaggagucccugcacaaccccuaccccgacuaccacuggcuccgcacggugaagaccaccaaggagagccuggugaucaucucccagagcgucgccgaccuggaccccuacgacaagucccuccacagccggguguuccccgggggcaagugcuccgggaucaccgugagcuccacgugcugcagcaccaaccacgacuacaccaucuggaugccggagaacccccgccugggcaccuccugcgacaucuucacgaacagccggggcaagcgcgcguccaagggcgggaagaccugcggguucgucgacgagcggggccuguacaagagccucaagggcgccugcaagcugaagcugugcggggugcucggccugcgccugauggacgggaccuggguggccauccagaccagcgacgagaucaaguggugcucccccgaccagcucgucaaccugcacgacuuccacagcgacgagaucgagcaccuggugguggaggagcucgucaagaagcgggaggagugccuggacgcccuggagacgaucaugaccaccaaguccgugagcuuccgccggcucucccaccuccgcaagcuggugccgggcuucgggaaggcguacaccaucuucaacaagacgcucauggaggccgacgcccacuacaagagcauccggaccugggacgagaucauccccuccaagggcugccugcgcgucggcgggcggugccacccccacgugaacggcgucuucuucaacgggaucauccugggccccgacgggcacgugcucaucccggagaugcagagcucccugcugcaccagcacauggagcuccuggagagcuccgugaucccccugaugcacccccucgccgaccccagcgccgucuucaaggacggcgacgaggcggaggacuucguggaggugcaccucccggacguccacaagcagaucuccggcguggaccuggggcugcccaacuggggcaaguacgugcugaucagcgccggggcccugaccgccuccaugcucaugaucuuccugaugaccugcugccgcaaggccaaccgggcggagagcauccagcacaaccccggcgagacggggcgcaaggucuccgugaccagccacaacggccgggugaucuccagcugggagagcuacaaguccggcggggagaccaagcuguga

SEQ ID NO: 95486 - RNA, 1575 nt, Artificial Sequence
  derived and/or modified CDS sequence (opt1) from glycoprotein__RABV__KC171643.1
auggugccccaggcccugcuguucgucccccugcugguguucagcaugugcuucggcaaguuccccaucuacaccauccccgacaagcucgggcccugguccccgaucgacauccaccaccugagcugccccaacaaccugguggucgaggacgagggcugcaccaaccucuccggguucagcuacauggagcugaaggugggcuacaucuccgccaucaaggugaacggguucacgugcaccggcgucgugaccgaggcggagaccuacacgaacuucgugggcuacgucaccaccaccuucaagcgcaagcacuuccggcccacgcccgacgccugccgcgccgccuacaacuggaagauggccggggacccgcgguacgaggagagccugcacaaccccuaccccgacuaccacuggcuccgcaccgugaagaccaccaaggagucccuggugaucaucagccccuccgucgcggaccuggacccguacgacaagagccuccacucccggguguuccccaacggcaagugcagcgggaucacgaucuccagcaccuacugccccaccaaccacgacuacaccaucuggcugcccgagaacccgcgccugggcacguccugcgacaucuucaccaacagccgggggaagcgcgccuccaagggcagcaagaccugcggcuucguggacgagcgggggcucuacaagucccugaagggcgccugcaagcugaagcucugcgggguccugggccugcgccucauggacggcaccuggguggccaugcaggcgagcgacgagacgaaguggugcccgcccgaccagcuggugaaccugcacgacuuccggagcgacgagaucgagcaccucgucguggaggagcuggugaagaagcgcgaggagugccuggacgcccucgaguccaucaugaccaccaagagcgucuccuuccggcgccugagccaccuccggaagcucgugcccggguucggcaaggccuacaccaucuucaacaagacgcugauggaggccgacgcccacuacaaguccgugcgcaccuggaacgagaucauccccagcaaggggugccugcgggucggcgggcgcugccacccccacgugaacggcgucuucuucaacggcaucauccucgggcccgacggccacgugcugauccccgagaugcaguccagccugcuccagcagcacauggagcugcuggaguccagcguggucccgcucaugcacccccuggcggaccccuccaccgugcugaaggacggggacgaggccgagaacuucguggagguccaccuccccgacgugcacaagcagaucagcggcguggaccuggggcugccgaacuggggcaaguacguccucguguccgccggcgugcugaucgcccugaugcucaucaucuuccugaugaccugcugcgggcgggucaaccgccccaagagcacgcagcacaaccugggcgggaccggccggaagguguccgugaccccgcagagcgggaaggucaucuccagcugggaguccuacaagagcggcggcgggacccgccuguga

SEQ ID NO: 95487 - RNA, 1575 nt, Artificial Sequence; identical to SEQ ID NO: 94838
  derived and/or modified CDS sequence (opt1) from glycoprotein__RABV__KC171644.1

SEQ ID NO: 95488 - RNA, 1575 nt, Artificial Sequence; identical to SEQ ID NO: 94843
  derived and/or modified CDS sequence (opt1) from glycoprotein__RABV__KC171645.1

SEQ ID NO: 95489 - RNA, 1575 nt, Artificial Sequence
  derived and/or modified CDS sequence (opt1) from glycoprotein__RABV__KC252633.1
auggugccccugguccuccuguucgugccgcugcucguguucccccugugcagcggcaaguuccccaucuacaccauccccgacaagcuggggccguggucccccaucgacauccaccaccucagcugccccaacaaccuggucguggaggacgagggcugcgccaaccuguccggguucagcuacauggagcucaaggugggcuacaucuccgccaucaaggucaacggguucacgugcaccggcguggugaccgaggcggagaccuacaccaacuucgucggcuacgugacgaccaccuuccgccggaagcacuuccgccccaccccggacgccugccgggccgccuacaacuggaagauggccggggacccccgcuacgaggagagccugcacaaccccuaccccgacuaccacuggcugcggacggugaagaccaccaaggagucccucgucaucaucagcccguccguggcggaccuggaccccuacgacaagagccugcacucccgcguguuccccagcggcaagugcuccgggaucaccgucagcuccacguacugcagcaccaaccacgacuacaccaucuggaugcccgagaaccuccggcugggcaccuccugcgacaucuucacgaacagccgcgggaagcgggccuccaagggcagcaagaccugcggcuucguggacgagcgcgggcuguacaagagccucaagggcgccugcaagcugaagcugugcggggugcucggccugcggcugauggacggcaccugggucgccaugcagaccuccggggagacgaaguggugcccgcccgaccagcucgugaaccugcacgacuuccgcagcgacgagaucgagcaccugguggucgaggagcucgugaagaagcgggaggagugccuggacgcgcuggaguccaucaugaccaccaagagcguguccuuccgccggcucagccaccuccgcaagcugguccccggcuucgggaaggccuacaccaucuucaacaagacgcugauggaggccgacgcccacuacaaguccgugcggaccuggaacgagaucauccccagcaagggcugccugcgcgucgggggccggugccacccgcacgugaacggcguguucuucaacgggaucauccugggccccgacgggcacguccucauccccgagaugcaguccagccugcugcagcagcacauggagcuccuggaguccagcgugaucccccugaugcacccgcucgccgaccccuccaccguguucaaggacggcgacgaggcggaggacuucgucgaggugcaccuccccgacgugcacaagcaggucagcgggguggaccugggccugcccaacuggggcaaguacauccugcuguccgccggggcccucaucgcccugaugcugaugaucuuccugaugaccugcugccgcaaguucaaccggccggagagcacgcagcgcucccucggcgggaccggccgcaaggugagcaucaccucccagggcgggaaggucaucagcagcugggaguccuacaagagcggcggggagacccggcuguga

SEQ ID NO: 95490 - RNA, 1575 nt, Artificial Sequence
  derived and/or modified CDS sequence (opt1) from glycoprotein__RABV__KC737850.1
auggugccccaggcccugcuguucgucccgcugcuggccgugagcuucugcuucggcaaguuccccaucuacaccauccccgacaagcucgggcccugguccccgaucgacauccaccaccugagcugccccaacaaccugguggucgaggacgagggcugcaccaaccucuccggguucagcuacauggagcugaaggugggcuacaucuccgcgaucaaggugaacggguucacgugcaccggcgucgugaccgaggccgagaccuacacgaacuucgugggcuacgucaccaccaccuucaagcgcaagcacuuccggcccacgcccgacgccugccgcagcgccuacaacuggaagauggccggggacccgcgguacgaggagucccugcacaaccccuaccccgacuaccacuggcuccgcaccgugaagaccaccaaggagagccuggugaucaucucccccagcgucgcggaccuggacccguacgacaagucccuccacagccggguguuccccuccggcaagugcagcgggaucacgguguccagcaccuacugcuccaccaaccacgacuacaccaucuggcugcccgagaacccccgccugggcacgagcugcgacaucuucaccaacucccgggggaagcgcgccagcaagggcagcaagaccugcggcuucgucgacgagcgggggcucuacaagucccugaagggcgccugcaagcugaagcucugcggggugcugggccugcgccucauggacggcaccuggguggccaugcagacgagcgacgagaccaaguggugcccgcccgaccagcuggucaaccugcacgacuuccgguccgacgagaucgagcaccucgugguggaggagcuggucaagaagcgcgaggagugccuggacgcgcucgagagcaucaugaccaccaaguccgugagcuuccggcgccugucccaccuccggaagcucgugcccggguucggcaaggccuacacgaucuucaacaagacccugauggaggccgacgcccacuacaagagcguccgcaccuggaacgagaucauccccuccaaggggugccugcgggugggcgggcgcugccacccgcacgucaacggcguguucuucaacggcaucauccucgggcccgacggccacgugcugauccccgagaugcagagcucccugcuccagcagcacauggagcugcuggagagcuccgucaucccccucaugcacccgcuggccgaccccagcaccguguucaaggacggggacgaggcggaggacuucguggagguccaccuccccgacgugcacaagcaggucuccggcguggaccuggggcugcccaacuggggcaaguacgugcugacgagcgccggcgugcucaucgcccugaugcugaucaucuuccucaugaccugcugccggcgcgucaaccgguccgacagcacccagcgcucccuggggcgcaccggccggaaggugagcgugacgagccaguccgggaaggucaucagcuccugggagagcuacaaguccggcggggagacccgccuguga

SEQ ID NO: 95491 - RNA, 1575 nt, Artificial Sequence
  derived and/or modified CDS sequence (opt1) from glycoprotein__RABV__KC762941.1
augauccugcagauccuccuguucgugccccugcucgucuucagcuccugcuucggcaaguucccgaucuacaccauccccgacaagcuggggcccuggagccccaucgacauccaccaccuguccugcccgaacaaccucgugguggaggacgagggcugcaccaaccugagcggguucuccuacauggagcugaaggucggcuacaucagcgccaucaaggugaacggguucacgugcaccggcguggucaccgaggccgagaccuacacgaacuucgugggcuacgugaccaccaccuucaagcgcaagcacuuccaccccaugcccgacgcgugccgggccgccuacaacuggaagauggccggggacccccgcuacgaggagucccuccacaacccguaccccgacuaccacuggcugcggacggucaagaccaccaaggagagccuggugaucaucucccccagcguggccgaccucgaccccuacgacaagucccugcacagccgcgucuucccgggcgggaagugcuccggcaucaccgugagcuccacgugcugcagcaccaaccacgacuacaccaucuggaugcccgagaacccccggcuggggaccuccugcgacaucuucacgaacagccgcggcaagcgggcguccaagggcgggaagaccugcggcuucguggacgagcgcgggcucuacaagagccugaagggcgccugcaagaugaagcugugcggcguccucgggcugcggcugauggacggcaccuggguggccauccagaccagcgacgaggugaaguggugcucccccgaccagcucgucaaccugcacgacuuccacagcgacgagaucgagcaccuggugguggaggagcucgucaagaagcgcgaggagugccuggacgcccuggagacgaucaugaccaccaaguccgugagcuuccggcgccucucccaccuccggaagcuggugccgggguucggcaaggcguacaccaucuucaacaagacgcugauggaggccgacgcccacuacaagagcauccagaccuggaacgagaucauccccuccaaggggugccugcgcgucggcggccggugccacccccacgugaacggggucuucuucaacggcaucauccuggggcccgacggccacgugcucaucccggagaugcagagcucccugcugcaccagcacauggagcuccuggagagcuccgugaucccccugaugcacccccucgccgaccccagcaccgucuucaaggacggggacgaggccgaggacuucguggaggugcaccucccggagguccacaagcagaucuccggcguggaccugggccugcccaacugggggaaguacgugcugaucagcgcgggcgcccugaccgcccucaugcugaugaucuuccugaugacgugcugccgcaagaccaaccggcccgaguccauccagcacagccccggggagaccgagcgcaaggucuccgugaccagccacaacggccgggugaucuccagcugggagagcuacaaguccgggggcgagacgaagcucuga

SEQ ID NO: 95492 - RNA, 1575 nt, Artificial Sequence
  derived and/or modified CDS sequence (opt1) from glycoprotein__RABV__KC792172.1
auggugccccaggcccugcuguucgucccgcugcuggccuuccccaugugcuucggcaaguuccccaucuacaccauccccgacaagcucgggccguggagccccaucgacauccaccaccuguccugccccaacaaccuggugguggaggacgagggcugcaccaaccucagcggguucuccuacauggagcugaaggucggcuacaucagcgcgaucaaggugaacggguucacgugcaccggcguggucaccgaggccgagaccuacacgaacuucgugggcuacgugaccaccaccuucaagcgcaagcacuuccggcccacgccggacgccugccgcgccgccuacaacuggaagauggcgggggacccccgguacgaggagucccugcacaaccccuaccccgacuaccacuggcuccgcaccgucaagaccaccaaggagagccugaucaucaucuccccgagcguggccgaccuggaccccuacgacaagucccuccacagccggguguuccccuccggcaagugccuggggaucacgaucagcuccaccuacugcagcaccaaccacgacuacaccaucuggaugcccgagaacguccgccugggcacguccugcgacaucuucaccaacagccgggggaagaaggccuccaagggcagcaagaccugcggcuucguggacgagcgcgggcucuacaagucccugaagggcgccugcaagcugaagcucugcggggugcugggccugcggcucauggacggcaccugggucgcgaugccgacgagcgacgagaccaaguggugcccgcccgaccagcuggugaaccugcacgacuuccgcagcgacgagaucgagcaccucguggucgaggagcuggugcggaagcgcgaggagugccuggacgcccucgaguccaucaugaccaccaagagcguguccuuccggcgccugagccaccuccggaagcucguccccggguucggcaaggccuacacgaucuucaacaagacccugauggaggccgacgcccacuacaaguccgugcgcaccuggaacgagaucauccccagcaaggggugccugcgggugggcgggcgcugccacccccacgucaacggcguguucuucaacggcaucauccucgggcccgacggccacguccugauccccgagaugcaguccagccugcuccagcagcacauggagcugcuggaguccagcgugaucccgcucaugcacccccuggcggaccccuccaccguguucaaggacggggacgaggccgaggacuucgucgaggugcaccuccccgacgugcacaagcagaucagcggcgucgaccuggggcugccgaacuggggcaaguacgugcugaucaucgccggcgugcucaucgccaugauccugacgaucuuccugaugaccugcugcgggcggggcaaccgccccaaguccacccagcacagccucgggggcaucgggcggaaggucuccagcaccucccagagcggcaaggugaucuccagcugggagagcuacaaguccggcggggagacgcgccuguga

SEQ ID NO: 95493 - RNA, 1575 nt, Artificial Sequence
  derived and/or modified CDS sequence (opt1) from glycoprotein__RABV__KC792173.1
auggugccgcaggcccugcuguucgucccgcugcuggccuuccccaugugcuucggcaaguuccccaucuacaccauccccgacaagcucgggccguggagccccaucgacauccaccaccuguccugccccaacaaccuggugguggaggacgagggcugcaccaaccucagcggguucuccuacauggagcugaaggucggcuacaucagcgcgaucaaggugaacggguucacgugcaccggcguggucaccgaggccgagaccuacacgaacuucgugggcuacgugaccaccaccuucaagcgcaagcacuuccggcccacgccggacgccugccgcgccgccuacaacuggaagauggcgggggacccccgguacgaggagucccugcacaaccccuaccccgacuaccacuggcuccgcaccgucaagaccaccaaggagagccugaucaucaucuccccgagcguggccgaccuggaccccuacgacaagucccuccacagccggguguuccccuccggcaagugccuggggaucacgaucagcuccaccuacugcagcaccaaccacgacuacaccaucuggaugcccgagaaccugcgccucggcacguccugcgacaucuucaccaacagccgggggaagcgcgccuccaagggcagcaagaccugcggcuucgucgacgagcgggggcuguacaagucccugaagggcagcugcaagcucaagcugugcggggugcugggccuccgccugauggacggcaccuggguggccaugcagacgagcgacgagaccaaguggugcccgcccgaccagcuggucaaccuccacgacuuccgguccgacgagaucgagcaccuggugguggaggagcuggucaagaagcgcgaggagugccucgacgcgcuggagagcaucaugaccaccaaguccgugagcuuccggcgccugucccaccuccggaagcuggugcccggguucggcaaggccuacacgaucuucaacaagacccugauggaggccgacgcccacuacaagagcguccgcaccuggaacgagaucauccccuccaaggggugccuccgggugggcgggcgcugccacccgcacgugaacggcgucuucuucaacggcaucauccuggggcccgacggccacgugcugauccccgagaugcagagcucccuccugcagcagcacauggagcugcucgagagcuccgucaucccccugaugcacccgcuggccgaccccagcaccguguucaaggacggggacgaggcggaggacuucguggagguccaccuccccgacgugcacaagcagaucuccggcguggaccuggggcugcccaacuggggcaaguacguccucaucaucgccggcgugcugaucgccaugauccugacgauccuccugaugaccugcugcgggcggggcaaccgccccaagagcacccagcacucccucgggggcaucgggcggaaggugagcgccaccucccagagcggcaaggucaucuccagcugggagagcuacaaguccggcggggagacgcgccuguga

SEQ ID NO: 95494 - RNA, 1575 nt, Artificial Sequence
  derived and/or modified CDS sequence (opt1) from glycoprotein__RABV__KC792174.1
auggugccgcaggcccugcuguucgucccgcugcuggccuuccccaugugcuucggcaaguuccccaucuacaccauccccgacaagcucgggccguggagccccaucgacauccaccaccuguccugccccaacaaccuggugguggaggacgagggcugcaccaaccucagcggguucuccuacauggagcugaaggucggcuacaucagcgcgaucaaggugaacggguucacgugcaccggcguggucaccgaggccgagaccuacacgaacuucgugggcuacgugaccaccaccuucaagcgcaagcacuuccggcccacgccggacgccugccgcgccgccuacaacuggaagauggcgggggacccccgguacgaggagucccugcacaaccccuaccccgacuaccacuggcuccgcaccgucaagaccaccaaggagagccugaucaucaucuccccgagcguggccgaccuggaccccuacgacaagucccuccacagccggguguuccccuccggcaagugccuggggaucacgaucagcuccaccuacugcagcaccaaccacgacuacaccaucuggaugcccgagaaccugcgccucggcacguccugcgacaucuucaccaacagccgggggaagcgcgccuccaagggcagcaagaccugcggcuucgucgacgagcgggggcuguacaagucccugaagggcagcugcaagcucaagcugugcggggugcugggccuccgccugauggacggcaccuggguggccaugcagacgagcgacgagaccaaguggugcccgcccgaccagcuggucaaccuccacgacuuccgguccgacgagaucgagcaccuggugguggaggagcugguccgcaagcgggaggagugccucgacgcgcuggagagcaucaugaccaccaaguccgugagcuuccgccggcugucccaccuccgcaagcuggugcccggguucggcaaggccuacacgaucuucaacaagacccugauggaggccgacgcccacuacaagagcguccggaccuggaacgagaucauccccuccaaggggugccuccgcgugggcgggcggugccacccgcacgugaacggcgucuucuucaacggcaucauccuggggcccgacggccacgugcugauccccgagaugcagagcucccuccugcagcagcacauggagcugcucgagagcuccgucaucccccugaugcacccgcuggccgaccccagcaccguguucaaggacggggacgaggcggaggacuucguggagguccaccuccccgacgugcacaagcagaucuccggcguggaccuggggcugcccaacuggggcaaguacguccucaucaucgccggcgugcugaucgccaugauccugacgaucuuccucaugaccugcugcgggcgcggcaaccggcccaagagcacccagcacucccucgggggcaucgggcgcaaggugagcgccaccucccagagcggcaaggucaucuccagcugggagagcuacaaguccggcggggagacgcgccuguga

SEQ ID NO: 95495 - RNA, 1575 nt, Artificial Sequence
  derived and/or modified CDS sequence (opt1) from glycoprotein__RABV__KC792175.1
auggugccgcaggcccuccuguucgucccgcugcuggccuuccccaugugcuucggcaaguuccccaucuacaccauccccgacaagcucgggccguggagccccaucgacauccaccaccuguccugccccaacaaccuggugguggaggacgagggcugcaccaaccucagcggguucuccuacauggagcugaaggucggcuacaucagcgcgaucaaggugaacggguucacgugcaccggcguggucaccgaggccgagaccuacacgaacuucgugggcuacgugaccaccaccuucaagcgcaagcacuuccggcccacgccggacgccugccgcgccgccuacaacuggaagauggcgggggacccccgguacgaggagucccugcacaaccccuaccccgacuaccacuggcuccgcaccgucaagaccaccaaggagagccugaucaucaucuccccgagcguggccgaccuggaccccuacgacaagucccuccacagccggguguuccccuccggcaagugccuggggaucacgaucagcuccaccuacugcagcaccaaccacgacuacaccaucuggaugcccgagaaccugcgccucggcacguccugcgacaucuucaccaacagccgggggaagcgcgccuccaagggcagcaagaccugcggcuucgucgacgagcgggggcuguacaagucccugaagggcagcugcaagcucaagcugugcggggugcugggccuccgccugauggacggcaccuggguggccaugcagacgagcgacgagaccaaguggugcccgcccgaccagcuggucaaccuccacgacuuccgguccgacgagaucgagcaccuggugguggaggagcuggucaagaagcgcgaggagugccucgacgcgcuggagagcaucaugaccaccaaguccgugagcuuccggcgccugucccaccuccggaagcuggugcccggguucggcaaggccuacacgaucuucaacaagacccugauggaggccgacgcccacuacaagagcguccgcaccuggaacgagaucauccccuccaaggggugccuccgggugggcgggcgcugccacccgcacgugaacggcgucuucuucaacggcaucauccuggggcccgacggccacgugcugauccccgagaugcagagcucccuccugcagcagcacauggagcugcucgagagcuccgucaucccccugaugcacccgcuggccgaccccagcaccguguucaaggacggggacgaggcggaggacuucguggagguccaccuccccgacgugcacaagcagaucuccggcguggaccuggggcugcccaacuggggcaaguacguccucaucaucgccggcgugcugaucgccaugauccugacgaucuuccucaugaccugcugccggcgcgggaaccggcccaagagcacccagcacucccugggcgggaucggccgcaaggugagcgccaccucccagagcgggaaggucaucuccagcugggagagcuacaaguccggcggcgagacgcgccuguga

SEQ ID NO: 95496 - RNA, 1575 nt, Artificial Sequence
  derived and/or modified CDS sequence (opt1) from glycoprotein__RABV__KC792176.1
auggugccccaggcccugcuguucgucccgcugcuggccuuccccaugugcuucggcaaguuccccaucuacaccauccccgacaagcucgggccguggagccccaucgacauccaccaccuguccugccccaacaaccuggugguggaggacgagggcugcaccaaccucagcggguucuccuacauggagcugaaggucggcuacaucagcgcgaucaaggugaacggguucacgugcaccggcguggucaccgaggccgagaccuacacgaacuucgugggcuacgugaccaccaccuucaagcgcaagcacuuccggcccacgccggacgccugccgcgccgccuacaacuggaagauggcgggggacccccgguacgaggagucccugcacaaccccuaccccgacuaccacuggcuccgcaccgucaagaccaccaaggagagccugaucaucaucuccccgagcguggccgaccuggaccccuacgacaagucccuccacagcaagguguuccccuccggcaagugccuggggaucacgaucagcuccaccuacugcagcaccaaccacgacuacaccaucuggaugcccgagaacguccggcugggcacguccugcgacaucuucaccaacagccgcgggaagcgggccuccaagggcagcaagaccugcggcuucguggacgagcgcgggcucuacaagucccugaagggcgccugcaagcugaagcucugcggggugcugggccugcggcucauggacggcaccugggucgcgaugccgacgagcgacgagaccaaguggugcccgcccgaccagcuggugaaccugcacgacuuccgcagcgacgagaucgagcacaucguggucgaggagcucgugcggaagcgcgaggagugccuggacgcccuggaguccaucaugaccaccaagagcguguccuuccggcgccucagccaccuccggaagcugguccccggguucggcaaggccuacacgaucuucaacaagacccucauggaggccgacgcccacuacaaguccgugcgcaccuggaacgagaucauccccagcaaggggugccugcgggugggcgggcgcugccacccccacgucaacggcguguucuucaacggcaucauccuggggcccgacggccacguccucauccccgagaugcaguccagccugcugcagcagcacauggagcuccuggaguccagcgugaucccgcugaugcacccccucgcggaccccuccaccguguucaaggacggggacgaggccgaggacuucgucgaggugcaccuccccgacgugcacaagcagaucagcggcgucgaccuggggcugccgaacuggggcaaguacgugcugaucaucgccggcgugcugaucgccaugauccucacgaucuuccugaugaccugcugcgggcggggcaaccgccccaaguccacccagcacagccucgggggcaucgggcggaaggucuccagcaccucccagagcggcaaggugaucuccagcugggagagcuacaaguccggcggggagacgcgccuguga

SEQ ID NO: 95497 - RNA, 1575 nt, Artificial Sequence
  derived and/or modified CDS sequence (opt1) from glycoprotein__RABV__KC792177.1
auggugccccaggcccugcuguucgucccgcugcuggccuuccccaugugcuucggcaaguuccccaucuacaccauccccgacaagcucgggccguggagccccaucgacauccaccaccuguccugccccaacaaccuggugguggaggacgagggcugcaccaaccucagcggguucuccuacauggagcugaaggucggcuacaucagcgcgaucaaggugaacggguucacgugcaccggcguggucaccgaggccgagaccuacacgaacuucgugggcuacgugaccaccaccuucaagcgcaagcacuuccggcccacgccggacgccugccgcgccgccuacaacuggaagauggcgggggacccccgguacgaggagucccugcacaaccccuaccccgacuaccacuggcuccgcaccgucaagaccaccaaggagagccugaucaucaucuccccgagcguggccgaccuggaccccuacgacaagucccuccacagccggguguuccccuccggcaagugccuggggaucacgaucagcuccaccuacugcagcaccaaccacgacuacaccaucuggaugcccgagaacguccgccugggcacguccugcgacaucuucaccaacagccgggggaagcgcgccuccaagggcagcaagaccugcggcuucguggacgagcgggggcucuacaagucccugaagggcgccugcaagcugaagcucugcggggugcugggccugcgccucauggacggcaccugggucgcgaugccgacgagcgacgagaccaaguggugcccgcccgaccagcuggugaaccugcacgacuuccggagcgacgagaucgagcaccucguggucgaggagcuggugcgcaagcgggaggagugccuggacgcccucgaguccaucaugaccaccaagagcguguccuuccgccggcugagccaccuccgcaagcucguccccggguucggcaaggccuacacgaucuucaacaagacccugauggaggccgacgcccacuacaaguccgugcggaccuggaacgagaucauccccagcaaggggugccugcgcgugggcgggcggugccacccccacgucaacggcguguucuucaacggcaucauccucgggcccgacggccacguccugauccccgagaugcaguccagccugcuccagcagcacauggagcugcuggaguccagcgugaucccgcucaugcacccccuggcggaccccuccaccguguucaaggacggggacgaggccgaggacuucgucgaggugcaccuccccgacgugcacaagcagaucagcggcgucgaccuggggcugccgaacuggggcaaguacgugcugaucaucgccggcgugcucaucgccaugauccugacgaucuuccugaugaccugcugcgggcgcggcaaccagccccgguccacccagcacagccucgggggcaucgggcgcaaggucuccagcaccucccagagcggcaaggugaucuccagcugggagagcuacaaguccggcggggagacgcgccuguga

SEQ ID NO: 95498 - RNA, 1575 nt, Artificial Sequence
  derived and/or modified CDS sequence (opt1) from glycoprotein__RABV__KC792178.1
auggugccccaggcccugcuguucgucccgcugcuggccuuccccaugugcuucggcaaguuccccaucuacaccauccccgacaagcucgggccguggagccccaucgacauccaccaccuguccugccccaacaaccuggugguggaggacgagggcugcaccaaccucagcggguucuccuacauggagcugaaggucggcuacaucagcgcgaucaaggugaacggguucacgugcaccggcguggucaccgaggccgagaccuacacgaacuucgugggcuacgugaccaccaccuucaagcgcaagcacuuccggcccacgccggacgccugccgcgccgccuacaacuggaagauggcgggggacccccgguacgaggagucccugcacaaccccuaccccgacuaccacuggcuccgcaccgucaagaccaccaaggagagccugaucaucaucuccccgagcguggccgaccuggaccccuacgacaagucccuccacagccggguguuccccuccggcaagugccuggggaucacgaucagcuccaccuacugcagcaccaaccacgacuacaccaucuggaugcccgagaacguccgccugggcacguccugcgacaucuucaccaacagccgggggaagcgcgccuccaagggcagcaagaccugcggcuucguggacgagcgggggcucuacaagucccugaagggcgccugcaagcugaagcucugcggggugcugggccugcgccucauggacggcaccugggucgcgaugccgacgagcgacgagaccaaguggugcccgcccgaccagcuggugaaccugcacgacuuccggagcgacgagaucgagcaccucguggucgaggagcuggugcgcaagcgggaggagugccuggacgcccucgaguccaucaugaccaccaagagcguguccuuccgccggcugagccaccuccgcaagcucguccccggguucggcaaggccuacacgaucuucaacaagacccugauggaggccgacgcccacuacaaguccgugcggaccuggaacgagaucauccccagcaaggggugccugcgcgugggcgggcggugccacccccacgucaacggcguguucuucaacggcaucauccucgggcccgacggccacguccugauccccgagaugcaguccagccugcuccagcagcacauggagcugcuggaguccagcgugaucccgcucaugcacccccuggcggaccccuccaccguguucaaggacggggacgaggccgaggacuucgucgaggugcaccuccccgacgugcacaagcagaucagcggcgucgaccuggggcugccgaacuggggcaaguacgugcugaucaucgccggcgugcucaucgccaugauccugacgaucuuccugaugaccugcugcgggcgcggcaaccggcccaaguccacccagcacagccucgggggcaucgggcgcaaggucuccagcaccucccagagcggcaaggugaucuccagcugggagagcuacaaguccggcggggagacgcgccuguga

SEQ ID NO: 95499 - RNA, 1575 nt, Artificial Sequence
  derived and/or modified CDS sequence (opt1) from glycoprotein__RABV__KC792179.1
auggugccccaggcccugcuguucgucccgcugcuggccuuccccaugugcuucggcaaguuccccaucuacaccauccccgacaagcucgggccguggagccccaucgacauccaccaccuguccugccccaacaaccuggugguggaggacgagggcugcaccaaccucagcggguucuccuacauggagcugaaggucggcuacaucagcgcgaucaaggugaacggguucacgugcaccggcguggucaccgaggccgagaccuacacgaacuucgugggcuacgugaccaccaccuuccgccggaagcacuuccgccccacgccggacgccugccgggccgccuacaacuggaagaucgcgggggacccccgcuacgaggagucccugcacaaccccuaccccgacuaccacuggcuccggaccgucaagaccaccaaggagagccugaucaucaucuccccgagcguggccgaccuggaccccuacgacaagucccuccacagccgcguguuccccuccggcaagugccuggggaucacgaucagcuccaccuacugcagcaccaaccacgacuacaccaucuggaugcccgagaaccugcggcucggcacguccugcgacaucuucaccaacagccgcgggaagcgggccuccaagggcagccggaccugcggcuucgucgacgagcgcgggcuguacaagucccugaagggcgccugcaagcucaagcugugcggggugcugggccuccgccugauggacggcaccuggguggcgaugcagacgagcgacgagaccaaguggugcccgcccgaccagcuggucaaccuccacgacuuccggagcgacgagaucgagcaccuggugguggaggagcuggucaagaagcgcgaggagugccucgacgcccuggaguccaucaugaccaccaagagcguguccuuccggcgccugagccaccuccggaagcuggugcccggguucggcaaggccuacacgaucuucaacaagacccugauggaggccgacgcccacuacaaguccguccgcaccuggaacgagaucauccccagcaaggggugccuccgggugggcgggcgcugccacccgcacgugaacggcgucuucuucaacggcaucauccuggggcccgacggccacgugcugauccccgagaugcaguccagccuccugcagcagcacauggagcugcucgaguccagcgucaucccccugaugcacccgcuggcggaccccuccaccguguucaaggacggggacgaggccgaggacuucguggagguccaccuccccgacgugcacaagcagaucagcggcguggaccuggggcugcccaacuggggcaaguacguccucaucaucgccggcgugcugaucgccaugauccugacgaucuuccucaugaccugcugcgggcggggcaaccgcccgaaguccacccagcacagccucgggggcaucgggcgcaagguguccgccaccagccaguccggcaaggucaucagcuccugggagagcuacaagaacggcggggagacgcggcuguga

SEQ ID NO: 95500 - RNA, 1575 nt, Artificial Sequence; identical to SEQ ID NO: 95496
  derived and/or modified CDS sequence (opt1) from glycoprotein__RABV__KC792180.1

SEQ ID NO: 95501 - RNA, 1575 nt, Artificial Sequence; identical to SEQ ID NO: 95498
  derived and/or modified CDS sequence (opt1) from glycoprotein__RABV__KC792181.1

SEQ ID NO: 95502 - RNA, 1575 nt, Artificial Sequence; identical to SEQ ID NO: 95499
  derived and/or modified CDS sequence (opt1) from glycoprotein__RABV__KC792182.1

SEQ ID NO: 95503 - RNA, 1575 nt, Artificial Sequence; identical to SEQ ID NO: 95498
  derived and/or modified CDS sequence (opt1) from glycoprotein__RABV__KC792183.1

SEQ ID NO: 95504 - RNA, 1575 nt, Artificial Sequence; identical to SEQ ID NO: 95493
  derived and/or modified CDS sequence (opt1) from glycoprotein__RABV__KC792184.1

SEQ ID NO: 95505 - RNA, 1575 nt, Artificial Sequence
  derived and/or modified CDS sequence (opt1) from glycoprotein__RABV__KC792185.1
auggugccgcaggcccugcuguucgucccgcugcuggccuuccccaugugcuucggcaaguuccccaucuacaccauccccgacaagcucgggccguggagccccaucgacauccaccaccuguccugccccaacaaccuggugguggaggacgagggcugcaccaaccucagcggguucuccuacauggagcugaaggucggcuacaucagcgcgaucaaggugaacggguucacgugcaccggcguggucaccgaggccgagaccuacacgaacuucgugggcuacgugaccaccaccuucaagcgcaagcacuuccggcccacgccggacgccugccgcgccgccuacaacuggaagauggcgggggacccccgguacgaggagucccugcacaaccccuaccccgacuaccacuggcuccgcaccgucaagaccaccaaggagagccugaucaucaucuccccgagcguggccgaccuggaccccuacgacaagucccuccacagccggguguuccccuccggcaagugccuggggaucacgaucagcuccaccuacugcagcaccaaccacgacuacaccaucuggaugcccgagaaccugcgccucggcacguccugcgacaucuucaccaacagccgggggaagcgcgccuccaagggcagcaagaccugcggcuucgucgacgagcgggggcuguacaagucccugaagggcagcugcaagcucaagcugugcggggugcugggccuccgccugauggacggcaccuggguggccaugcagacgagcgacgagaccaaguggugcccgcccgaccagcuggucaaccuccacgacuuccgguccgacgagaucgagcaccuggugguggaggagcuggucaagaagcgcgaggagugccucgacgcgcuggagagcaucaugaccaccaaguccgugagcuuccggcgccugucccaccuccggaagcuggugcccggguucggcaaggccuacacgaucuucaacaagacccugauggaggccgacgcccacuacaagagcguccgcaccuggaacgagaucauccccuccaaggggugccuccgggugggcgggcgcugccacccgcacgugaacggcgucuucuucaacggcaucauccuggggcccgacggccacgugcugauccccgagaugcagagcucccuccugcagcagcacauggagcugcucgagagcuccgucaucccccugaugcacccgcuggccgaccccagcaccguguucaaggacggggacgaggcggaggacuucguggagguccaccuccccgacgugcacaagcagaucuccggcguggaccuggggcugcccaacuggggcaaguacguccucaucaucgccggcgugcugaucgccaugauccugacgaucuuccucaugaccugcugcgggcggggcaaccgccccaagagcacccagcacucccucgggggcaucgggcggaaggugagcgccaccucccagagcggcaaggucaucuccagcugggagagcuacaaguccggcggggagacgcgccuguga

SEQ ID NO: 95506 - RNA, 1575 nt, Artificial Sequence; identical to SEQ ID NO: 95498
  derived and/or modified CDS sequence (opt1) from glycoprotein__RABV__KC792186.1

SEQ ID NO: 95507 - RNA, 1575 nt, Artificial Sequence; identical to SEQ ID NO: 95499
  derived and/or modified CDS sequence (opt1) from glycoprotein__RABV__KC792187.1

SEQ ID NO: 95508 - RNA, 1575 nt, Artificial Sequence
  derived and/or modified CDS sequence (opt1) from glycoprotein__RABV__KC792188.1
auggugccccaggcccugcuguucgucccgcugcuggccuuccccaugugcuucggcaaguuccccaucuacaccauccccgacaagcucgggccguggagccccaucgacauccaccaccuguccugccccaacaaccuggugguggaggacgagggcugcaccaaccucagcggguucuccuacauggagcugaaggucggcuacaucagcgcgaucaaggugaacggguucacgugcaccggcguggucaccgaggccgagaccuacacgaacuucgugggcuacgugaccaccaccuucaagcgcaagcacuuccggcccacgccggacgccugccgcgccgccuacaacuggaagauggcgggggacccccgguacgaggagucccugcacaaccccuaccccgacuaccacuggcuccgcaccgucaagaccaccaaggagagccugaucaucaucuccccgagcguggccgaccuggaccccuacgacaagucccuccacagccggguguuccccuccggcaagugccuggggaucacgaucagcuccaccuacugcagcaccaaccacgacuacaccaucuggaugcccgagaacguccgccugggcacguccugcgacaucuucaccaacagccgggggaagcgcgccuccaagggcagcaagaccugcggcuucguggacgagcgggggcucuacaagucccugaagggcgccugcaagcugaagcucugcggggugcugggccugcgccucauggacggcaccugggucgcgaugccgacgagcgacgagaccaaguggugcccgcccgaccagcuggugaaccugcacgacuuccggagcgacgagaucgagcaccucguggucgaggagcuggugcgcaagcgggaggagugccuggacgcccucgaguccaucaugaccaccaagagcguguccuuccgccggcugagccaccuccgcaagcucguccccggguucggcaaggccuacacgaucuucaacaagacccugauggaggccgacgcccacuacaaguccgugcggaccuggagcgagaucauccccuccaaggggugccugcgcgugggcgggcggugccacccccacgucaacggcguguucuucaacggcaucauccucgggcccgacggccacguccugauccccgagaugcagagcucccugcuccagcagcacauggagcugcuggagagcuccgugaucccgcucaugcacccccuggcggaccccagcaccguguucaaggacggggacgaggccgaggacuucgucgaggugcaccuccccgacgugcacaagcagaucuccggcgucgaccuggggcugccgaacuggggcaaguacgugcugaucaucgccggcgugcucaucgccaugauccugacgaucuuccugaugaccugcugcgggcgcggcaaccggcccaagagcacccagcacucccucgggggcaucgggcgcaaggucagcuccaccagccaguccggcaaggugaucagcagcugggaguccuacaagagcggcggggagacgcgccuguga

SEQ ID NO: 95509 - RNA, 1575 nt, Artificial Sequence
  derived and/or modified CDS sequence (opt1) from glycoprotein__RABV__KC977995.1
augaucccccaggugcugcuguucgucccgcugcugguguucagcuccugcuucggcaaguuccccaucuacaccauccccgacaagcucgggcccuggagcccgaucgacauccaccaccuguccugccccaacaaccugguggucgaggacgagggcugcaccaaccucagcggguucuccuacauggagcugaaggugggcuacaucagcgccaucaaggugaacggguucacgugcaccggcgucgugaccgaggccgagaccuacacgaacuucgugggcuacgucaccaccaccuucaagcgcaagcacuuccggcccaugcccgacgcgugccgcgccgccuacaacuggaagauggccggggacccgcgguacgaggagucccugcacaaccccuaccccgacuaccacuggcuccgcacggugaagaccaccaaggagagccuggugaucaucucccccagcgucgccgaccuggacccguacgacaagucccuccacagccggguguuccccggcgggaagugcuccggcaucaccgugagcuccacgugcugcagcaccaaccacgacuacaccaucuggaugcccgagaacccccgccuggggaccuccugcgacaucuucacgaacagccggggcaagcgcgcguccaagggcgggaagaccugcggcuucgucgacgagcgggggcuguacaagagccuccgcggcgccugcaagcugaagcugugcggcgugcucgggcugcggcugauggacggcaccuggguggccauccagaccagcgacgagaucaaguggugcuccccggaccagcucgucaaccugcacgacuuccacagcgacgagaucgagcaccuggugguggaggagcucgucaagaagcgcgaggagugccuggacgcccuggagacgaucaugaccaccaaguccgugagcuuccggcgccucucccaccuccggaagcuggugcccggguucggcaaggcguacaccaucuucaacaagacgcucauggaggccgacgcccacuacaagagcauccgcaccuggaacgagaucauccccuccaaggggugccugcgggucggcggccgcugccacccccacgugaacggggucuucuucaacggcaucauccuggggccggacggccacgugcucauccccgagaugcagagcucccugcugcaccagcacauggagcuccuggagagcuccgugaucccccugaugcacccccucgccgacccgagcaccgucuucaaggacggggacgaggccgaggacuucguggaggugcaccuccccgacguccacaagcagaucuccggcguggaccugggccugcccaacugggggaaguacgugcugaucagcgcgggcgcccugaccgcccucaugcugaugaucuuccugaugacgugcugccggaagaccaaccgcgccgaguccauccagcacagccccggggagaccggccggaaggucuccgugaccagccacaacgggcgcgugacguccagcugggagagcuacaaguccggcagcgagaccaagcucuga

SEQ ID NO: 95510 - RNA, 1575 nt, Artificial Sequence
  derived and/or modified CDS sequence (opt1) from glycoprotein__RABV__KF154996.1
auggugccgcagguccugcuguucgugccgcugcugguguucagcaugugcuucggcaaguuccccaucuacaccauccccgacaagcucgggcccugguccccgaucgacauccaccaccugagcugccccaacaaccuggucguggaggacgagggcugcaccaaccucuccggguucagcuacauggagcugaaggugggcuacacguccgccaucaaggucaacggguucacgugcaccggcguggugaccgaggccgagaccuacaccaacuucgucggcuacgugaccaccacguucaagcgcaagcacuuccggcccacccccgacgcgugccgcgccgccuacaacuggaagauggccggggacccgcgguacgaggagagccugcacaaccccuaccccgacuaccacuggcuccgcaccgugaagaccacgaaggagucccuggucaucaucagccccuccguggccgaccuggacccguacgacaagagccuccacucccggguguuccccagcggcaagugcuccgggaucaccaucagcuccaccuacugcagcaccaaccacgacuacacgaucuggaugcccgagaacccccgccugggcaccuccugcgacaucuucaccaacagccgggggaagcgcgcguccaagggcggcaagaccugcggguucgucgacgagcggggccuguacaagagccucaagggggccugcaagcugaagcugugcggcgugcucggccugcgccugauggacgggacguggguggccaugcagaccagcgacgagaccaaguggugcccgcccgaccagcucgucaaccugcacgacuuccgguccgacgagaucgagcaccuggugguggaggagcucgucaagaagcgcgaggagugccuggacgcccuggagagcaucaugaccacgaaguccgugagcuuccggcgccucucccaccuccggaagcuggugcccggcuucgggaaggcguacaccaucuucaacaagacccucauggaggccgacgcccacuacaagagcguccgcaccuggaacgagaucauccccuccaagggcugccugcgggucgggggccgcugccacccgcacgugaagggcguguucuucaacgggaucauccugggccccgacgggcacgugcucauccccgagaugcagagcucccugcugcagcagcacauggagcuccuggagagcuccgucaucccccugaugcacccgcucgccgaccccagcacgguguucaaggacggcgacgaggccgaggacuucguggagguccaccuccccgacgugcacaagcagaucuccgggguggaccugggccugcccagcuggggccgguacguccugguguccgcgggggugcuggucgugcucaugcugaccauccugaucaucacgugcugcggccgcgugcaccggcccaagagcacccagcacgggcucggcgggaccggccgcaaggucuccgugaccagccaguccggcaaggugaucagcagcugggaguccuacaagagcgggggcgagacccgccuguga

SEQ ID NO: 95511 - RNA, 1575 nt, Artificial Sequence
  derived and/or modified CDS sequence (opt1) from glycoprotein__RABV__KF154997.1
auggugccccaggcccugcuccuggucccgcugcucggcuucagccugugcuucgggaaguuccccaucuacaccauccccgacaagcugggccccugguccccgaucgacauccaccaccucagcugccccaacaaccuggugguggaggacgaggggugcaccaaccuguccggcuucagcuacauggagcucaaggucggguacaucuccagcaucaaggugaacggcuucacgugcaccggcguggucaccgaggccgagaccuacacgaacuucgugggguacgugaccaccaccuuccgccggaagcacuuccgccccacgcccgacgcgugccgggccgccuacaacuggaagauggccggcgacccgcgcuacgaggagucccugcacaaccccuaccccgacuaccacuggcugcggaccgucaagaccaccaaggagagccucgugaucaucucccccagcguggccgaccuggacccguacgacaagucccugcacagccgcgucuuccccuccgggaagugcagcggcaucacgguguccagcaccuacugcuccaccaaccacgacuacaccaucuggaugcccgagaaccuccggcuggggacgagcugcgacaucuucaccaacucccgcggcaagcgggcgagcaagggcagcaagaccugcggguucguggacgagcgcggccuguacaagucccucaagggggccugcaagcugaagcugugcggcguccucggccugcggcugauggacgggaccuggguggccaugcagacgagcgacgagaccaaguggugcccgcccgaccagcucgugaaccugcacgacuuccgcuccgacgagaucgagcaccuggucguggaggagcucgugaagaagcgggaggagugccuggacgcccuggagagcaucaugaccaccaaguccgucagcuuccgccggcucucccaccuccgcaagcuggugcccggcuucgggaaggcguacacgaucuucaacaagacccugauggaggccgacgcccacuacaagagcgugcggaccuggaacgaggucauccccucccgcggcugccugcgggucgggggccgcugccacccccacgugaacggcguguucuucaacgggaucauccugggcccggacgggcacgugcucauccccgagaugcagagcucccugcugcagcagcacaucgagcuccuggagagcuccgucaucccccugaugcacccccucgccgacccgagcaccguguucaaggacggcgacgaggccgaggacuucguggagguccaccuccccgacgugcacaagcaggucuccgggguggaccugggccugcccaacuggggcaaguacgugcugcugagcgcgggggcccucaucgcccugaugcugaucguguuccugaucacgugcugccggcgcgucaaccgccccgaguccacccagcggagccuccgcggcgccgggcggaagguguccaucaccagccagagcggcaaggugaucuccagcugggaguccuacaagagcgggggcgagacccgccuguga

SEQ ID NO: 95512 - RNA, 1575 nt, Artificial Sequence
  derived and/or modified CDS sequence (opt1) from glycoprotein__RABV__KF154998.1
auggugccccaggcccugcuguucgucccgcugcuggccuucagccucugcuucggcaaguuccccaucuacaccauccccgacaagcuggggcccugguccccgaucgacauccaccaccugagcugccccaacaaccucgugguggaggacgagggcugcaccaaccuguccgaguucagcuacauggagcugaagaugggguacaucuccgcgaucaaggucaacggcuucacgugcaccgggguggugaccgaggccgagaccuacacgaacuucgucggcuacgugaccaccaccuucaagcgcaagcacuuccggcccacgcccgacgccugccgcgccgccuacaacuggaagauggcgggcgacccgcgguacgaggagagccuccacaaccccuaccccgacuaccacuggcugcgcaccgugaagaccaccaaggagucccugaucaucaucagccccuccgucgccgaccucgacccguacgacaagagccugcacucccggguguuccccagcgggaagugcuccggcaucacggugagcuccaccuacugcagcaccaaccacgacuacaccaucuggaugcccgagaacccccgcccggggacguccugcgacaucuucgccagcucccggggcaagcgcgccagcaagggcgggaagaccugcggcuucgucgacgagcgggggcuguacaagagccucaagggcgcgugcaagcugaagcugugcggggugcucggccugcgccugauggacggcaccuggguggccaugcagaccuccgacgagacgaaguggugcccgcccgaccagcucgucaaccugcacgacuuccggagcgacgagaucgagcaccuggugguggaggagcucgucaagaagcgcgaggagugccuggacgcccuggaguccaucaugaccaccaagagcguguccuuccggcgccucagccaccuccggaagcuggugcccggguucggcaaggccuacaccaucuucaacaagacgcucauggaggccgacgcgcacuacaaguccguccagaccuggaacgagaucauccccagcaaggggugccugcgcgugggcgagcggugccacccccacgugaacggggucuucuucaacggcaucauccugggccccgacgggcacgugcucauccccgagaugcaguccagccugcugcagcagcacauggagcuccuggaguccagcgucaucccgcugaugcacccccucgccgaccccuccaccguguucaaggacggcgacgaggccgaggacuucguggagguccaccuccccgacgugcacaagcaggucagcgggguggaccugggccugccgaacugggggaaguacgugcugguguccgccggcgcccugaucgcgcucaugcugaucaucuuccugaucacgugcugccgccgggucaaccgccccgaguacacccagcggagccucggcgggaccggccgcaagguguccgugaccagccaguccgggaaggucaucagcagcugggaguccuacaagagcggcggggagacccgccuguga

SEQ ID NO: 95513 - RNA, 1575 nt, Artificial Sequence; identical to SEQ ID NO: 94781
  derived and/or modified CDS sequence (opt1) from glycoprotein__RABV__KF154999.1

SEQ ID NO: 95514 - RNA, 1575 nt, Artificial Sequence
  derived and/or modified CDS sequence (opt1) from glycoprotein__RABV__KF155000.1
auggugccccaggcccugcuguucgucccgcugcugguguucagccugugcuucggcaaguuccccaucuacaccauccccgacaagcuggggcccugguccccgaucgacauccaccaccugaccugccccaacaaccucguggucgaggacgagggcugcacgaaccugagcggguucuccuacauggagcugaaggugggcuacaucagcgccaucaaggugaacggguucacgugcaccggcgucgugaccgaggcggagaccuacaccaacuucgugggcuacgucaccaccacguucaagcgcaagcacuuccggcccacccccgacgccugccgcgccgccuacaacuggaagauggccggggacccgcgguacgaggagucccuccacaaccccuaccccgacuaccacuggcugcgcaccgugaagaccacgaaggagagccuggugaucaucucccccagcgucgcgaaccucgacccguacgacaagucccugcacagccggguguuccccuccggcaagugcagcgggaucaccguguccagcaccuacugcuccaccaaccacgacuacacgaucuggaugcccgagaacccccgccugggcaccagcugcgacaucuucaccaacucccgggggaagcgcgccagcaagggcuccaagaccugcggcuucgucgacgagcgggggcucuacaagagccugaagggcgccugcaagcugaagcucugcggggugcugggccugcgccucauggacggcacguggguggccaugcagaccagcgacgagaccaaguggugcccgcccgaccagcuggucaaccugcacgacuuccgguccgacgagaucgagcaccucgugguggaggagcuggucaagaagcgcgaggagugccuggacgcgcucgagagcaucaugaccacgaaguccgugagcuuccggcgccugucccaccuccggaagcucgugcccggguucggcaaggccuacaccaucuucaacaagacccugauggaggccgacgcccacuacaagagcguccgcaccuggaacgagaucauccccuccaaggggugccugcgggugggcgggcgcugccacccgcacgucaacggcguguucuucaacggcaucauccucgggcccgacggccacgugcugauccccgagaugcagagcucccugcuccagcagcacauggagcugcuggagagcuccgucaucccccucaugcacccgcuggccgaccccagcacgguguucaaggacggggacgaggcggaggacuucguggagguccaccuccccgacgugcacaagcaggucuccggcguggaccuggggcugcccaacuggggcaaguacgugcugcucagcgccggcgcccugaucgcccugaugcucaucaucuuccugaugaccugcugccggcgcgugaaccggccggaguccacccagcgcagccucgggggcaccgggcgcaaggucuccgugacgagccaguccggcaaggugaucagcagcugggaguccuacaagagcgggggcgagacccggcuguga

SEQ ID NO: 95515 - RNA, 1575 nt, Artificial Sequence
  derived and/or modified CDS sequence (opt1) from glycoprotein__RABV__KF155001.1
auggugccgcaggcccugcuguucgucccgcugcugguguucagccucugcuucggcaaguuccccaucuacaccauccccgacaagcuggggcccugguccccgaucgacauccaccaccugagcugccccaacaaccucguggucgaggacgagggcugcaccaaccuguccggguucagcuacauggagcugaaggugggcuacaucuccgccaucaaggugaacggguucacgugcaccggcgucgugaccgaggcggagaccuacacgaacuucgugggcuacgucaccaccaccuucaagcgcaagcacuuccggcccacgcccgacgccugccgcgccgccuacaacuggaagauggccggggacccgcgguacgaggagagccuccacaaccccuaccccgacuaccacuggcugcgcaccgugaagaccaccaaggagucccuggugaucaucagccccuccgucgcggaccucgacccguacgacaagagccugcacucccggguguuccccagcggcaagugcuccgggaucacggugagcuccaccuacugcagcaccaaccacgacuacaccaucuggaugcccgagaacccccgccugggcacguccugcgacaucuucaccaacagccgggggaagcgcgccuccaagggcagcaagaccugcggcuucgucgacgagcgggggcucuacaagagccugaagggcgccugcaagcugaagcucugcggggugcugggccugcgccucauggacggcaccuggguggccaugcagacguccgacgagaccaaguggugcccgcccgaccagcuggucaaccugcacgacuuccggagcgacgagaucgagcaccucgugguggaggagcuggucaagaagcgcgaggagugccuggacgcgcucgaguccaucaugaccaccaagagcguguccuuccggcgccugagccaccuccggaagcucgugcccggguucggcaaggccuacacgaucuucaacaagacccugauggaggccgacgcccacuacaaguccguccgcaccuggaacgagaucauccccagcaaggggugccugcgggugggcgggcgcugccacccgcacgucaacggcguguucuucaacggcaucauccucgggcccgacggccacgugcugauccccgagaugcaguccagccugcuccagcagcacauggagcugcuggaguccagcgucaucccccucaugcacccgcuggccgaccccuccaccguguucaaggacggggacgaggcggaggacuucguggagguccaccuccccgacgugcacaagcaggucagcggcguggaccuggggcugcccaacuggggcaaguacgugcugcucuccgccggcacgcugaucgcccugaugcucaucaucuuccugaugaccugcugccggcgcgugaaccggcccaagagcaugcagcgcucccugggggagaccggccgcaaggucagcgugaccucccagagcgggaaggugaucagcuccugggagagcuacaaguccggcggggagacgcggcuguga

SEQ ID NO: 95516 - RNA, 1575 nt, Artificial Sequence
  derived and/or modified CDS sequence (opt1) from glycoprotein__RABV__KF155002.1
auggugccccaggcccgccuguucgucccgcuccugguguucccccugugcuucggcaaguuccccaucuacaccauccccgacaagcucgggccguggagccccaucgacauccaccaccuguccugccccaacaaccugguggucgaggacgagggcugcaccaaccucagcggguucuccuacauggagcugaaggugggcuacaucagcgccaucaaggugaacggguucacgugcaccggcgucgugaccgaggcggagaccuacacgaacuucgugggcuacgucaccaccaccuucaagcggaagcacuuccgccccaucccggacgccugccgggccgccuacaacuggaagauggccggggacccccgcuacgaggagucccugcacaaccccuaccccgacuaccacuggcuccggacggugaagaccaccaaggagagccuggugaucaucuccccgagcgucgcggaccuggaccccuacgaccgcucccuccacagccggguguucaccggcgggaagugcuccggcaucacggugagcuccaccuacugcagcaccaaccacgacuacaccaucuggaugcccgagaacccccgccuggggacguccugcaacaucuucgccaacagcaagggcaagcgggccuccaagggcgggaagaccugcggcuucgucgacgagcgcgggcuguacaagagccucaagggcgccugcaagcugaagcugugcggcgugcucgggcugcggcugauggacggcaccuggguggcgaugcagaccuccgacgagacgaaguggugcccgcccgaccagcucgucaacaugcacgacuuccgcagcgacgagaucgagcaccuggugguggaggagcuggucaagaagcgggaggagugccucgacgcccuggagagcaucaugaccaccaaguccgugagcuuccgccggcugucccaccuccgcaagcuggugcccggguucggcaaggccuacaccaucuucaacaagacgcugauggaggccgacgcccacuacaagagcguccggaccuggaacgagaucauccccuccaaggggugccuccgcgugggcggccggugccacccgcacgucaacgggguguucuucaacggcaucauccuggggcccgacggccacgugcugauccccgagaugcagagcucccuccugcagcagcacauggagcugcucgagagcuccgucaucccccugaugcacccgcuggcggaccccagcaccguguucaaggacggggacgaggccgaggacuucguggagguccaccuccccgacgugcacaagcaggucuccggcguggaccugggccugcccaacugggggaaguacgugcuccugagcgccggcacccugaucgcccucaugcugaucaucuuccugaugacgugcugccgccgggugucccgcccggagagcacccagcgcucccucgggcggaccggccgcaaggucagcgugaccucccagagcgggaaggugaucuccagcugggagagcuacaaguccggcggcgagacgcggcuguga

SEQ ID NO: 95517 - RNA, 1575 nt, Artificial Sequence
  derived and/or modified CDS sequence (opt1) from glycoprotein__RABV__KF437644.1
auggugccccaggcccugcuguucgucccccugcugguguucagcaugugcuucggcaaguuccccaucuacaccauccccgacaagcucgggcccugguccccgaucgacauccaccaccugagcugccccaacaaccugguggucgaggacgagggcugcaccaaccucuccggguucagcuacauggagcugaaggugggcuacaucuccgccaucaaggugaacggguucacgugcaccggcgucgugaccgaggcggagaccuacacgaacuucgugggcuacgucaccaccaccuucaagcgcaagcacuuccggcccacgcccgacgccugccgcgccgccuacaacuggaagauggccggggacccgcgguacgaggagagccugcacaaccccuaccccgacuaccacuggcuccgcaccgugaagaccaccaaggagucccuggugaucaucagccccuccgucgcggaccuggacccguacgacaagagccuccacucccggguguuccccaacggcaagugcagcgggaucacgaucuccagcaccuacugccccaccaaccacgacuacaccaucuggcugcccgagaacccgcgccugggcacguccugcgacaucuucaccaacagccgggggaagcgcgccuccaagggcagcaagaccugcggcuucguggacgagcgggggcucuacaagucccugaagggcgccugcaagcugaagcucugcgggguccugggccugcgccucauggacggcaccuggguggccaugcaggcgagcgacgagacgaaguggugcccgcccgaccagcuggugaaccugcacgacuuccggagcgacgagaucgagcaccucgucguggaggagcuggugaagaagcgcgaggagugccuggacgcccucgaguccaucaugaccaccaagagcgucuccuuccggcgccugagccaccuccggaagcucgugcccggguucggcaaggccuacaccaucuucaacaagacgcugauggaggccgacgcccacuacaaguccgugcgcaccuggaacgagaucauccccagcaaggggugccugcgggucggcgggcgcugccacccccacgugaacggcgucuucuucaacggcaucauccucgggcccgacggccacgugcugauccccgagaugcaguccagccugcuccagcagcacauggagcugcuggaguccagcgugaucccgcucaugcacccccuggcggaccccuccaccgucuucaaggacggggacgaggccgagaacuucguggaggugcaccuccccgacguccacaagcagaucagcggcguggaccuggggcugccgaacuggggcaaguacgugcuggucuccgccggcgugcucaucgcccugaugcugaucaucuuccucaugaccugcugcgggcgggugaaccgccccgagagcacgcagcacaaccugggcgggaccggccgggaggucuccgugaccccgcagagcgggaaggugaucuccagcugggaguccuacaagagcggcggcgggacccgccuguga

SEQ ID NO: 95518 - RNA, 1575 nt, Artificial Sequence; identical to SEQ ID NO: 95517
  derived and/or modified CDS sequence (opt1) from glycoprotein__RABV__KF437645.1

SEQ ID NO: 95519 - RNA, 1575 nt, Artificial Sequence; identical to SEQ ID NO: 95517
  derived and/or modified CDS sequence (opt1) from glycoprotein__RABV__KF437646.1

SEQ ID NO: 95520 - RNA, 1575 nt, Artificial Sequence
  derived and/or modified CDS sequence (opt1) from glycoprotein__RABV__KF437648.1
auggugccccaggcccugcuguucgucccgcugcugguguucagcaugugcuucggcaaguuccccaucuacaccauccccgacaagcucgggcccugguccccgaucgacauccaccaccugagcugccccaacaaccugguggucgaggacgagggcugcaccaaccucuccggguucagcuacauggagcugaaggugggcuacaucuccgccaucaaggugaacggguucacgugcaccggcgucgugaccgaggcggagaccuacacgaacuucgugggcuacgucaccaccaccuucaagcgcaagcacuuccggcccacgcccgacgccugccgcgccgccuacaacuggaagauggccggggacccgcgguacgaggagagccugcacaaccccuaccccgacuaccacuggcuccgcaccgugaagaccaccaaggagucccuggugaucaucagccccuccgucgcggaccuggacccguacgacaagagccuccacucccgggugcugcccaacggcaagugcagcgggacgaccaccuccagcaccuacugccccacgaaccacgacuacaccaucuggcugcccgagaacccgcgccucggcaccuccugcgacaucuucaccaacagccgggggaagcgcgccuccaagggcggcaagacgugcggguucguggacgagcggggccuguacaagagccugaagggggccugcaagcucaagcugugcggcguccugggccuccgccugauggacgggaccuggguggccaugcaggcguccgacgagaccaaguggugcccgcccgaccagcuggugaaccuccacgacuuccggagcgacgagaucgagcaccuggucguggaggagcuggugaagaagcgcgaggagugccucgacgcccuggagagcaucaugaccacgaaguccgucagcuuccggcgccugucccaccuccggaagcuggugcccggcuucgggaaggccuacaccaucuucaacaagacccugauggaggccgacgcccacuacaagagcgugcgcaccuggaacgagaucauccccuccaagggcugccuccgggucgggggccgcugccacccccacgugaacggcgucuucuucaacgggaucauccugggccccgacgggcacgugcugauccccgagaugcagagcucccuccugcagcagcacauggagcugcucgagagcuccgugaucccgcugaugcacccccuggcggaccccagcacggucuucaaggacggcgacgaggccgagaacuucguggaggugcaccuccccgacguccacaagcagaucuccgggguggaccugggccugccgaacuggggcaaguacgugcucgucagcgccggggugcugaucgcccugaugcucaucaucuuccugaugaccugcugcggccgggugaaccgccccgaguccacccagcacaaccucgggggcaccgggcgggaggucagcgugacgccccaguccggcaaggugaucagcuccugggagagcuacaaguccggcggggagacccgccuguga

SEQ ID NO: 95521 - RNA, 1575 nt, Artificial Sequence
  derived and/or modified CDS sequence (opt1) from glycoprotein__RABV__KF437649.1
auggugccccaggcccugcuguucgucccccugcugguguucagcaugugcuucggcaaguuccccaucuacaccauccccgacaagcucgggcccugguccccgaucgacauccaccaccugagcugccccaacaaccugguggucgaggacgagggcugcaccaaccucuccggguucagcuacauggagcugaaggugggcuacaucuccgccaucaaggugaacggguucacgugcaccggcgucgugaccgaggcggagaccuacacgaacuucgugggcuacgucaccaccaccuucaagcgcaagcacuuccggcccacgcccgacgccugccgcgccgccuacaacuggaagauggccggggacccgcgguacgaggagagccugcacaaccccuaccccgacuaccacuggcuccgcaccgugaagaccaccaaggagucccuggugaucaucagccccuccgucgcggaccuggacccguacgacaagagccuccacucccggguguuccccaacggcaagugcagcgggaucacgaucuccagcaccuacugccccaccaaccacgacuacaccaucuggcugcccgagaacccgcgccugggcacguccugcgacaucuucaccaacagccgggggaagcgcgccuccaagggcagcaagaccugcggcuucguggacgagcgggggcucuacaagucccugaagggcgccugcaagcugaagcucugcgggguccugggccugcgccucauggacggcaccuggguggccaugcaggcgagcgacgagacgaaguggugcccgcccgaccagcuggugaaccugcacgacuuccggagcgacgagaucgagcaccucgucguggaggagcuggugaagaagcgcgaggagugccuggacgcccucgaguccaucaugaccaccaagagcgucuccuuccggcgccugagccaccuccggaagcucgugcccggguucggcaaggccuacaccaucuucaacaagacgcugauggaggccgacgcccacuacaaguccgugcgcaccuggaacgagaucauccccagcaaggggugccugcgggucggcgggcgcugccacccccacgugaacggcgucuucuucaacggcaucauccucgggcccgacggccacgugcugauccccgagaugcaguccagccugcuccagcagcacauggagcugcuggaguccagcgugaucccgcucaugcacccccuggcggaccccuccaccgucuucaaggacggggacgaggccgagaacuucguggaggugcaccuccccgacguccacaagcagaucagcggcguggaccuggggcugccgaacuggggcaaguacgugcuggucuccgccggcgugcucaucgcccugaugcugaucaucuuccucaugaccugcugcgggcgggugaaccgccccgagagcacgcagcacaaccugggcgggaccggccgggaggucuccgugaccccgcagagcgggaaggugaucuccagcugggaguccugcaagagcggcggcgggacccgccuguga

SEQ ID NO: 95522 - RNA, 1575 nt, Artificial Sequence; identical to SEQ ID NO: 95517
  derived and/or modified CDS sequence (opt1) from glycoprotein__RABV__KF437650.1

SEQ ID NO: 95523 - RNA, 1575 nt, Artificial Sequence
  derived and/or modified CDS sequence (opt1) from glycoprotein__RABV__KF437652.1
auggugccccaggcccugcuguucgucccccugcugguguucagcaugugcuucggcaaguuccccaucuacaccauccccgacaagcucgggcccugguccccgaucgacauccaccaccugagcugccccaacaaccugguggucgaggacgagggcugcaccaaccucuccggguucagcuacauggagcugaaggugggcuacaucuccgccaucaaggugaacggguucacgugcaccggcgucgugaccgaggcggagaccuacacgaacuucgugggcuacgucaccaccaccuucaagcgcaagcacuuccggcccacgcccgacgccugccgcgccgccuacaacuggaagauggccggggacccgcgguacgaggagagccugcacaaccccuaccccgacuaccacuggcuccgcaccgugaagaccaccaaggagucccuggugaucaucagccccuccgucgcggaccuggacccguacgacaagagccuccacucccggguguuccccaacggcaagugcagcgggaucacgaucuccagcaccuacugccccaccaaccacgacuacaccaucuggcugcccgagaacccgcgccugggcacguccugcgacaucuucaccaacagccgggggaagcgcgccuccaagggcagcaagaccugcggcuucguggacgagcgggggcucuacaagucccugaagggcgccugcaagcugaagcucugcgggguccugggccugcgccucauggacggcaccuggguggccaugcaggcgagcgacgagacgaaguggugcccgcccgaccagcuggugaaccugcacgacuuccggagcgacgagaucgagcaccucgucguggaggagcuggugaagaagcgcgagaagugccuggacgcccucgaguccaucaugaccaccaagagcgucuccuuccggcgccugagccaccuccggaagcucgugcccggguucggcaaggccuacaccaucuucaacaagacgcugauggaggccgacgcccacuacaaguccgugcgcaccuggaacgagaucauccccagcaaggggugccugcgggucggcgggcgcugccacccccacgugaacggcgucuucuucaacggcaucauccucgggcccgacggccacgugcugauccccgagaugcaguccagccugcuccagcagcacauggagcugcuggaguccagcgugaucccgcucaugcacccccuggcggaccccuccaccgucuucaaggacggggacgaggccgagaacuucguggaggugcaccuccccgacguccacaagcagaucagcggcguggaccuggggcugccgaacuggggcaaguacgugcuggucuccgccggcgugcucaucgcccugaugcugaucaucuuccucaugaccugcugcgggcgggugaaccgccccgagagcacgcagcacaaccugggcgggaccggccgggaggucuccgugaccccgcagagcgggaaggugaucuccagcugggaguccuacaagagcggcggcgggacccgccuguga

SEQ ID NO: 95524 - RNA, 1575 nt, Artificial Sequence
  derived and/or modified CDS sequence (opt1) from glycoprotein__RABV__KF437653.1
auggugccccaggcccugcuguucgucccgcugcugguguucagcaugugcuucggcaaguuccccaucuacaccauccccgacaagcuggggcccugguccccgaucgacauccaccaccugagcugccccaacaaccugguggucgaggacgagggcugcaccaaccucuccggguucagcuacauggagcugaaggugggcuacaucuccgccaucaaggugaacggguucacgugcaccggcgucgugaccgaggcggagaccuacacgaacuucgugggcuacgucaccaccaccuucaaggggaagcacuuccgccccacgcccgacgccugccgggccgccuacaacuggaagauggccggcgacccgcgcuacgaggagagccugcacaaccccuaccccgacuaccacuggcuccggaccgugaagaccaccaaggagucccuggugaucaucagccccuccgucgcggaccuggacccguacgacaagagccuccacucccgcguguuccccaacgggaagugcagcggcaucacgaucuccagcaccuacugccccaccaaccacgacuacaccaucuggcugcccgagaacccgcggcuggggacguccugcgacaucuucaccaacagccgcggcaagcgggccuccaagggcagcaagaccugcggguucguggacgagcgcggccucuacaagucccugaagggggccugcaagcugaagcucugcggcguccugggccugcggcucaccgacgggacguggguggccaugcaggcgagcgacgagaccaaguggugcccgcccgaccagcuggugaaccugcacgacuuccgcagcgacgagaucgagcaccucgucguggaggagcuggugaagaagcgggaggagugccuggacgcccucgaguccaucaugaccaccaagagcgucuccuuccgccggcugagccaccuccgcaagcucgugcccggcuucgggaaggccuacacgaucuucaacaagacccugauggaggccgacgcccacuacaaguccgugcggaccuggaacgagaucauccccagcaagggcugccugcgcgucgggggccggugccacccccacgugaacggcgucuucuucaacgggaucauccucggccccgacgggcacgugcugauccccgagaugcaguccagccugcuccagcagcacauggagcugcuggaguccagcgugaucccgcucaugcacccccuggcggaccccuccaccgucuucaaggacggcgacgaggccgagaacuucguggaggugcaccuccccgacguccacaagcagaucagcgggguggaccugggccugccgaacuggggcaaguacgugcuggucuccgccggggugcucaucgcccugaugcugaucaucuuccucaugacgugcugcggccgcgugaaccggcccgagagcacccagcacaaccucgggggcaccgggcgcgaggucuccgugacgccccagagcggcaaggugaucuccagcugggaguccuacaagagcggcgggggcacccggcuguga

SEQ ID NO: 95525 - RNA, 1575 nt, Artificial Sequence
  derived and/or modified CDS sequence (opt1) from glycoprotein__RABV__KF437654.1
auggugccccaggcccugcuguucgucccgcugcugguguucagcaugugcuccggcaaguuccccaucuacaccauccccgacaagcucgggcccuggagcccgaucgacauccaccaccuguccugccccaacaaccugguggucgaggacgagggcugcaccaaccucagcggguucuccuacauggagcugaaggugggcuacaucagcgccaucaaggugaacggguucacgugcaccggcgucgugaccgaggcggagaccuacacgaacuucgugggcuacgucaccaccaccuucaagcgcaagcacuuccggcccacgcccgacgccugccgcgccgccuacaacuggaagauggccggggacccgcgguacgaggagucccugcacaaccccuaccccgacuaccacuggcuccgcaccgugaaggcgaccaaggagagccuggugaucaucucccccagcgucgccgaccuggacccguacgacaagucccuccacagccggguguuccccaacggcaagugcuccgggaucaccaucagcuccacgugcugccccaccaaccacgacuacaccaucuggcugcccgagaacccgcgccugggcaccagcugcgacaucuucacgaacucccgggggaagcgcgccagcaagggcuccaagaccugcggcuucguggacgagcgggggcucuacaagagccugaagggcgccugcaagcugaagcucugcgggguccugggccugcgccucauggacggcgcguggguggccaugcaggccagcgacgagaccaaguggugcccgcccgaccagcuggugaaccugcacgacuuccgguccgacgagaucgagcaccucgucguggaggagcuggugaagaagcgcgaggagugccuggacgcccucgagagcaucaugaccacgaaguccgucagcuuccggcgccugucccaccuccggaagcucgugcccggguucggcaaggccuacaccaucuucaacaagacccugauggaggcggacgcccacuacaagagcgugcgcaccuggaacgagaucauccccuccaaggggugccugcgggucggcgggcgcugccacccccacgugaacggcgucuucuucaacggcaucauccucgggcccgacggccacgugcugauccccgagaugcagagcucccugcuccagcagcacauggagcugcuggagagcuccgugaucccgcucaugcacccccuggccgaccccagcacggucuucaaggacggggacgaggccgagaacuucguggaggugcaccuccccgacguccacaagcagaucuccggcguggaccuggggcugccgaacuggggcaaguacgugcuggucagcgccggcgugcucaucgcgcugaugcugaucaucuuccucaugaccugcugcgggcgggugaaccgccccgaguccacccagcacaaccugggcgggaccggccgggaggucagcgugacgccccaguccgggaaggugaucagcuccugggagagcuacaagagcggcggcgggacccgccuguga

SEQ ID NO: 95526 - RNA, 1575 nt, Artificial Sequence
  derived and/or modified CDS sequence (opt1) from glycoprotein__RABV__KF484518.1
auggugcugcaggcccuccuguucgcccccuuccugaucagcucccucugcuucggcaaguucccgaucuacaccauccccgacaagcuggggcccuggagccccaucgacauccaccaccuguccugcccgaacaaccucgucguggaggacgagggcugcaacagccuguccggguucagcuacauggagcugaaggugggcuacaucuccgcgaucaaggucaacggguucacgugcaccggcguggugaccgaggccgagaccuacaccaacuucgucggcuacgugacgaccaccuucaagcgcaagcacuuccggcccaugcccgacgccugccgcagcgccuacaacuggaagguggccggggacccccgguacgaggagucccuccacaacccguaccccgacuaccacuggcugcgcaccgucaagacgaccaaggagagccugaucaucaucucccccagcguggcggaccucgaccccuacgacaagucccugcacagccggaucuucccgggcgggaagugcuccggcaugaccaucagcuccaccuacugcagcacgaaccacgacuacaccaucuggaugcccgagaagaccgggcugggcaccuccugcgacaucuucaucacgagcaagggcaagcgcgccagcaagggcgggcggaccugcggguucguggacgagcgcggccucuacaagucccugaagggcgccugcaagcugaagcucugcggggucagcggccugcggcugauggacgggaccugggccgcgauccagaccuccgacgagacgaaguggugcagccccgaccagcucgugaaccugcacgaccugcacuccgacgagaucgagcaccucguggucgaggagcuggugcgccggcgcgaggagugccuggacgcccucgagagcaucaugaccaccaaguccgugagcuuccggcgccugucccaccuccggaagcugguccccggcuucgggaaggccuacaccaucuucaacaagacgcugauggaggccgacgcccacuacaagagcgugcgcaccuggaacgagaucaucccguccaagggcugccugcgggugggcgggaagugccacccccacgucaacggcguguucuucaacgggaucauccucggccccgacgggcacgugcugauccccgagaugcagagcucccugcuccagcagcacauggagcugcuggagagcuccgucaucccgcucaugcacccccuggcggaccugagcaccguguucaaggacggcgacgaggccgaggacuucgucgaggugcaccuccccgacgugcacaagcacgucuccggcguggaccuggggcugcccagcuggggcaaguacaugcucauguccgccggggcccuggccacccugaugcucgugaucccgcugaugaagugcugccgccgggucaaccgcaccaagagcauccagcagggcccccgggagagcgaccgcaagguguccgugacgccccagaacgggaaggucaucagcuccugggagagcuacaaguccggcggcgggaccggccuguga

SEQ ID NO: 95527 - RNA, 1575 nt, Artificial Sequence
  derived and/or modified CDS sequence (opt1) from glycoprotein__RABV__KF484519.1
auggugcugcaggcccuccuguucgcccccuuccugaucagcucccucugccugggcaaguucccgaucuacaccauccccgacaagcuggggcccuggagccccaucgacauccaccaccucuccugcccgaacaaccuggucaucgaggacgagggcugcaacagccuguccggguucagcuacauggagcucaaggugggcuacaucuccgcgaucaaggugaacggguucacgugcaccggcgucgugaccgaggccgagaccuacaccaacuucgugggcuacgucaccaccaccuucaagcgcaagcacuuccggcccaugcccgacgccugccgcagcgccuacaacuggaagcuggccggggacccccgguacgaggagucccugcacaacccguaccccgaguaccacuggcuccgcaccgugaagacgaccaaggagagccugaucgugaucucccccagcgucgcggaccuggaccccuacgacaagucccuccacagccggaucuucccguccggcaagugcagcgggaugaccguguccagcaccuacugcuccacgaaccacgaguacaccaucuggaugcccgagaaggugggccuggggaccagcugcgacaucuucaucaccagcaagggcaagcgcgccuccaagggcgggaagacgugcggcuucgucgacgagcgggggcuguacaagagccucaagggcgccugcaagcugaagcugugcggcguguccgggcuccgccugauggacggcaccuggguggccauccagaccagcgacgagaccaaguggugcucccccgaccagcuggucaaccuccacgaccugcacagcgacgagaucgagcaccuggugguggaggagcucguccggaagcgcgaggagugccuggacgcgcuggaguccaucaugacgaccaagagcguguccuuccggcgccucagccaccuccggaagcuggugcccggguucggcaaggccuacaccaucuucaacaagacccugauggaggccgacgcccacuacaaguccguccgcacguggaacgagaucaucccgagcaaggggugccugcgggugggcggcaagugccacccccacgugaacggggucuucuucaacggcaucauccuggggcccgacggccacgugcucauccccgagaugcaguccagccugcugcagcagcacaucgagcuccuggaguccagcgucaucccgcugaugcacccccucgccgaccuguccaccguguucaaggacggggacgaggcggaggacuucguggagguccaccuccccgacgugcacaagcagaucagcggcguggaccugggccugcccuccugggggaaguacguccugaugagcgccggcgcccucgccacccugauccuggugaccagccugaugaagugcugccgcugggugaaccggacgaaguccauccagcaggggccgcgcgagagcgagcggaaggucuccgugacgccccagagcggcaaggugaucuccagcugggaguccuacaagaucgggggcgagaccggccucuga

SEQ ID NO: 95528 - RNA, 1575 nt, Artificial Sequence
  derived and/or modified CDS sequence (opt1) from glycoprotein__RABV__KF484520.1
auggugcugcaggcccuccuguucgcccccuuccugaucagcucccucugccugggcaaguucccgaucuacaccauccccgacaagcuggggcccuggagccccaucgacauccaccaccucuccugcccgaacaaccuggucguggaggacgagggcugcaacagccuguccgggaucagcuacauggagcucaaggugggcuacaucuccgcgaucaaggucaacggguucacgugcaccggcguggugaccgaggccgagaccuacaccaacuucgucggcuacgugacgaccaccuucaagcgcaagcacuuccaccccaugcccgacgccugccggagcgccuacaacuggaagcuggccggggacccccgcuacgaggagucccugcacaacccguaccccgacuaccacuggcuccggaccgugaagacgaccaaggagagccugaucaucaucucccccagcgucgcggaccuggaccccuacgacaagucccuccacagccgcaucuucccguccggcaagugcagcgggaugaccaucuccagcaccuacugcuccacgaaccacgaguacaccaucuggaugcccgagaaggccggccuggggaccagcugcgacaucuucaccacgagcaagggcaagcgggccuccaagggcgggaagaccugcggcuucguggacgagcgcgggcuguacaagagccucaagggcgccugcaagcugaagcugugcggcguguccgggcuccggcugauggacggcaccugggucgcgauccagaccagcgaggagacgaaguggugcccgcccgaccagcuggugaaccuccacgaccugcacuccgacgagaucgagcaccugguggucgaggagcucgugaagaagcgcgaggagugccuggacgcccuggagagcaucaugaccaccaaguccgugagcuuccggcgccucucccaccuccggaagcugguccccggguucggcaaggccuacaccaucuucaacaagacgcugauggaggccgacgcccacuacaagagcauccgcaccuggaacgagaucauccccuccaaggggugccugcgggugggcggcaagugccacccccacgugaacggggucuucuucaacggcaucauccuggggcccgacggccacgugcucaucccggagaugcagagcucccugcugcagcagcacauggagcuccuggagagcuccgugaucccccugaugcacccccucgcggaccugagcaccgucuucaaggacggggacgaggccgaggacuucguggagguccaccuccccgacgugcacaagcagaucuccggcguggaccugggccugccgagcugggggaaguacguccugauguccgccggcgcccucgccauccugaugcuggugaucagccugaugaagugcuucuggggcgugaaccgcaccaagcccauccagcaggggccccgggagagcgagcgcaaggucuccaucgcgccccagagccggaaggugaucuccagcugggaguccuacaagagcgggggcgagacggagcucuga

SEQ ID NO: 95529 - RNA, 1575 nt, Artificial Sequence
  derived and/or modified CDS sequence (opt1) from glycoprotein__RABV__KF484521.1
auggugcugcaggcccuccuguucgcccccuuccugaucagcucccucugccugggcaaguucccgaucuacaccauccccgacaagcuggggcccuggagccccaucgacauccaccaccucuccugcccgaacaaccuggucguggaggacgagggcugcaacagccuguccggguucagcuacauggagcucaaggugggcuacaucuccgcgaucaaggucaacggguucacgugcaccggcguggugaccgaggccgagaccuacaccaacuucgucggcuacgugaccaccaccuucaagcgcaagcacuuccggcccaugcccgacgccugccgcagcgccuacaacuggaagcuggccggggacccccgguacgaggagucccugcacaacccguaccccgacuaccacuggcuccgcaccgugaagacgaccaaggagagccugaucgucaucucccccagcguggcggaccuggaccccuacgacaagucccuccacagccggaucuucccgggcgggaagugcuccggcaugaccgugagcuccaccuacugcagcacgaaccacgaguacaccaucuggaugcccgagaaggccgggcugggcaccuccugcgacaucuucaccacgagcaagggcaagcgcgccaccaagggcgggaagaccugcggguucgucgacgagcggggccuguacaagagccucaagggcgccugcaagcugaagcugugcgggguguccggccuccgccugauggacgggaccuggguggcgauccagacgagcgacgagaccaaguggugcucccccgaccagcuggucaaccuccacgaccugcacagcgacgagaucgagcaccuggugguggaggagcucguccggaagcgcgaggagugccuggacgcccuggaguccaucaugaccaccaagagcguguccuuccggcgccucagccaccuccggaagcuggugcccggcuucgggaaggccuacacgaucuucaacaagacccugauggaggccgacgcccacuacaaguccguccgcaccuggaacgagaucaucccgagcaagggcugccugcgggugggcgggaagugccacccccacgugaacggcgucuucuucaacgggaucauccugggccccgacgggcacgugcucauccccgagaugcaguccagccugcugcagcagcacauggagcuccuggaguccagcgucaucccgcugaugcacccccucgcggaccccuccaccguguucaaggacgacgacgaggccgaggacuucguggagguccaccuccccgacgugcacaagcaggucagcggcguggaccugggccugccguccugggggcgcuacgugcugaugagcgccggcgcccuggccacgcucaugcuggugaucucccugaugaagugcugcaagggggucaaccggaccaagagcaucaagcagggcagccgcgaguccgagcggaaggugagcaucacgccccaguccgggaaggugaucagcuccugggagagcuacaaguccggcggcgagaccgggcuguga

SEQ ID NO: 95530 - RNA, 1575 nt, Artificial Sequence
  derived and/or modified CDS sequence (opt1) from glycoprotein__RABV__KF484522.1
auggugcugcaggcccuccuguucgcccccuuccugaucagcucccucugccugggcaaguucccgaucuacaccauccccgacaagcuggggcccuggagccccaucgacauccaccaccucuccugcccgaacaaccuggucaucgaggacgagggcugcaacagccuguccggguucagcuacauggagcucaaggugggcuacaucuccgcgaucaaggugaacggguucacgugcaccggcgucgugaccgaggccgagaccuacaccaacuucgugggcuacgucacgaccaccuucaagcgcaagcacuuccggcccaugcccgacgccugccgcagcgccuacaacuggaagcuggccggggacccccgguacgaggagucccugcacaacccguaccccgaguaccacuggcuccgcaccgugaagacgaccaaggagagccugaucgugaucucccccagcgucgcggaccuggaccccuacgacaagucccuccacagccggaucuucccguccggcaagugcagcgggaugaccguguccagcaccuacugcuccacgaaccacgaguacaccaucuggaugcccgagaaggugggccuggggaccagcugcgacaucuucaucaccagcaagggcaagcgcgccuccaagggcgggaagacgugcggcuucgucgacgagcgggggcuguacaagagccucaagggcgccugcaagcugaagcugugcggcguguccgggcuccgccugauggacggcaccuggguggccauccagaccagcgacgagaccaaguggugcucccccgaccagcuggucaaccuccacgaccugcacagcgacgagaucgagcaccuggugguggaggagcucguccggaagcgcgaggagugccuggacgcgcuggaguccaucaugacgaccaagagcguguccuuccggcgccucagccaccuccggaagcuggugcccggguucggcaaggccuacaccaucuucaacaagacccugauggaggccgacgcccacuacaaguccguccgcacguggaacgagaucaucccgagcaaggggugccugcgggugggcggcaagugccacccccacgugaacggggucuucuucaacggcaucauccuggggcccgacggccacgugcucauccccgagaugcaguccagccugcugcagcagcacaucgagcuccuggaguccagcgucaucccgcugaugcacccccucgccgaccuguccaccguguucaaggacggggacgaggcggaggacuucguggagguccaccuccccgacgugcacaagcagaucagcggcguggaccugggccugcccuccugggggaaguacguccugaugagcgccggcgcccucgccacccugauccuggugaucagccugaugaagugcugccgcugggugaaccggaccaaguccauccagcaggggccgcgcgagagcgagcggaaggucuccgugacgccccagagcggcaaggugaucuccagcugggaguccuacaagaucgggggcgagaccggccucuga

SEQ ID NO: 95531 - RNA, 1575 nt, Artificial Sequence
  derived and/or modified CDS sequence (opt1) from glycoprotein__RABV__KF484523.1
augauccugcacgcccuccuguucgcccccuuccugaucagcccgcucugccugggcaaguuccccaucuacaccauccccgacaagcuggggcccugguccccgaucgacauccaccaccucagcugccccaacaaccugguggucgaggacgagggcugcaacucccugagcggguucuccuacauggagcucaaggugggcuacaucagcgcgaucaaggugaacggguucacgugcaccggcgucgugaccgaggccgagaccuacaccaacuucgugggcuacgucacgaccaccuucaagcgcaagcacuuccggcccaugcccgacgccugccgcuccgccuacaacuggaagcuggccggggacccgcgguacgaggagagccugcacaaccccuaccccgaguaccacuggcuccgcaccgugaagacgaccaaggagucccugaucgugaucagccccuccgucgcggaccuggacccguacgacaagagccuccacucccggaucuuccccagcggcaagugcuccgggaugaccgugagcuccaccuacugcagcacgaaccacgaguacaccaucuggaugcccgagaaggugggccuggggaccuccugcgacaucuucaccacgagcaagggcaagcgcgccagcaagggcgggcggaucugcggcuucgucgacgagcgcgggcuguacaagucccucaagggcgccugcaagcugaagcugugcggcgugagcgggcuccggcugauggacggcaccggguucgccauccagaccuccgacgagaccaaguggugcagccccgaccagcuggugaaccuccacgaccugcacuccgacgagaucgagcaccuggucguggaggagcucgugcgcaagcgggaggagugccuggacgcgcuggagagcaucaugacgaccaaguccgucagcuuccgccggcucucccaccuccgcaagcuggugccgggcuucgggaaggccuacaccaucuucaacaagacccugauggaggccgacgcccacuacaagagcgugcggacguggaacgagaucauccccuccaagggcugccugcgcgucggcgggaagugccacccccacgugaacggcguguucuucaacgggaucauccugggccccgacgggcacguccucaucccggagaugcagagcucccugcugcagcagcacauggagcuccuggagagcuccgugaucccccugaugcacccccucgccgaccugagcaccgucuucaaggacgacggcgaggcggaggacuucguggaggugcaccuccccgacguccacaagcagaucuccggcguggaccuggggcugccgagcuggggcaaguacgcccugauguccgccggggcccucgccacccugauccugaugaucuuccugaugaagugcugccggugggugaaccgcaccgagagcauccagcagggcccccgggagagcgagcgcaaggucuccgugacgccccagaacgggaaggugaucagcuccugggagagcuacaagaucggcggcgagaccgggcucuga

SEQ ID NO: 95532 - RNA, 1575 nt, Artificial Sequence
  derived and/or modified CDS sequence (opt1) from glycoprotein__RABV__KF484524.1
auggugcugcaggcccuccuguucgcccccuuccugaucagcucccucugccugggcaaguucccgaucuacaccauccccgacaagcuggggcccuggagccccaucgacauccaccaccucuccugcccgaacaaccuggucaucgaggacgagggcugcaacagccuguccggguucagcuacauggagcucaaggugggcuacaucuccgcgaucaaggugaacggguucacgugcaccggcgucgugaccgaggccgagaccuacaccaacuucgugggcuacgucacgaccaccuucaagcgcaagcacuuccggcccaugcccgacgccugccgcagcgccuacaacuggaagcuggccggggacccccgguacgaggagucccugcacaacccguaccccgaguaccacuggcuccgcaccgugaagacgaccaaggagagccugaucgugaucucccccagcgucgcggaccuggaccccuacgacaagucccuccacagccggaucuucccguccggcaagugcagcgggaugaccguguccagcaccuacugcuccacgaaccacgaguacaccaucuggaugcccgagaaggugggccuggggaccagcugcgacaucuucaucaccagcaagggcaagcgcgccuccaagggcgggaagacgugcggcuucgucgacgagcgggggcuguacaagagccucaagggcgccugcaagcugaagcugugcggcguguccgggcuccgccugauggacggcaccuggguggccauccagaccagcgacgagaccaaguggugcucccccgaccagcuggucaaccuccacgaccugcacagcgacgagaucgagcaccuggugguggaggagcucguccggaagcgcgaggagugccuggacgcgcuggaguccaucaugacgaccaagagcguguccuuccggcgccucagccaccuccggaagcuggugcccggguucggcaaggccuacaccaucuucaacaagacccugauggaggccgacgcccacuacaaguccguccgcacguggaacgagaucaucccgagcaaggggugccugcgggugggcggcaagugccacccccacgugaacggggucuucuucaacggcaucauccuggggcccgacggccacgugcucauccccgagaugcaguccagccugcugcagcagcacauggagcuccuggaguccagcgucaucccgcugaugcacccccucgccgaccuguccaccguguucaaggagggggacgaggcggaggacuucguggagguccaccuccccgacgugcacaagcagaucagcggcguggaccugggccugcccuccugggggaaguacguccugaugagcgccggcgcccucgccacccugauccuggugaucagccugaugaagugcugccgcugggugaaccggaccaaguccauccagcaggggccgcgcgagagcgagcggaaggucuccgugacgccccagagcggcaaggugaucuccagcugggagcccuacaagaucgggggcgagaccggccucuga

SEQ ID NO: 95533 - RNA, 1575 nt, Artificial Sequence
  derived and/or modified CDS sequence (opt1) from glycoprotein__RABV__KF484525.1
auggugcugcaggcccuccuguucgcccccuuccugaucagcucccucugccugggcaaguucccgaucuacaccauccccgacaagcuggggcccuggagccccaucgacauccaccaccucuccugcccgaacaaccuggucguggaggacgagggcugcaacagccuguccgggaucagcuacauggagcucaaggugggcuacaucuccgcgaucaaggucaacggguucacgugcaccggcguggugaccgaggccgagaccuacaccaacuucgucggcuacgugacgaccaccuucaagcgcaagcacuuccaccccaugcccgacgccugccggagcgccuacaacuggaagcuggccggggacccccgcuacgaggagucccugcacaacccguaccccgacuaccacuggcuccggaccgugaagacgaccaaggagagccugaucaucaucucccccagcgucgcggaccuggaccccuacgacaagucccuccacagccgcaucuucccguccggcaagugcagcgggaugaccaucuccagcaccuacugcuccacgaaccacgaguacaccaucuggaugcccgagaaggccggccuggggaccagcugcgacaucuucaccacgagcaagggcaagcgggccuccaagggcgggaagaccugcggcuucguggacgagcgcgggcuguacaagagccucaagggcgccugcaagcugaagcugugcggcguguccgggcuccggcugauggacggcaccugggucgcgauccagaccagcgaggagacgaaguggugcccgcccgaccagcuggugaaccuccacgaccugcacuccgacgagaucgagcaccugguggucgaggagcucgugaagaagcgcgaggagugccuggacgcccuggagagcaucaugaccaccaaguccgugagcuuccggcgccucucccaccuccggaagcugguccccggguucggcaaggccuacaccaucuucaacaagacgcugauggaggccgacgcccacuacaagagcauccgcaccuggaacgagaucauccccuccaaggggugccugcgggugggcggcaagugccacccccacguggacggggucuucuucaacggcaucauccuggggcccgacggccacgugcucaucccggagaugcagagcucccugcugcagcagcacauggagcuccuggagagcuccgugaucccccugaugcacccccucgcggaccugagcaccgucuucaaggacggggacgaggccgaggacuucguggagguccaccuccccgacgugcacaagcagaucuccggcguggaccugggccugccgagcugggggaaguacguccugauguccgccggcgcccucgccauccugaugcuggugaucagccugaugaagugcuucuggggcgugaaccgcaccaagcccauccagcaggggccccgggagagcgagcgcaaggucuccaucgcgccccagagccggaaggugaucuccagcugggaguccuacaagaacgggggcgagacggagcucuga

SEQ ID NO: 95534 - RNA, 1575 nt, Artificial Sequence
  derived and/or modified CDS sequence (opt1) from glycoprotein__RABV__KF484526.1
auggugcugcaggcccuccuguucgcccccuuccugaucagcucccucugccugggcaaguucccgaucuacaccauccccgacaagcuggggcccuggagccccaucgacauccaccaccucuccugcccgaacaaccuggucguggaggacgagggcugcaacagccuguccggguucagcuacauggagcucaaggugggcuacaucuccgcgaucaaggucaacggguucacgugcaccggcguggugaccgaggccgagaccuacaccaacuucgucggcuacgugacgaccaccuucaagcgcaagcacuuccggcccaugcccgacgccugccgcagcgccuacaacuggaagcuggccggggacccccgguacgaggagucccugcacaacccguaccccgaguaccacuggcuccgcaccgugaagacgaccaaggagagccugaucaucaucucccccagcgucgcggaccuggaccccuacgacaagucccuccacagccggaucuucccgggcgggaagugcuccggcaugaccgugagcuccaccuacugcagcacgaaccacgaguacaccaucuggaugcccgagaagguggggcugggcaccuccugcgacaucuucaccacgagcaagggcaagcgcgccagcaagggcgggaagaccugcggguucgucgacgagcggggccuguacaagucccucaagggcgccugcaagcugaagcugugcggggugagcggccuccgccugauggacgggaccuggguggccaugcagaccuccgacgagacgaaguggugcagccccgaccagcuggucaaccuccacgaccugcacuccgacgagaucgagcaccuggugguggaggagcucguccggaagcgcgaggagugccuggacgcgcuggagagcaucaugaccaccaaguccgugagcuuccggcgccucucccaccuccggaagcuggugcccggcuucgggaaggccuacaccaucuucaacaagacgcugauggaggccgacgcccacuacaagagcguccgcaccuggaacgagaucaucccguccaagggcugccugcgggugggcgggaagugccacccccacgugaacggcgucuucuucaacgggaucauccugggccccgacgggcacgugcucauccccgagaugcagagcucccugcugcagcagcacauggagcuccuggagagcuccgucaucccgcugaugcacccccucgccgaccugagcgcgguguucaaggagggcgacgaggccgaggacuucguggagguccaccuccccgacgugcacaagcagaucuccgagguggaccugggccugcccagcugggggaaguacguccugauguccgccggcgcccucgccacccugauccuggugaucagccugaugaagugcugccgcugggugaaccggaccaagagcauccagcaggggccgcgcgaguccgagcggaaggucagcgugacgccccagaacggcaaggugaucuccagcugggaguccuacaagauccgcggggagaccggccucuga

SEQ ID NO: 95535 - RNA, 1575 nt, Artificial Sequence
  derived and/or modified CDS sequence (opt1) from glycoprotein__RABV__KF484527.1
auggugcugcaggcccuccuguucgcccccuuccugaucagcucccucugccugggcaaguucccgaucuacaccauccccgacaagcuggggcccuggagccccaucgacauccaccaccucuccugcccgaacaaccuggucguggaggacgagggcugcaacagccuguccggguucagcuacauggagcucaaggugggcuacaucuccgcgaucaaggucaacggguucacgugcaccggcguggugaccgaggccgagaccuacaccaacuucgucggcuacgugacgaccaccuucaagcgcaagcacuuccggcccaugcccgacgccugccgcagcgccuacaacuggaagcuggccggggacccccgguacgaggagucccugcacaacccguaccccgaguaccacuggcuccgcaccgugaagacgaccaaggagagccugaucgucaucucccccagcguggcggaccuggaccccuacgacaagucccuccacagccggaucuucccgggcgggaagugcuccggcaugaccgugagcuccaccuacugcagcacgaaccacgaguacaccaucuggaugcccgagaaggucgggcugggcaccuccugcgacaucuucaccacgagcaagggcaagcgcgccagcaagggcgggcggaccugcggguucguggacgagcgcggccuguacaagucccucaagggcgccugcaagcugaagcugugcggggugagcggccuccggcugauggacgggaccugggucgccaugcagaccuccgacgagacgaaguggugcagccccgaccagcuggugaaccuccacgaccugcacuccgacgagaucgagcaccugguggucgaggagcucgugcgcaagcgggaggagugccuggacgcgcuggagagcaucaugaccaccaaguccgugagcuuccgccggcucucccaccuccgcaagcugguccccggcuucgggaaggccuacaccaucuucaacaagacgcugauggaggccgacgcccacuacaagagcgugcggaccuggaacgagaucaucccguccaagggcugccugcgcgugggcgggaagugccacccccacgucaacggcguguucuucaacgggaucauccugggccccgacgggcacguccucauccccgagaugcagagcucccugcugcagcagcacauggagcuccuggagagcuccgugaucccgcugaugcacccccucgccgaccugagcaccguguucaaggagggcgacgaggcggaggacuucgucgaggugcaccuccccgacgugcacaagcagaucuccggcgucgaccuggggcugcccagcuggggcaaguacgugcugaugggggccggcgcccucgccacccugauccuggugaucucccugaugaagugcugccggugggucaaccgcaccaagagcauccagcaggggccgcggggcagcgagcgcaagguguccgugacgccccagaacggcaaggucaucagcuccugggagagcuacaagaucgggggcgagaccgggcucuga

SEQ ID NO: 95536 - RNA, 1575 nt, Artificial Sequence
  derived and/or modified CDS sequence (opt1) from glycoprotein__RABV__KF484528.1
auggugcugcaggcccuccuguucgcccccuuccugaucagcucccucugccugggcaaguucccgaucuacaccauccccgacaagcuggggcccuggagccccaucgacauccaccaccucuccugcccgaacaaccuggucguggaggacgagggcugcaacagccuguccggguucagcuacauggagcucaaggugggcuacaucuccgcgaucaaggucaacggguucacgugcaccggcguggugaccgaggccgagaccuacaccaacuucgucggcuacgugacgaccaccuucaagcgcaagcacuuccggcccaugcccgacgccugccgcagcgccuacaacuggaagcuggccggggacccccgguacgaggagucccugcacaacccguaccccgaguaccacuggcuccgcaccgugaagacgaccaaggagagccugaucaucaucucccccagcgucgcggaccuggaccccuacgacaagucccuccacagccggaucuucccgggcgggaagugcuccggcaugaccgugagcuccaccuacugcagcacgaaccacgaguacaccaucuggaugcccgagaagguggggcugggcaccuccugcgacaucuucaccacgagcaagggcaagcgcgccagcaagggcgggaagaccugcggguucgucgacgagcggggccuguacaagucccucaagggcgccugcaagcugaagcugugcggggugagcggccuccgccugauggacgggaccuggguggccaugcagaccuccgacgagacgaaguggugcagccccgaccagcuggucaaccuccacgaccugcacuccgacgagaucgagcaccuggugguggaggagcucguccggaagcgcgaggagugccuggacgcgcuggagagcaucaugaccaccaaguccgugagcuuccggcgccucucccaccuccggaagcuggugcccggcuucgggaaggccuacaccaucuucaacaagacgcugauggaggccgacgcccacuacaagagcguccgcaccuggaacgagaucaucccguccaagggcugccugcgggugggcgggaagugccacccccacgugaacggcgucuucuucaacgggaucauccugggccccgacgggcacgugcucauccccgagaugcagagcucccugcugcagcagcacauggagcuccuggagagcuccgucaucccgcugaugcacccccucgccgaccugagcaccguguucaaggagggcgacgaggcggaggacuucguggagguccaccuccccgacgugcacaagcagaucuccgagguggaccugggccugcccagcugggggaaguacguccugauguccgccggcgcccucgccacccugauccuggugaucagccugaugaagugcugccgcugggugaaccggaccaagagcauccagcaggggccgcgcgaguccgagcggaaggucagcgugacgccccagaacggcaaggugaucuccagcugggaguccuacaagaucgggggcgagaccggccucuga

SEQ ID NO: 95537 - RNA, 1575 nt, Artificial Sequence
  derived and/or modified CDS sequence (opt1) from glycoprotein__RABV__KF484529.1
auggugcugcaggcccuccuguucgcccccuuccugaucagcucccucugccugggcaaguucccgaucuacaccauccccgacaagcuggggcccuggagccccaucgacauccaccaccucuccugcccgaacaaccuggucguggaggacgagggcugcaacagccuguccggguucagcuacauggagcucaaggugggcuacaucuccgcgaucaaggucaacggguucacgugcaccggcguggugaccgaggccgagaccuacaccaacuucgucggcuacgugaccaccaccuucaagcgcaagcacuuccggcccaugcccgacgccugccgcagcgccuacaacuggaagcuggccggggacccccgguacgaggagucccugcacaacccguaccccgaguaccacuggcuccgcaccgugaagacgaccaaggagagccugaucgucaucucccccagcguggcggaccuggaccccuacgacaagucccuccacagccggaucuucccgggcgggaagugcuccggcaugaccgugagcuccaccuacugcagcacgaaccacgaguacaccaucuggaugcccgagaaggucgggcugggcaccuccugcgacaucuucaccacgagcaagggcaagcgcgccagcaagggcgggcggaccugcggguucguggacgagcgcggccuguacaagucccucaagggcgccugcaagcugaagcugugcggggugagcggccuccggcugauggacgggaccugggucgccaugcagaccuccgacgagacgaaguggugcagccccgaccagcuggugaaccuccacgaccugcacuccgacgagaucgagcaccugguggucgaggagcucgugcgcaagcgggaggagugccuggacgcgcuggagagcaucaugaccaccaaguccgugagcuuccgccggcucucccaccuccgcaagcugguccccggcuucgggaaggccuacaccaucuucaacaagacgcugauggaggccgacgcccacuacaagagcgugcggaccuggaacgagaucaucccguccaagggcugccugcgcgugggcgggaagugccacccccacgucaacggcguguucuucaacgggaucauccugggccccgacgggcacguccucauccccgagaugcagagcucccugcugcagcagcacauggagcuccuggagagcuccgugaucccgcugaugcacccccucgccgaccugagcaccguguucaaggaggacgacgaggcggaggacuucgucgaggugcaccuccccgacgugcacaagcagaucuccggcgucgaccugggccugcccagcugggggaaguacgugcugaugggcgccggggcccucgccacccugacgcuggugaucucccugaucaagugcugccggugggucaaccgcaccaagagcauccagcagggcccgcgggagagcgagcgcaagguguccgugacgccccagaacgggaaggucaucagcuccugggagagcuacaagaucggcggcgagaccgggcucuga

SEQ ID NO: 95538 - RNA, 1575 nt, Artificial Sequence
  derived and/or modified CDS sequence (opt1) from glycoprotein__RABV__KF484530.1
auggugcugcaggcccuccuguucgcccccuuccugaucagcucccucugcuucggcaaguucccgaucuacaccauccccgacaagcuggggcccuggagccccaucgacguccaccaccuguccugcccgaacaaccucgugaucgaggacgagggcugcaacagccuguccggguucagcuacauggagcugaaggugggcuacaucuccgcgaucaaggucaacggguucacgugcaccggcguggugaccgaggccgagaccuacaccaacuucgucggcuacgugacgaccaccuucaagcgcaagcacuuccggcccaugcccgacgccugccgcagcgccuacaacuggaagguggccggggacccccgguacgaggagucccuccacaacccguaccccgacuaccacuggcugcgcaccgucaagacgaccaaggagagccugaucaucaucucccccagcguggcggaccucgaccccuacgacaagucccugcacagccggaucuucccgggcgggaagugcuccggcaugaccaucagcuccaccuacugcagcacgaaccacgacuacaccaucuggaugcccgagaagaccgggcugggcaccuccugcgacaucuucacgaccagcaagggcaagcgcgccagcaagggcgggcggaccugcggguucguggacgagcgcggccucuacaagucccugaagggcgccugcaagcugaagcucugcggggucagcggccugcggcugauggacgggaccugggccgcgauccagacguccgacgagaccaaguggugcagccccgaccagcucgugaaccugcacgaccugcacuccgacgagaucgagcaccucguggucgaggagcuggugcgccggcgcgaggagugccuggacgcccucgagagcaucaugaccaccaaguccgugagcuuccggcgccugucccaccuccggaagcugguccccggcuucgggaaggccuacacgaucuucaacaagacccugauggaggccgacgcccacuacaagagcgugcgcaccuggaacgagaucaucccguccaagggcugccugcgggugggcgggaagugccacccccacgucaacggcguguucuucaacgggaucauccucggccccgacgggcacgugcugauccccgagaugcagagcucccugcuccagcagcacauggagcugcuggagagcuccgucaucccgcucaugcacccccuggcggaccugagcaccguguucaaggacggcgacgaggccgaggacuucgucgaggugcaccuccccgacgugcacaagcaggucuccggcguggaccuggggcugcccagcuggggcaaguacaugcucauguccgccggggcccuggccacgcugaugcucgugaucccgcugaugaagugcugccgccgggucaaccgcaccaagagcacccagcagggcccccgggagagcgaccgcaagguguccgugacgccccagaacgggaaggucaucagcuccugggagagcuacaaguccggcggcgggaccggccuguga

SEQ ID NO: 95539 - RNA, 1575 nt, Artificial Sequence
  derived and/or modified CDS sequence (opt1) from glycoprotein__RABV__KF484531.1
auggugcugcaggcccuccuguucgcccccuuccugaucagcucccucugccugggcaaguucccgaucuacaccauccccgacaagcuggggcccuggagccccaucgacauccaccaccucuccugcccgaacaaccuggucguggaggacgagggcugcaacagccuguccggguucagcuacauggagcucaaggugggcuacaucuccgcgaucaaggucaacggguucacgugcaccggcguggugaccgaggccgagaccuacaccaacuucgucggcuacgugacgaccaccuucaagcgcaagcacuuccggcccaugcccgacgccugccgcagcgccuacaacuggaagcuggccggggacccccgguacgaggagucccugcacaacccguaccccgaguaccacuggcuccgcaccgugaagacgaccaaggagagccugaucgucaucucccccagcguggcggaccuggaccccuacgacaagucccuccacagccggaucuucccgggcgggaagugcuccggcaugaccgugagcuccaccuacugcagcacgaaccacgaguacaccaucuggaugcccgagaaggucgggcugggcaccuccugcgacaucuucaccacgagcaagggcaagcgcgccagcaagggcgggcggaccugcggguucguggacgagcgcggccuguacaagucccucaagggcgccugcaagcugaagcugugcggggugagcggccuccggcugauggacgggaccugggucgccaugcagaccuccgacgagacgaaguggugcagccccgaccagcuggugaaccuccacgaccugcacuccgacgagaucgagcaccugguggucgaggagcucgugcgcaagcgggaggagugccuggacgcgcuggagagcaucaugaccaccaaguccgugagcuuccgccggcucucccaccuccgcaagcugguccccggcuucgggaaggccuacaccaucuucaacaagacgcugauggaggccgacgcccacuacaagagcgugcggaccuggaacgagaucaucccguccaagggcugccugcgcgugggcgggaagugccacccccacgucaacggcguguucuucaacgggaucauccugggccccgacgggcacguccucauccccgagaugcagagcucccugcugcagcagcacauggagcuccuggagagcuccgugaucccgcugaugcacccccucgccgaccugagcaccguguucaaggaggacgacgaggcggaggacuucgucgaggugcaccuccccgacgugcacaagcagaucuccggcgucgaccugggccugcccagcugggggaaguacgugcugaugggcgccggggcccucgccacccugauccuggugaucucccugaucaagugcugccggugggucaaccgcaccaagagcauccagcagggcccgcgggagagcgagcgcaagguguccgccacgccccagaacgggaaggugaucagcuccugggagagcuacaagaucggcggcgagaccgggcucuga

SEQ ID NO: 95540 - RNA, 1575 nt, Artificial Sequence
  derived and/or modified CDS sequence (opt1) from glycoprotein__RABV__KF484532.1
augauccugcacgcccuccuguucgcccccuuccugaucagcucccucugccugggcaaguucccgaucuacaccauccccgacaagcuggggcccuggagccccaucgacauccaccaccucuccugcccgaacaaccugguggucgaggacgagggcugcaacagccuguccggguucagcuacauggagcucaaggugggcuacaucuccgcgaucaaggugaacggguucacgugcaccggcgucgugaccgaggccgagaccuacaccaacuucgugggcuacgucacgaccaccuucaagcgcaagcacuuccggcccaugcccgacgccugccgcagcgccuacaacuggaagcuggccggggacccccgguacgaggagucccugcacaacccguaccccgaguaccacuggcuccgcaccgugaagacgaccaaggagagccugaucgugaucucccccagcgucgcggaccuggaccccuacgacaagucccuccacagccggaucuucccguccggcaagugcagcgggaugaccguguccagcaccuacugcuccacgaaccacgaguacaccaucuggaugcccgagaaggugggccuggggaccagcugcgacaucuucaccacgagcaagggcaagcgcgccuccaagggcgggcggaucugcggcuucgucgacgagcgcgggcuguacaagagccucaagggcgccugcaagcugaagcugugcggcguguccgggcuccggcugauggacggcaccuggguggccauccagaccagcgacgagaccaaguggugcucccccgaccagcuggucaaccuccacgaccugcacagcgacgagaucgagcaccuggugguggaggagcucguccgcaagcgggaggagugccuggacgcgcuggaguccaucaugacgaccaagagcguguccuuccgccggcucagccaccuccgcaagcuggugcccggguucggcaaggccuacaccaucuucaacaagacccugauggaggccgacgcccacuacaaguccguccggacguggaacgagaucaucccgagcaaggggugccugcgcgugggcggcaagugccacccccacgugaacggggucuucugcaacggcaucauccuggggcccgacggccacgugcucauccccgagaugcaguccagccugcugcagcagcacauggagcuccuggaguccagcgucaucccgcugaugcacccccucgccgaccuguccaccguguucaaggacgacggggaggcggaggacuucguggagguccaccuccccgacgugcacaagcagaucagcggcguggaccugggccugcccuccugggggaaguacgcccugaugagcgccggcgcccucgccacccugauccugaugaucagccugaugaagugcugccggugggucaaccgcaccgaguccauccggcaggggccgcgcgagagcgagcggaagguguccgugacgccccagaacggcaaggucaucagcuccugggagagcuacaagaucgggggcgagaccggccucuga

SEQ ID NO: 95541 - RNA, 1575 nt, Artificial Sequence
  derived and/or modified CDS sequence (opt1) from glycoprotein__RABV__KF484533.1
auggugcugaaggcccuccuguucgcccccuuccugaucagcucccucugccugggcaaguucccgaucuacaccauccccgacaagcuggggcccuggagccccaucgacauccaccaccucuccugcccgaacaaccuggucguggaggacgagggcugcaacagccuguccggguucagcuacauggagcucaaggugggcuacaucuccgcgaucaaggucaacggguucacgugcaccggcguggugaccgaggccgagaccuacaccaacuucgucggcuacgugaccaccaccuucaagcgcaagcacuuccggcccaugcccgacgccugccgcagcgccuacaacuggaagcuggccggggacccccgguacgaggagucccugcacaacccguaccccgacuaccacuggcuccgcaccgugcggacgaccaaggagagccugaucgucaucucccccagcguggcggaccuggaccccuacgacaagucccuccacagccgcaucuucccgggcgggaagugcuccggcaugaccgugagcuccaccuacugcagcacgaaccacgaguacaccaucuggaugcccgagaaggccgggcugggcaccuccugcgacaucuucaccacgagcaagggcaagcgggccagcaagggcgggcggaccugcggguucgucgacgagcgcggccuguacaagucccucaagggcgccugcaagcugaagcugugcggggugagcggccuccgccugauggacgggaccuggguggcgauccagaccuccgacgagacgaaguggugcagccccgaccagcuggucaaccuccacgaccugcacuccgacgagaucgagcaccuggugguggaggagcucguccggaagcgcgaggagugccuggacgcccuggagagcaucaugaccaccaaguccgugagcuuccggcgccucucccaccuccggaagcuggugcccggcuucgggaaggccuacaccaucuucaacaagacgcugauggaggccgacgcccacuacaagagcguccgcaccuggaacgagaucaucccguccaagggcugccugcgggugggcgggaagugccacccccacgugagcggcgucuucuucaacgggaucauccugggccccgacgggcacgugcucauccccgagaugcaguccagccugcugcagcagcacauggagcuccuggaguccagcgucaucccgcugaugcacccccucgcggaccccuccaccguguucaaggacgacgacgaggccgaggacuucguggagguccaccuccccgacgugcacaagcaggucagcggcguggaccugggccugccguccugggggaaguacgugcugaugagcgccggcgcccuggccacccucaugcuggugaucagccugaugaagugcugccgcggguucaaccggacgaaguccauccgccagggcagccgggaguccgagcagaaggucagcgugacgccccagaacgggaaggugaucuccagcugggaguccuacaagagcggcggcgagaccgggcuguga

SEQ ID NO: 95542 - RNA, 1575 nt, Artificial Sequence
  derived and/or modified CDS sequence (opt1) from glycoprotein__RABV__KF484534.1
auggugcugcaggcccuccuguucgcccccuuccugaucagcucccucugccugggcaaguucccgaucuacaccauccccgacaagcuggggcccuggagccccaucgacauccaccaccucuccugcccgaacaaccuggucguggaggacgagggcugcaacagccuguccgggaucagcuacauggagcucaaggugggcuacaucuccgcgaucaaggucaacggguucacgugcaccggcguggugaccgaggccgagaccuacaccaacuucgucggcuacgugacgaccaccuucaagcgcaagcacuuccggcccauggccgacgccugccgcagcgccuacaacuggaagcugaccggggacccccgguacgaggagucccugcacaaccccuacccggacuaccacuggcuccgcacggugaagaccaccaaggagagccugaucgucaucucccccagcguggcggaccuggaccccuacgacaagucccuccacagccggaucuuccccuccggcaagugcagcgggaugaccaucuccagcacguacugcuccaccaaccacgaguacaccaucuggaugccggagaaggccggccuggggaccagcugcgacaucuucacgaccagcaagggcaagcgcgccuccaagggcgggaagaccugcggcuucguggacgagcgggggcuguacaagagccucaagggcgccugcaagcugaagcugugcggcgucuccgggcuccgccugauggacggcaccuggguggcgauccagacgagcgacgagaccaaguggugcucccccgaccagcuggugaaccuccacgaccugcacagcgacgagaucgagcaccuggucguggaggagcucgugaagaagcgggaggagugccuggacgcccuggaguccaucaugaccaccaagagcgucuccuuccgccggcucagccaccuccgcaagcuggugcccggguucggcaaggccuacacgaucuucaacaagacccugauggaggccgacgcccacuacaaguccauccggaccuggaacgagaucauccccagcaaggggugccugcgcgugggcggcaagugccacccgcacgucaacgggguguucuucaacggcaucauccuggggcccgacggccacgugcucauccccgagaugcaguccagccugcugcagcagcacauggagcuccuggaguccagcgucaucccccugaugcacccgcucgcggaccuguccaccguguucaaggacggggacgaggccgaggacuucgucgaggugcaccuccccgacauccacaagcagaucagcggcguggaccugggccugcccuccugggggaaguacguccugaugagcgccggcgcccucgccauccugaugcugguguucagccugaugaagugcuucuggggcgugaaccggacgaagcccauccagcgcuccccgcgggagagcgagcgcaaggucuccguggcgccccagagcgggaaggugaucuccagcugggaguccuacaagagcgggggcgagaccggccucuga

SEQ ID NO: 95543 - RNA, 1575 nt, Artificial Sequence
  derived and/or modified CDS sequence (opt1) from glycoprotein__RABV__KF484535.1
auggugcugcaggcccuccuguucgcccccuuccugaucagcucccucugccugggcaaguucccgaucuacaccauccccgacaagcuggggcccuggagccccaucgacauccaccaccucuccugcccgaacaaccuggucguggaggacgagggcugcaacagccuguccgggaucagcuacauggagcucaaggugggcuacaucuccgcgaucaaggucaacggguucacgugcaccggcguggugaccgaggccgagaccuacaccaacuucgucggcuacgugacgaccaccuucaagcgcaagcacuuccaccccaugcccgacgccugccggagcgccuacaacuggaagcuggccggggacccccgcuacgaggagucccugcacaacccguaccccgacuaccacuggcuccggaccgugaagacgaccaaggagagccugaucaucaucucccccagcgucgcggaccuggaccccuacgacaagucccuccacagccgcaucuucccguccggcaagugcagcgggaugaccaucuccagcaccuacugcuccacgaaccacgaguacaccaucuggaugcccgagaaggccggccuggggaccagcugcgacaucuucaccacgagcaagggcaagcgggccuccaagggcgggaagaccugcggcuucguggacgagcgcgggcuguacaagagccucaagggcgccugcaagcugaagcugugcggcguguccgggcuccggcugauggacggcaccugggucgcgauccagaccagcgacgagacgaaguggugcccgcccgaccagcuggugaaccuccacgaccugcacuccgacgagaucgagcaccugguggucgaggagcucgugaagaagcgcgaggagugccuggacgcccuggagagcaucaugaccaccaaguccgugagcuuccggcgccucucccaccuccggaagcugguccccggguucggcaaggccuacaccaucuucaacaagacgcugauggaggccgacgcccacuacaagagcauccgcaccuggaacgagaucauccccuccaaggggugccugcgggugggcggcaagugccacccccacgugaacggggucuucuucaacggcaucauccuggggcccgacggccacgugcucaucccggagaugcagagcucccugcugcagcagcacauggagcuccuggagagcuccgugaucccccugaugcacccccucgcggaccugagcaccgucuucaaggacggggacgaggccgaggacuucguggagguccaccuccccgacgugcacaagcagaucuccggcguggaccugggccugccgagcugggggaaguacguccugauguccgccggcgcccucgccauccugaugcuggugaucagccugaugaagugcuucuggggcgugaaccgcaccaagcccauccagcaggggccccgggagagcgagcgcaaggucuccaucgcgccccagagccggaaggugaucuccagcugggaguccuacaagagcgggggcgagacggagcucuga

SEQ ID NO: 95544 - RNA, 1575 nt, Artificial Sequence
  derived and/or modified CDS sequence (opt1) from glycoprotein__RABV__KF484536.1
auggugcugcaggcccuccuguucgcccccuuccugaucagcucccucugccugggcaaguucccgaucuacaccauccccgacaagcuggggcccuggagccccaucgacauccaccaccucuccugcccgaacaaccuggucguggaggacgagggcugcaacagccuguccggguucagcuacauggagcucaaggugggcuacaucuccgcgauccgcgucaacggguucacgugcaccggcguggugaccgaggccgagaccuacaccaacuucgucggcuacgugaccaccaccuucaagcggaagcacuuccgccccaugcccgacgccugccggagcgccuacaacuggaagcuggccggggacccccgcuacgaggagucccugcacaacccguaccccgacuaccacuggcuccggaccgugaagacgaccaaggagagccugaucgucaucucccccagcguggcggaccuggaccccuacgacaagucccuccacagccgcaucuucccgggcgggaagugcuccggcaucaccgugagcuccaccuacugcagcacgaaccacgaguacaccaucuggaugcccgagaaggccgggcugggcaccuccugcgacaucuucaccacgagcaagggcaagcgggccagcaagggcgggcggaccugcggguucgucgacgagcgcggccuguacaagucccucaagggcgccugcaagcugaagcugugcggggugagcggccuccgccugauggacgggaccuggguggcgauccagacccccgacgagacgaaguggugcucccccgaccagcuggucaaccuccacgaccugcacagcgacgagaucgagcaccugguggccgaggagcucgugcggaagcgcgaggagugccuggacgcccuggaguccaucaugaccaccaagagcgucuccuuccggcgccucagccaccuccggaagcuggugccgggcuucgggaaggccuacaccaucuucaacaagacgcugauggaggccgacgcgcacuacaaguccgugcgcaccuggaacgagaucauccccagcaagggcugccugcgggucggcgggaagugccacccccacgugaacggcguguucuucaacgggaucauccugggccccgacgggcacguccucaucccggagaugcaguccagccugcugcagcagcacauggagcuccuggaguccagccugaucccccucaugcacccccuggccgaccuguccaccguguucaaggacggcgacgaggccgaggacuucgucgaggugcaccuccccgacgugcacaagcaggucagcggcguggaccuggggcugccguccuggggcaaguacgugcucaugagcgccggggcccuggcgacccugaugcuggucaucucccucaucaagugcugccgcggcgugaaccggacgcgcagcauccagcgggggccccgcgagagcgagcgcaagguguccgucacgccccagaacggcaaggugaucagcuccugggagagcuacaaguccggcggggagacccggcuguga

SEQ ID NO: 95545 - RNA, 1575 nt, Artificial Sequence
  derived and/or modified CDS sequence (opt1) from glycoprotein__RABV__KF484537.1
auggugcugcaggcccuccuguucgcccccuuccugaucagcucccucugccugggcaaguucccgaucuacaccauccccgacaagcuggggcccuggagccccaucgacauccaccaccucuccugcccgaacaaccuggucguggaggacgagggcugcaacagccuguccggguucagcuacauggagcucaaggugggcuacaucuccgcgauccgcgucaacggguucacgugcaccggcguggugaccgaggccgagaccuacaccaacuucgucggcuacgugaccaccaccuucaagcggaagcacuuccgccccaugcccgacgccugccggagcgccuacaacuggaagcuggccggggacccccgcuacgaggagucccugcacaacccguaccccgacuaccacuggcuccggaccgugaagacgaccaaggagagccugaucgucaucucccccagcguggcggaccuggaccccuacgacaagucccuccacagccgcaucuucccgggcgggaagugcuccggcaucaccgugagcuccaccuacugcagcacgaaccacgaguacaccaucuggaugcccgagaaggccgggcugggcaccuccugcgacaucuucaccacgagcaagggcaagcgggccagcaagggcgggcggaccugcggguucgucgacgagcgcggccuguacaagucccucaagggcgccugcaagcugaagcugugcggggugagcggccuccgccugauggacgggaccuggguggcgauccagacccccgacgagacgaaguggugcucccccgaccggcuggucaaccuccacgaccugcacagcgacgagaucgagcaccugguggccgaggagcucgugcgcaagcgggaggagugccuggacgcccuggaguccaucaugaccaccaagagcgucuccuuccgccggcucagccaccuccgcaagcuggugccgggcuucgggaaggccuacaccaucuucaacaagacgcugauggaggccgacgcgcacuacaaguccgugcggaccuggaacgagaucauccccagcaagggcugccugcgcgucggcgggaagugccacccccacgugaacggcguguucuucaacgggaucauccugggccccgacgggcacguccucaucccggagaugcaguccagccugcugcagcagcacauggagcuccuggaguccagcgugaucccccugaugcacccccucgccgaccuguccaccgucuucaaggacggcgacgaggccgaggacuucguggaggugcaccuccccgacguccacaagcaggucagcggcguggaccuggggcugccguccuggggcaaguacgugcugaugagcgccggggcccucgcgacccugaugcuggugaucucccugaucaagugcugccggggcgugaaccgcacgcggagcauccagcgcgggccccgcgagagcgagcggaaggucuccgugacgccccagaacggcaaggugaucagcuccugggagagcuacaaguccggcggggagacccgccucuga

SEQ ID NO: 95546 - RNA, 1575 nt, Artificial Sequence
  derived and/or modified CDS sequence (opt1) from glycoprotein__RABV__KF484538.1
auggugcugcaggcccuccuguucgcccccuuccugaucagcucccucugcuucggcaaguucccgaucuacaccauccccgacaagcuggggcccuggagccccaucgacauccaccaccuguccugcccgaacaaccucgucguggaggacgagggcugcaacagccuguccggguucagcuacauggagcugaaggugggcuacaucuccgcgaucaaggucaacggguucacgugcaccggcguggugaccgaggccgagaccuacaccaacuucgucggcuacgugacgaccaccuucaagcgcaagcacuuccggcccaugcccgacgccugccgcagcgccuacaacuggaagcucgccggggacccccgguacgaggagucccugcacaacccguaccccgaguaccacuggcugcgcaccgugaagacgaccaaggagagccucaucgucaucucccccagcguggcggaccuggaccccuacgacaagucccugcacagccggaucuucccgaacggcaagugcuccgggaugaccgugagcuccaccuacugcagcacgaaccacgaguacaccaucuggaugcccgagaaggucggccucgggaccuccugcgacaucuucaccacgagcaagggcaagcgcgccagcaagggcgggcggaccugcggcuucguggacgagcgcgggcuguacaagucccugaagggcgccugcaagcucaagcugugcggcgugagcgggcugcggcucauggacggcaccugggucgccauccagaccuccgacgagacgaaguggugcagccccgaccagcuggugaaccugcacgaccuccacuccgacgagaucgagcaccugguggucgaggagcuggugcgcaagcgggaggagugccucgacgcgcuggagagcaucaugaccaccaaguccgugagcuuccgccggcugucccaccuccgcaagcugguccccggguucggcaaggccuacaccaucuucaacaagacgcugauggaggccgacgcccacuacaagagcgugcggaccuggaacgagaucaucccguccaaggggugccuccgcgugggcggcaagugccacccccacgucaacgggguguucuucaacggcaucauccuggggcccgacggccacguccugauccccgagaugcagagcucccuccugcagcagcacaucgagcugcucgagagcuccgugaucccgcugaugcacccccuggccgaccucagcaccguguucaaggacggggacgaggcggaggacuucgucgaggugcaccuccccgacgugcacaagcagaucuccggcgucgaccugggccugcccagcugggggaaguacgugcugauguccgccggcgcccuggccacccucauccuggugaucagccugaugaagugcugccggugggucaaccgcaccaagagcauccagcaggggccgcgggaguccgagcgcaaggugagcgugacgccccagaacggccgggucaucuccagcugggaguccuacaagaucgggggcgagaccggccuguga

SEQ ID NO: 95547 - RNA, 1575 nt, Artificial Sequence
  derived and/or modified CDS sequence (opt1) from glycoprotein__RABV__KF484539.1
auggugcugcaggcccuccuguucgcccccuuccugaucagcucccucugccugggcaaguucccgaucuacaccauccccgacaagcuggggcccuggagccccaucgacauccaccaccucuccugcccgaacaaccuggucguggaggacgagggcugcaacagccuguccggguucagcuacauggagcucaaggugggcuacaucuccgcgaucaaggucaacggguucacgugcaccggcguggugaccgaggccgagaccuacaccaacuucgucggcuacgugaccaccaccuucaagcgcaagcacuuccggcccaugcccgacgccugccgcagcgccuacaacuggaagcuggccggggacccccgguacgaggagucccugcacaacccguaccccgacuaccacuggcuccgcaccgugaagacgaccaaggagagccugaucgucaucucccccagcguggcggaccuggaccccuacgacaagucccuccacagccggaucuucccgggcgggaagugcuccggcaugaccgugagcuccaccuacugcagcacgaaccacgaguacaccaucuggaugcccgagaaggccgggcugggcaccuccugcgacaucuucaccacgagcaagggcaagcgcgccaccaagggcgggaagaccugcggguucgucgacgagcggggccuguacaagagccucaagggcgccugcaagcugaagcugugcgggguguccggccuccgccugauggacgggaccuggguggcgauccagacgagcgacgagaccaaguggugcucccccgaccagcuggucaaccuccacgaccugcacagcgacgagaucgagcaccuggugguggaggagcucguccggaagcgcgaggagugccuggacgcccuggaguccaucaugaccaccaagagcguguccuuccggcgccucagccaccuccggaagcuggugcccggcuucgggaaggccuacacgaucuucaacaagacccugauggaggccgacgcccacuacaaguccguccgcaccuggaacgagaucaucccgagcaagggcugccugcgggugggcgggaagugccacccccacgugaacggcgucuucuucaacgggaucauccugggccccgacgggcacgugcucauccccgagaugcaguccagccugcugcagcagcacauggagcuccuggaguccagcgucaucccgcugaugcacccccucgcggaccccuccaccguguucaaggacgacgacgaggccgaggacuucguggagguccaccuccccgacgugcacaagcaggucagcggcguggaccugggccugccguccugggggcgcuacgugcugaugagcgccggcgcccuggccauccucaugcuggugaucucccugaugaagugcugcacgggggucaaccggaccaagagcaucaagcagggcagccgcgaguccgagcggaaggugagcaucacgccccagaacgggaaggugaucuccagcugggaguccuacaagagcggcggcgagaccgggcuguga

SEQ ID NO: 95548 - RNA, 1575 nt, Artificial Sequence
  derived and/or modified CDS sequence (opt1) from glycoprotein__RABV__KF484540.1
auggugcugcaggcccuccuguucgcccccuuccugaucagcucccucugccugggcaaguucccgaucuacaccauccccgacaagcuggggcccuggagccccaucgacauccaccaccucuccugcccgaacaaccuggucguggaggacgagggcugcaacagccuguccggguucagcuacauggagcucaaggugggcuacaucuccgcgauccgcgucaacggguucacgugcaccggcguggugaccgaggccgagaccuacaccaacuucgucggcuacgugacgaccaccuucaagcggaagcacuuccgccccaugcccgacgccugccggagcgccuacaacuggaagcuggccggggacccccgcuacgaggagucccugcacaacccguaccccgacuaccacuggcuccggaccgugaagacgaccaaggagagccugaucgucaucucccccagcguggcggaccuggaccccuacgacaagucccuccacagccgcaucuucccgggcgggaagugcuccggcaucaccgugagcuccaccuacugcagcacgaaccacgaguacaccaucuggaugcccgagaaggccgggcugggcaccuccugcgacaucuucaccacgagcaagggcaagcgggccagcaagggcgggcggaccugcggguucgucgacgagcgcggccuguacaagucccucaagggcgccugcaagcugaagcugugcggggugagcggccuccgccugauggacgggaccuggguggcgauccagacccccgacgagaucaaguggugcucccccgaccagcuggucaaccuccacgaccugcacagcgacgagaucgagcaccugguggccgaggagcucgugcggaagcgcgaggagugccuggacgcccuggaguccaucaugacgaccaagagcgucuccuuccggcgccucagccaccuccggaagcuggugccgggcuucgggaaggccuacaccaucuucaacaagacccugauggaggccgacgcgcacuacaaguccgugcgcacguggaacgagaucauccccagcaagggcugccugcgggucggcgggaagugccacccccacgugaacggcguguucuucaacgggaucauccugggccccgacgggcacguccucaucccggagaugcaguccagccugcugcagcagcacauggagcuccuggaguccagcgugaucccccugaugcacccccucgccgaccuguccaccgucuucaaggacggcgacgaggccgaggacuucaucgaggugcaccuccccgacgugcacaagcaggucagcggcguggaccuggggcugccguccuggggcaaguacgugcugaugagcgccggggcccucgcgacccugaugcuggucaucucccugaucaagugcugcaagggcgugaaccgcaccaagagcauccagugggggccccgggagagcgagcgcaagguguccgucacgccccagaacggcaaggugaucagcuccugggagagcuacaaguccggcggggagacccggcucuga

SEQ ID NO: 95549 - RNA, 1575 nt, Artificial Sequence
  derived and/or modified CDS sequence (opt1) from glycoprotein__RABV__KF484541.1
augauccugaaggcccuccuguucgcccccuuccugaucagcucccucugccugggcaaguucccgaucuacaccauccccgacaagcuggggcccuggagccccaucgacauccaccaccucuccugcccgaacaaccugguggucgaggacgagggcugcaacagccuguccggguucagcuacauggagcucaaggugggcuacaucuccgcgaucaaggugaacggguucacgugcaccggcgucgugaccgaggccgagaccuacaccaacuucgugggcuacgucaccaccaccuucaagcgcaagcacuuccggcccaugcccgacgccugccgcagcgccuacaacuggaagcuggccggggacccccgguacgaggagucccugcacaacccguaccccgacuaccacuggcuccgcaccgugaagacgaccaaggagagccugaucaucaucucccccagcguggcggaccuggaccccuacgacaagucccuccacagccggaucuucccgggcgggaagugcuccggcaugaccgucagcuccaccuacugccccacgaaccacgaguacaccaucuggaugcccgagaaggccagccuggggaccuccugcgacaucuucaccacgagcaagggcaagcgcgccagccggggcgggcggaccugcggcuucguggacgagcgcgggcuguacaagucccucaagggcgccugcaagcugaagcugugcggcgugagcgggcuccgccugauggacggcaccugggucgcgauccagaccuccgacgagacgaaguggugcagccccgaccagcuggugaaccuccacgaccugcacuccgacgagaucgagcaccugguggucgaggagcucgugcggaagcgcgaggagugccuggacgcccuggagagcaucaugaccaccaaguccgugagcuuccggcgccucucccaccuccggaagcuggucccgggguucggcaaggccuacaccaucuucaacaagacgcugauggaggccgacgcccacuacaagagcgugcgcaccuggaacgagaucauccccuccaaggggugccugcgggugggcggcaagugccacccccacgucaacgggguguucuucaacggcaucauccuggggcccgacggccacgugcucaucccggagaugcagagcucccugcugcagcagcacauggagcuccuggagagcuccgucaucccccugaugcacccccucgcggaccccagcaccguguucaaggacgacgacgaggccgaggacuucgucgaggugcaccucccggacgugcacaagcaggucuccgggguggaccugggccugcccagcuggggcaaguacgugcugauguccgccgggacccuggccacgcucaugcuggucaucagccugaugaagugcugccgcggcuucaaccggaccaagagcauccgccaggacuccggggagagcggccggaagguguccgugacgccccagaacgggaaggucaucagcuccugggagagcuacaaguccggcggcgagaccgggcuguga

SEQ ID NO: 95550 - RNA, 1575 nt, Artificial Sequence
  derived and/or modified CDS sequence (opt1) from glycoprotein__RABV__KF484542.1
auggugcugcagguccuccuguucgcccuguuccucaucagcucccugugccugggcaaguuccccaucuacaccaucccggacaagcucgggcccuggagccccaucgacauccaccaccuguccugccccaacaaccuggugguggaggacgagggcugcaacagccucuccggguucagcuacauggagcugaaggucggcuacaucuccgccaucaaggugaacggguucacgugcaccggcguggucaccgaggcggagaccuacaccaacuucgugggcuacgugacgaccaccuucaagcgcaagcacuuccggccgaugcccgacgccugccgcagcgccuacaacuggaagcuggccggggacccccgguacgaggagucccuccacaaccccuacccggaguaccacuggcugcgcaccgucaagacgaccaaggagagccugaucgugaucucccccagcguggccgaccucgaccccuacgacaagucccugcacagccggaucuuccccuccggcaagugcagcgggaugaccgucuccagcaccuacugcuccacgaaccacgaguacaccaucuggaugccggagaaggugagccugggcaccagcugcgacaucuucaccacguccaaggggaagcgcgcgagcaagggcggccggaccugcggguucguggacgagcgcggccucuacaagucccugaagggggccugcaagcugaagcucugcggcgucagcggccugcggcugauggacgggaccuggguggccauccagaccuccgacgaggccaaguggugcagccccgaccagcucgugaaccugcacgaccugcacuccgacgagaucgagcaccucgucguggaggagcuggugcgcaagcgggaggagugccuggacgcgcucgagagcaucaugacgaccaaguccgucagcuuccgccggcugucccaccuccgcaagcuggugcccggcuucgggaaggccuacaccaucuucaacaagacccugauggaggccgacgcccacuacaagagcgugcggacguggaacgagaucauccccuccaagggcugccugcgcgucgggggcaagugccacccgcacgugaacggcgucuucuucaacgggaucauccucggccccgacgggcacgugcugauccccgagaugcagagcucccugcuccagcagcacaucgagcugcuggagagcuccgugaucccccucaugcacccgcuggccgaccugagcaccgucuucaaggacggcgacgaggcggaggacuucguggaggugcaccuccccgacguccacaagcagaucuccgggguggaccugggccugcccagcuggggcaaguacgugcucaugagcgccggggcccuggccacccugguccuggugaucucccucaugaagugcugccggugggugaaccgcaccaagagcauccagcagggcccccgggaguccgagcgccgggucagcgugacgccgcagaacgggaaggugaucuccagcugggaguccuacaagaucggcggggagaccggccuguga

SEQ ID NO: 95551 - RNA, 1575 nt, Artificial Sequence
  derived and/or modified CDS sequence (opt1) from glycoprotein__RABV__KF484543.1
auggugcugcaggcccuccuguucgcccccuuccugaucagcucccucugccugggcaaguucccgaucuacaccauccccgacaagcuggggcccuggagccccaucgacauccaccaccucuccugcccgaacaaccuggucguggaggacgagggcugcaacagccuguccggguucagcuacauggagcucaaggugggcuacaucuccgcgaucaaggucaacggguucacgugcaccggcguggugaccgaggccgagaccuacaccaacuucgucggcuacgugacgaccaccuucaagcgcaagcacuuccggcccaugcccgacgccugccgcagcgccuacaacuggaagcuggccggggacccccgguacgaggagucccugcacaacccguaccccgaguaccacuggcuccgcaccgugaagacgaccaaggagagccugaucgucaucucccccagcguggcggaccuggaccccuacgacaagucccuccacagccggaucuucccguccggcaagugcagcgggaugaccguguccagcaccuacugcuccacgaaccacgaguacaccaucuggaugcccgagaaggucggccuggggaccagcugcgacaucuucaccacgagcaagggcaagcgcgccuccaagggcgggcggaccugcggcuucguggacgagcgcgggcuguacaagagccucaagggcgccugcaagcugaagcugugcggcguguccgggcuccggcugauggacggcaccugggucgccaugcagaccagcgacgagacgaaguggugcucccccgaccagcuggugaaccuccacgaccugcacagcgacgagaucgagcaccugguggucgaggagcucgugcgcaagcgggaggagugccuggacgcgcuggaguccaucaugaccaccaagagcguguccuuccgccggcucagccaccuccgcaagcugguccccggguucggcaaggccuacaccaucuucaacaagacgcugauggaggccgacgcccacuacaaguccgugcggaccuggagcgagaucaucccguccaaggggugccugcgcgugggcggcaagugccacccccacgucaacgggguguucuucaacggcaucauccuggggcccgacggccacguccucauccccgagaugcagagcucccugcugcagcagcacauggagcuccuggagagcuccgugaucccgcugaugcacccccucgccgaccugagcaccguguucaaggacggggacgaggcggaggacuucgucgaggugcaccuccccgacgugcacaagcagaucuccggcgucgaccugggccugcccagcugggggaaguacgugcugaugagcgccggcgcccucgccacccugauccuggugaucucccugaugaagugcugccggugggucaacaagaccaagagcauccagcaggggccgcgcgaguccgagcggaaggugagcgugacgccccagaacggcaaggucaucuccagcugggaguccuacaagaucgggggcgagaccggccucuga

SEQ ID NO: 95552 - RNA, 1575 nt, Artificial Sequence
  derived and/or modified CDS sequence (opt1) from glycoprotein__RABV__KF484544.1
auggugcugcaggcccuccuguucgcccccuuccugaucagcucccucugccugggcaaguucccgaucuacaccauccccgacaagcuggggcccuggagccccaucgacauccaccaccucuccugcccgaacaaccuggucguggaggacgagggcugcaacagccuguccggguucagcuacauggagcucaaggugggcuacaucuccgcgaucaaggucaacggguucacgugcaccggcguggugaccgaggccgagaccuacaccaacuucgucggcuacgugacgaccaccuucaagcgcaagcacuuccggcccaugcccgacgccugccgcagcgccuacaacuggaagcuggccggggacccccgguacgaggagucccugcacaacccguaccccgaguaccacuggcuccgcaccgugaagacgaccaaggagagccugaucgucaucucccccagcguggcggaccuggaccccuacgacaagucccuccacagccggaucuucccguccggcaagugcagcgggaugaccguguccagcaccuacugcuccacgaaccacgaguacaccaucuggaugcccgagaaggucggccuggggaccagcugcgacaucuucaccacgagcaagggcaagaaggccuccaagggcgggcggaccugcggcuucguggacgagcgcgggcuguacaagagccucaagggcgccugcaagcugaagcugugcggcguguccgggcuccgccugauggacggcaccugggucgccaugcagaccagcgacgagacgaaguggugcucccccgaccagcuggugaaccuccacgaccugcacagcgacgagaucgagcaccugguggucgaggagcucgugcggaagcgcgaggagugccuggacgcgcuggaguccaucaugaccaccaagagcguguccuuccggcgccucagccaccuccggaagcugguccccggguucggcaaggccuacaccaucuucaacaagacgcugauggaggccgacgcccacuacaaguccgugcgcaccuggaacgagaucaucccgagcaaggggugccugcgggugggcggcaagugccacccccacgucaacgggguguucuucaacggcaucauccuggggcccgacggccacguccucauccccgagaugcaguccuuccugcugcagcagcacauggagcuccuggagagcuccgugaucccgcugaugcacccccucgccgaccugagcaccguguucaaggacggggacgaggcggaggacuucgucgaggugcaccuccccgacgugcacaagcagaucuccggcgucgaccugggccugcccagcugggggaaguacgugcugauguccgccggcgcccucgccacccugauccuggugaucagccugaugaagugcugccgcugggucaaccggaccaagagcauccagcaggggccgcgcgaguccgagcggaaggugagcgugacgccccagaacggcaaggucaucuccagcugggaguccuacaagaucgggggcgagaccggccucuga

SEQ ID NO: 95553 - RNA, 1575 nt, Artificial Sequence
  derived and/or modified CDS sequence (opt1) from glycoprotein__RABV__KF484545.1
auggugcugcaggcccuccuguucgcccccuuccugaucagcucccucugccugggcaaguucccgaucuacaccauccccgacaagcuggggcccuggagccccaucgacauccaccaccucuccugcccgaacaaccuggucguggaggacgagggcugcaacagccuguccggguucagcuacauggagcucaaggugggcuacaucuccgcgaucaaggucaacggguucacgugcaccggcguggugaccgaggccgagaccuacaccaacuucgucggcuacgugaccaccaccuucaagcgcaagcacuuccggcccaugcccgacgccugccgcagcgccuacaacuggaagcuggccggggacccccgguacgaggagucccugcacaacccguaccccgaguaccacuggcuccgcaccgugaagacgaccaaggagagccugaucgucaucucccccagcguggcggaccuggaccccuacgacaagucccuccacagccggaucuucccguccggcaagugcagcgggaugaccguguccagcaccuacugcuccacgaaccacgaguacaccaucuggaugcccgagaaggucggccuggggaccagcugcgacaucuucaccacgagcaagggcaagaaggccuccaagggcgggcggaccugcggcuucguggacgagcgcgggcuguacaagagccucaagggcgccugcaagcugaagcugugcggcguguccgggcuccgccugauggacggcaccugggucgccaugcagaccagcgacgagacgaaguggugcucccccgaccagcuggugaaccuccacgaccugcacagcgacgagaucgagcaccugguggucgaggagcucgugcggaagcgcgaggagugccuggacgcgcuggaguccaucaugaccaccaagagcguguccuuccggcgccucagccaccuccggaagcugguccccggguucggcaaggccuacaccaucuucaacaagacgcugauggaggccgacgcccacuacaaguccgugcgcaccuggaacgagaucaucccgagcaaggggugccugcgggugggcggcaagugccacccccacgucaacgggguguucuucaacggcaucauccuggggcccgacggccacguccucauccccgagaugcaguccagccugcugcagcagcacauggagcuccuggaguccagcgugaucccgcugaugcacccccucgccgaccuguccaccguguucaaggacggggacgaggcggaggacuucgucgaggugcaccuccccgacgugcacaagcagaucagcggcgucgaccugggccugcccuccugggggaaguacgugcugaugagcgccggcgcccucgccacccugauccuggugaucagccugaugaagugcugccgcugggucaaccggacgaaguccauccagcaggggccgcgcgagagcgagcggaagguguccgugacgccccagaacggcaaggucaucagcuccugggagagcuacaagaucgggggcgagaccggccucuga

SEQ ID NO: 95554 - RNA, 1575 nt, Artificial Sequence
  derived and/or modified CDS sequence (opt1) from glycoprotein__RABV__KF484546.1
auggugcugcaggcccuccuguucgcccccuuccugaucagcucccucugccugggcaaguucccgaucuacaccauccccgacaagcuggggcccuggagccccaucgacauccaccaccucuccugcccgaacaaccuggucguggaggacgagggcugcaacagccuguccggguucagcuacauggagcucaaggugggcuacaucuccgcgaucaaggucaacggguucacgugcaccggcguggugaccgaggccgagaccuacaccaacuucgucggcuacgugaccaccaccuucaagcgcaagcacuuccggcccaugcccgacgccugccgcagcgccuacaacuggaagcuggccggggacccccgguacgaggagucccugcacaacccguaccccgaguaccacuggcuccgcaccgugaagacgaccaaggagagccugaucgucaucucccccagcguggcggaccuggaccccuacgacaagucccuccacagccggaucuucccguccggcaagugcagcgggaugaccguguccagcaccuacugcuccacgaaccacgaguacaccaucuggaugcccgagaaggucggccuggggaccagcugcgacaucuucaccacgagcaagggcaagcgcgccuccaagggcgggcggaccugcggcuucguggacgagcgcgggcuguacaagagccucaagggcgccugcaagcugaagcugugcggcguguccgggcuccggcugauggacggcaccugggucgccaugcagaccagcgacgagacgaaguggugcucccccgaccagcuggugaaccuccacgaccugcacagcgacgagaucgagcaccugguggucgaggagcucgugcgcaagcgggaggagugccuggacgcgcuggaguccaucaugaccaccaagagcguguccuuccgccggcucagccaccuccgcaagcugguccccggguucggcaaggccuacaccaucuucaacaagacgcugauggaggccgacgcccacuacaaguccgugcggaccuggaacgagaucaucccgagcaaggggugccugcgcgugggcggcaagugccacccccacgucaacgggguguucuucaacggcaucauccuggggcccgacggccacguccucauccccgagaugcaguccagccugcugcagcagcacauggagcuccuggaguccagcgugaucccgcugaugcacccccucgccgaccuguccaccguguucaaggacggggacgaggcggaggacuucgucgaggugcaccuccccgacgugcacaagcagaucagcggcgucgaccugggccugcccuccugggggaaguacgugcugaugagcgccggcgcccucgccacccugauccuggugaucagccugaugaagugcugccggugggucaaccgcacgaaguccauccagcaggggccgcgggagagcgagcgcaagguguccgugacgccccagaacggcaaggucaucagcuccugggagagcuacaagaucgggggcgagaccggccucuga

SEQ ID NO: 95555 - RNA, 1575 nt, Artificial Sequence
  derived and/or modified CDS sequence (opt1) from glycoprotein__RABV__KF484547.1
auggugcugcaggcccuccuguucgcccccuuccugaucagcucccucugccugggcaaguucccgaucuacaccauccccgacaagcuggggcccuggagccccaucgacauccaccaccucuccugcccgaacaaccuggucguggaggacgagggcugcaacagccuguccggguucagcuacauggagcucaaggugggcuacaucuccgcgaucaaggucaacggguucacgugcaccggcguggugaccgaggccgagaccuacaccaacuucgucggcuacgugacgaccaccuucaagcgcaagcacuuccggcccaugcccgacgccugccgcagcgccuacaacuggaagcuggccggggacccccgguacgaggagucccugcacaacccguaccccgacuaccacuggcuccgcaccgugaagacgaccaaggagagccugaucgucaucucccccagcguggcggaccuggaccccuacgacaagucccuccacagccggaucuucccguccggcaagugcagcgggaugaccguguccagcaccuacugcuccacgaaccacgaguacaccaucuggaugcccgagaaggccggccuggggaccagcugcgacaucuucaccacgagcaagggcaagcgcgccuccaagggcgggcggaccugcggcuucgucgacgagcgcgggcuguacaagagccucaagggcgccugcaagcugaagcugugcggcguguccgggcuccggcugauggacggcaccuggguggcgauccagaccagcgacgagacgaaguggugcuccagcgaccagcuggucaaccuccacgaccugcacuccgacgagaucgagcaccuggugguggaggagcucguccgcaagcgggaggagugccuggacgcccuggagagcaucaugaccaccaaguccgugagcuuccgccggcucucccaccuccgcaagcuggugcccggguucggcaaggccuacaccaucuucaacaagacgcugauggaggccgacgcccacuacaagagcguccggaccuggaacgaggugauccccuccaaggggugccugcgcgugggcggcaagugccacccgcacgucaacgggguguucuucaacggcaucauccuggggcccgacggccacguccucauccccgagaugcagagcucccugcugcagcagcacauggagcuccuggagagcuccgugaucccccugaugcacccgcucgcggacaucagcaccguguucaaggacggggacgaggccgaggacuucgucgaggugcaccuccccgacgugcacaagcagaucuccggcgucgaccugggccugcccagcugggggaaguacgugcugaugagcgccggcgcccuggccauccucaugcugaugaucucccugaugaagugcugccgcggggugaaccggaccaagagcauccagcagggcccccgggaguccgagcgcaaggucagcgugacgccgcagaacgggaaggugaucuccagcugggaguccuacaagagcggcggcgagaccgggcuguga

SEQ ID NO: 95556 - RNA, 1575 nt, Artificial Sequence
  derived and/or modified CDS sequence (opt1) from glycoprotein__RABV__KF484548.1
auggugcugcagguccuccuguucgcccuguuccucaucagcucccugugccugggcaaguuccccaucuacaccaucccggacaagcucgggcccuggagccccaucgacauccaccaccuguccugccccaacaaccuggugguggaggacgagggcugcaacagccucuccggguucagcuacauggagcugaaggucggcuacaucuccgccaucaaggugaacggguucacgugcaccggcguggucaccgaggcggagaccuacaccaacuucgugggcuacgugacgaccaccuucaagcgcaagcacuuccggccgaugcccgacgccugccgcagcgccuacaacuggaagcuggccggggacccccgguacgaggagucccuccacaaccccuacccggaguaccacuggcugcgcaccgucaagacgaccaaggagagccugaucgugaucucccccagcguggccgaccucgaccccuacgacaagucccugcacagccggaucuuccccuccggcaagugcagcgggaugaccgucuccagcaccuacugcuccacgaaccacgaguacaccaucuggaugccggagaaggugagccugggcaccagcugcgacaucuucaccacguccaaggggaagcgcgcgagcaagggcggccggaccugcggguucguggacgagcgcggccucuacaagucccugaagggggccugcaagcugaagcucugcggcgucagcggccugcggcugauggacgggaccuggguggccauccagaccuccgacgaggccaaguggugcagccccgaccagcucgugaaccugcacgaccugcacuccgacgagaucgagcaccucgucguggaggagcuggugcgcaagcgggaggagugccuggacgcgcucgagagcaucaugacgaccaaguccaucagcuuccgccggcugucccaccuccgcaagcugguccccggcuucgggaaggccuacaccaucuucaacaagacccugauggaggccgacgcccacuacaagagcgugcggacguggaacgagaucauccccuccaagggcugccugcgcgucgggggcaagugccacccgcacgugaacggcguguucuucaacgggaucauccucggccccgacgggcacguccugauccccgagaugcagagcucccugcuccagcagcacaucgagcugcuggagagcuccgugaucccccucaugcacccgcuggccgaccugagcaccguguucaaggacggcgacgaggcggaggacuucgucgaggugcaccuccccgacgugcacaagcagaucuccggggucgaccugggccugcccagcuggggcaaguacgugcucaugagcgccggggcccuggccacccuggugcuggucaucucccucaugaaguggugccggugggugaacaagaccaagagcauccagcagggcccccgcgaguccgagcggaaggugagcgucacgccgcagaacgggaaggugaucuccagcugggaguccuacaagaucggcggggagaccggccuguga

SEQ ID NO: 95557 - RNA, 1575 nt, Artificial Sequence
  derived and/or modified CDS sequence (opt1) from glycoprotein__RABV__KF484549.1
auggugcugcaggcccuccuguucgcccccuuccugaucagcucccucugccugggcaaguucccgaucuacaccauccccgacaagcuggggcccuggagccccaucgacauccaccaccucuccugcccgaacaaccuggucguggaggacgagggcugcaacagccuguccggguucagcuacauggagcucaaggugggcuacaucuccgcgaucaaggucaacggguucacgugcaccggcguggugaccgaggccgagaccuacaccaacuucgucggcuacgugacgaccaccuucaagcgcaagcacuuccggcccaugcccgacgccugccgcagcgccuacaacuggaagcuggccggggacccccgguacgaggagucccugcacaacccguaccccgacuaccacuggcuccgcaccgugaagacgaccaaggagagccugaucgucaucucccccagcguggcggaccuggaccccuacgacaagucccuccacagccggaucuucccgggcgggaagugcuccggcaugaccgugagcuccaccuacugccccacgaaccacgaguacaccaucuggaugcccgagaaggccgggcugggcaccagcugcgacaucuucaccacguccaagggcaagcgcgccagcaagggcgggcggaccugcggguucgucgacgagcgcggccuguacaagagccucaagggcgccugcaagcugaagcugugcgggguguccggccuccggcugauggacgggaccuggguggcgauccagaccagcgacgagacgaaguggugcucccccgaccagcuggucaaccuccacgaccugcacagcgacgagaucgagcaccuggugguggaggagcucguccgcaagcgggaggagugccuggacgcccuggaguccaucaugaccaccaagagcguguccuuccgccggcucagccaccuccgcaagcuggugccgggcuucgggaaggccuacaccaucuucaacaagacgcugauggaggccgacgcccacuacaaguccguccggaccuggaacgagaucauccccagcaagggcugccugcgcgugggcgggaagugccacccccacgugaacggcgucuucuucaacgggaucauccugggccccgacgggcacgugcucaucccggagaugcaguccagccugcugcagcagcacgucgagcuccuggaguccagcgugaucccccugaugcacccccucgcggaccccuccaccguguucaaggacgacgacgaggccgaggacuucgucgaggugcaccucccggacgugcaccggcaggucagcggcguggaccugggccugcccuccugggggaaguacgugcugaugagcgccggcgcccuggccacccucaugcuggucaucucccugaugaagugcugccgcggguucaaccggaccaagagcacccgccagggcagccgggaguccgagcgcaaggugagcgugacgccccagaacgggaaggucaucuccagcugggaguccuacaagagcggcggcgagaccgggcuguga

SEQ ID NO: 95558 - RNA, 1575 nt, Artificial Sequence
  derived and/or modified CDS sequence (opt1) from glycoprotein__RABV__KF484550.1
auggugcugcaggcccuccuguucgcccccuuccugaucagcucccucugcuucggcaaguucccgaucuacaccauccccgacaagcuggggcccuggagccccaucgacauccaccaccuguccugcccgaacaaccucgucguggaggacgagggcugcaacagccuguccggguucagcuacauggagcugaaggugggcuacaucuccgcgaucaaggucaacggguucacgugcaccggcguggugaccgaggccgagaccuacaccaacuucgucggcuacgugaccaccaccuucaagcgcaagcacuuccggcccaugcccgacgccugccgcagcgccuacaacuggaagguggccggggacccccgguacgaggagucccuccacaacccguaccccgacuaccacuggcugcgcaccgucaagacgaccaaggagagccugaucaucaucucccccagcguggcggaccucgaccccuacgacaagucccugcacagccggaucuucccgggcgggaagugcuccggcaugaccaucagcuccaccuacugcagcacgaaccacgacuacaccaucuggaugcccgagaagaccgggcugggcaccuccugcgacaucuucacgaccagcaagggcaagcgcgccagcaagggcgggcggaccugcggguucguggacgagcgcggccucuacaagucccugaagggcgccugcaagcugaagcucugcggggucagcggccugcggcugauggacgggaccugggccgcgauccagacguccgacgagaccaaguggugcagccccgaccagcucgugaaccugcacgaccugcacuccgacgagaucgagcaccucguggucgaggagcuggugcgccggcgcgaggagugccuggacgcccucgagagcaucaugaccaccaaguccgugagcuuccggcgccugucccaccuccggaagcugguccccggcuucgggaaggccuacacgaucuucaacaagacccugauggaggccgacgcccacuacaagagcgugcgcaccuggaacgagaucaucccguccaagggcugccugcgggugggcgggaagugccacccccacgucaacggcguguucuucaacgggaucauccucggccccgacgggcacgugcugauccccgagaugcagagcucccugcuccagcagcacauggagcugcuggagagcuccgucaucccgcucaugcacccccuggcggaccugagcaccguguucaaggacggcgacgaggccgaggacuucgucgaggugcaccuccccgacgugcacaagcaggucuccggcguggaccuggggcugcccagcuggggcaaguacaugcucauguccgccggggcccuggccacgcugaugcucguggucccgcugaugaagugcugccgccgggugaaccgcaccaagagcauccagcagggcccccgggagagcgaccgcaagguguccgucacgccccagagcgggaaggugaucuccagcugggaguccuacaagagcggcggcgggaccggccuguga

SEQ ID NO: 95559 - RNA, 1575 nt, Artificial Sequence
  derived and/or modified CDS sequence (opt1) from glycoprotein__RABV__KF484551.1
auggugcugcaggcccuccuguucgcccccuuccugaucagcucccucugccugggcaaguucccgaucuacaccauccccgacaagcuggggcccuggagccccaucgacauccaccaccucuccugcccgaacaaccuggucguggaggacgagggcugcaacagccuguccggguucagcuacauggagcucaaggugggcuacaucuccgcgaucaaggucaacggguucacgugcaccggcguggugaccgaggccgagaccuacaccaacuucgucggcuacgugaccaccaccuucaagcgcaagcacuuccggcccaugcccgacgccugccgcagcgccuacaacuggaagcuggccggggacccccgguacgaggagucccugcacaacccguaccccgaguaccacuggcuccgcaccgugaagacgaccaaggagagccugaucgucaucucccccagcguggcggaccuggaccccuacgacaagucccuccacagccggaucuucccguccggcaagugcagcgggaugaccguguccagcaccuacugcuccacgaaccacgaguacaccaucuggaugcccgagaaggucggccuggggaccagcugcgacaucuucaccacgagcaagggcaagcgcgccuccaagggcgggcggaccugcggcuucguggacgagcgcgggcuguacaagagccucaagggcgccugcaagcugaagcugugcggcguguccgggcuccggcugauggacggcaccugggucgccaugcagaccagcgacgagacgaaguggugcucccccgaccagcuggugaaccuccacgaccugcacagcgacgagaucgagcaccugguggucgaggagcucgugcgcaagcgggaggagugccuggacgcgcuggaguccaucaugaccaccaagagcguguccuuccgccggcucagccaccuccgcaagcugguccccggguucggcaaggccuacaccaucuucaacaagacgcugauggaggccgacgcccacuacaaguccgugcggaccuggaacgagaucaucccgagcaaggggugccugcgcgugggcggccggugccacccccacgucaacgggguguucuucaacggcaucauccuggggcccgacggccacguccucauccccgagaugcaguccagccugcugcagcagcacauggagcuccuggaguccagcgugaucccgcugaugcacccccucgccgaccuguccaccguguucaaggacggggacgaggcggaggacuucgucgaggugcaccuccccgacgugcacaagcagaucagcggcgucgaccugggccugcccuccugggggaaguacgugcugaugagcgccggcgcccucgccacccugauccuggugaucagccugaugaagugcugccgcugggucaaccggacgaaguccauccagcaggggccgcgcgagagcgagcggaagguguccgugacgccccagaacggcaaggucaucagcuccugggagagcuacaagaucgggggcgagaccggccucuga

SEQ ID NO: 95560 - RNA, 1575 nt, Artificial Sequence
  derived and/or modified CDS sequence (opt1) from glycoprotein__RABV__KF484552.1
auggugcugcaggcccuccuguucgcccccuuccugaucagcucccucugccugggcaaguucccgaucuacaccauccccgacaagcuggggcccuggagccccaucgacauccaccaccucuccugcccgaacaaccuggucguggaggacgagggcugcaacaaccugagcggguucuccuacauggagcucaaggugggcuacaucagcgcgaucaaggucaacggguucacgugcaccggcguggugaccgaggccgagaccuacaccaacuucgucggcuacgugacgaccaccuucaagcgcaagcacuuccggcccaugcccgacgccugccgcuccgccuacaacuggaagcuggccggggacccccgguacgaggagagccugcacaacccguaccccgaguaccacuggcuccgcaccgugaagacgaccaaggagucccugaucgucaucagccccuccguggcggaccuggaccccuacgacaagagccuccacucccggaucuucccgagcggcaagugcuccgggaugaccgugagcuccaccuacugcagcacgaaccacgaguacaccaucuggaugcccgagaaggccggccuggggaccuccugcgacaucuucaccacgagcaagggcaagcgcgccagcaagggcgggcggaccugcggcuucgucgacgagcgcgggcuguacaagucccucaagggcgccugcaagcugaagcugugcggcgugagcgggcuccggcugauggacggcaccuggguggcgauccagaccuccgacgagacgaaguggugcagccccgaccagcuggucaaccuccacgaccugcacuccgacgagaucgagcaccuggugguggaggagcucguccgcaagcgggaggagugccuggacgcccuggagagcaucaugaccaccaaguccgugagcuuccgccggcucucccaccuccgcaagcuggugcccggguucggcaaggccuacaccaucuucaacaagacgcugauggaggccgacgcccacuacaagagcguccggaccuggaacgagaucaucccguccaaggggugccugcgcgugggcggcaagugccacccccacgugaacggggucuucuucaacggcaucauccuggggcccgacggccacgugcucauccccgagaugcagagcucccugcugcagcagcacauggagcuccuggagagcuccgucaucccgcugaugcacccccucgcggaccugagcaccguguucaaggacggggacgaggccgaggacuucguggagguccaccuccccgacgugcacaagcagaucuccggcguggaccugggccugcccagcugggggaaguacgucaugauguccgccggcgccuucgccacccugauccucgugaucagccugaugaagugcugccggugggugaaccgcaccaagagcauccagcaggggccgcgggaguccgagcgcaaggucagcgugacgccccagaacggcaaggugaucuccagcugggaguccuacaagaucgggggcgagaccggccuguga

SEQ ID NO: 95561 - RNA, 1575 nt, Artificial Sequence
  derived and/or modified CDS sequence (opt1) from glycoprotein__RABV__KF484553.1
auggugcugcaggcccuccuguucgcccccuuccugaucagcucccucugccugggcaaguucccgaucuacaccauccccgacaagcuggggcccuggagccccaucgacauccaccaccucuccugcccgaacaaccuggucguggaggacgagggcugcaacagccuguccggguucagcuacauggagcucaaggugggcuacaucuccgcgaucaaggucaacggguucacgugcaccggcguggugaccgaggccgagaccuacaccaacuucgucggcuacgugacgaccaccuucaagcgcaagcacuuccggcccaugcccgacgccugccgcagcgccuacaacuggaagcuggccggggacccccgguacgaggagucccugcacaacccguaccccgaguaccacuggcuccgcaccgugaagacgaccaaggagagccugaucgucaucucccccagcguggcggaccuggaccccuacgacaagucccuccacagccggaucuucccguccggcaagugcagcgggaugaccguguccagcaccuacugcuccacgaaccacgaguacaccaucuggaugcccgagaaggucagccugggcaccagcugcgacaucuucaccacguccaaggggaagcgcgccagcaagggcggccggaccugcggguucguggacgagcgcggccuguacaagucccucaagggggccugcaagcugaagcugugcggcgugagcggccuccggcugauggacgggaccugggucgccauccagaccuccgacgagacgaaguggugcagccccgaccagcuggugaaccuccacgaccugcacuccgacgagaucgagcaccugguggucgaggagcucgugcgcaagcgggaggagugccuggacgcgcuggagagcaucaugaccaccaaguccgugagcuuccgccggcucucccaccuccgcaagcugguccccggcuucgggaaggccuacaccaucuucaacaagacgcugauggaggccgacgcccacuacaagagcgugcggaccuggaacgagaucaucccguccaagggcugccugcgcgucgggggcaagugccacccccacgugaacggcguguucuucaacgggaucauccugggccccgacgggcacguccucauccccgagaugcagagcucccugcugcagcagcacaucgagcuccuggagagcuccgugaucccgcugaugcacccccucgccgaccugagcaccguguucaaggacggcgacgaggcggaggacuucgucgaggugcaccuccccgacgugcacaagcagaucuccggggucgaccugggccugcccagcuggggcaaguacgugcugaugagcgccggggcccucgccacccuggugcuggucaucucccugaugaagugcugccggugggugaaccgcaccaagagcauccagcagggcccgcgggaguccgagcgcaaggugagcgucacgccccagaacgggaaggugaucuccagcugggaguccuacaagaucggcggggagaccggccucuga

SEQ ID NO: 95562 - RNA, 1575 nt, Artificial Sequence
  derived and/or modified CDS sequence (opt1) from glycoprotein__RABV__KF484554.1
auggugcugcaggcccuccuguucgcccccuuccugaucagcucccucugccugggcaaguucccgaucuacaccauccccgacaagcuggggcccuggagccccaucgacauccaccaccucuccugcccgaacaaccuggucguggaggacgagggcugcaacaaccugagcggguucuccuacauggagcucaaggugggcuacaucagcgcgaucaaggucaacggguucacgugcaccggcguggugaccgaggccgagaccuacaccaacuucgucggcuacgugacgaccaccuucaagcgcaagcacuuccggcccaugcccgacgccugccgcuccgccuacaacuggaagcuggccggggacccccgguacgaggagagccugcacaacccguaccccgaguaccacuggcuccgcaccgugaagacgaccaaggagucccugaucgucaucagccccuccguggcggaccuggaccccuacgacaagagccuccacucccggaucuucccgagcggcaagugcuccgggaugaccgugagcuccaccuacugcagcacgaaccacgaguacaccaucuggaugcccgagaaggccggccuggggaccuccugcgacaucuucaccacgagcaagggcaagcgcgccagcaagggcgggcggaccugcggcuucgucgacgagcgcgggcuguacaagucccucaagggcgccugcaagcugaagcugugcggcgugagcgggcuccggcugauggacggcaccuggguggcgauccagaccuccgacgagacgaaguggugcagccccgaccagcuggucaaccuccacgaccugcacuccgacgagaucgagcaccuggugguggaggagcucguccgcaagcgggaggagugccuggacgcccuggagagcaucaugaccaccaaguccgugagcuuccgccggcucuccuaccugcgcaagcuggugcccggguucggcaaggccuacaccaucuucaacaagacgcucauggaggccgacgcccacuacaagagcguccggaccuggaacgagaucaucccguccaaggggugccugcgcgugggcggcaagugccacccccacgugaacggggucuucuucaacggcaucauccuggggcccgacggccacgugcucauccccgagaugcagagcucccugcugcagcagcacauggagcuccuggagagcuccgucaucccgcugaugcacccccucgcggaccugagcaccguguucaaggacggggacgaggccgaggacuucguggagguccaccuccccgacgugcacaagcagaucuccggcguggaccugggccugcccagcugggggaaguacgucaugauguccgccggcgcccuggccacccucauccuggugaucagccugaugaagugcugccggugggugaaccgcaccaagagcauccagcaggggccgcgggaguccgagcgcaaggucagcgugacgccccagaacggcaaggugaucuccagcugggaguccuacaagaucgggggcgagaccggccuguga

SEQ ID NO: 95563 - RNA, 1575 nt, Artificial Sequence
  derived and/or modified CDS sequence (opt1) from glycoprotein__RABV__KF484555.1
auggugcugcaggcccuccuguucgcgccccugcucaucagcucccugugccugggcaaguucccgaucuacaccauccccgagaagcucgggcccuggagccccaucgacauccaccaccuguccugcccgaacaaccuggucguggaggacgagggcugcaacagccucuccggguucagcuacauggagcugaaggugggcuacaucuccgccaucaaggucaacggguucacgugcaccggcguggugaccgaggccgagaccuacaccaacuucgucggcuacgugacgaccaccuucaagcgcaagcacuucagccccaugcccgacgccugccgguccgccuacaacuggaagcuggccggggacccccgcuacgaggagagccuccacaacccguaccccgacuaccacuggcugcggaccgugaagacgaccaaggagucccugaucgucaucagccccuccguggcggaccucgaccccuacgacaagagccugcacucccgcaucuucccgggcgggaagugcagcggcaugaccguguccagcaccuacugcuccacgaaccacgaguacaccaucuggaugcccgagaagcccgggcugggcaccagcugcgacaucuucaccacgagcaagggcaagcgggccuccaaggaggggcggaccugcggcuucgucgacgagcgcgggcucuacaagagccugaagggcgccugcaagcugaagcucugcggcguguccgggcugcgccugauggacggcaccuggguggccauccagaccagcgacgagaucaaguggugcucccccgaccagcucgucaaccugcacgaccugcacagcgacgagaucgagcaccucgugguggaggagcugguccggaagcgcgaggagugccuggacgcgcucgaguccaucaugacgaccaagagcguguccuuccggcgccugagccaccuccggaagcuggugccgggguucggcaaggccuacaccaucuucaacaagacccugauggaggccgacgcccacuacaaguccguccgcacguggaacgagaucauccccagcaaggggugccugcgggugggcggcaagugccacccccacgugaacggggucuucuucaacggcaucauccucgggcccgacggccacgugcugaucccggagaugcaguccagccugcuccagcagcacgucgagcugcuggaguccagcgugaucccccucaugcacccccuggccgaccccuccaccguguucaaggacgacgacgaggcggaggacuucgucgaggugcaccucccggacgugcagaagcaggucagcgggguggaccugggccugcccuccuggggcaaguacgugcugaugagcgccggggcccucgccacccugguccuggugaucagccugaugaagugcugccgcggcaucaaccggaccaagcucaucaagcaggggucccgcgagagcgagcggaagguguccgucacgccccagaacggcaaggugaucagcuccugggagagcuacaaguccgggggcgagaccggccuguga

SEQ ID NO: 95564 - RNA, 1575 nt, Artificial Sequence
  derived and/or modified CDS sequence (opt1) from glycoprotein__RABV__KF484556.1
auggugcugcaggcccuccuguucgcccccuuccugaucagcucccucugccugggcaaguucccgaucuacaccauccccgacaagcuggggcccuggagccccaucgacauccaccaccucuccugcccgaacaaccuggucguggaggacgagggcugcaacaaccugagcggguucuccuacauggagcucaaggugggcuacaucagcgcgaucaaggucaacggguucacgugcaccggcguggugaccgaggccgagaccuacaccaacuucgucggcuacgugacgaccaccuuccgccggaagcacuuccgccccaugcccgacgccugccgguccgccuacaacuggaagcuggccggggacccccgcuacgaggagagccugcacaacccguaccccgaguaccacuggcuccggaccgugaagacgaccaaggagucccugaucgucaucagccccuccguggcggaccuggaccccuacgacaagagccuccacucccgcaucuucccgagcggcaagugcuccgggaugaccgugagcuccaccuacugcagcacgaaccacgaguacaccaucuggaugcccgagaaggccggccuggggaccuccugcgacaucuucaccacgagcaagggcaagcgggccagcaagggcgggcggaccugcggcuucgucgacgagcgcgggcuguacaagucccucaagggcgccugcaagcugaagcugugcggcgugagcgggcuccgccugauggacggcaccuggguggcgauccagaccuccgacgagacgaaguggugcagccccgaccagcuggucaaccuccacgaccugcacuccgacgagaucgagcaccuggugguggaggagcucguccggaagcgcgaggagugccuggacgcccuggagagcaucaugaccaccaaguccgugagcuuccggcgccucucccaccuccggaagcuggugcccggguucggcaaggccuacaccaucuucaacaagacgcugauggaggccgacgcccacuacaagagcguccgcaccuggaacgagaucaucccguccaaggggugccugcgggugggcggcaagugccacccccacgugaacggggucuucuucaacggcaucauccuggggcccgacggccacgugcucauccccgagaugcagagcucccugcugcagcagcacauggagcuccuggagagcuccgucaucccgcugaugcacccccucgcggaccugagcaccguguucaaggacggggacgaggccgaggacuucguggagguccaccuccccgacgugcacaagcagaucuccggcguggaccugggccugcccagcugggggaaguacgucaugauguccgccggcgcccuggccacccucauccuggugaucagccugaugaagugcugccgcugggugaaccggaccaagagcauccagcaggggccgcgcgaguccgagcggaaggucagcgugacgccccagaacggcaaggugaucuccagcugggaguccuacaagaucgggggcgagaccggccuguga

SEQ ID NO: 95565 - RNA, 1575 nt, Artificial Sequence
  derived and/or modified CDS sequence (opt1) from glycoprotein__RABV__KF484557.1
auggugcugcaggcccuccuguucgcccccuuccugaucagcucccucugcuucggcaaguucccgaucuacaccauccccgacaagcuggggcccuggagccccaucgacauccaccaccuguccugcccgaacaaccucgucguggaggacgagggcugcaacagccuguccggguucagcuacauggagcugaaggugggcuacaucuccgcgaucaaggucaacggguucacgugcaccggcguggugaccgaggccgagaccuacaccaacuucgucggcuacgugacgaccaccuucaagcgcaagcacuuccggcccaugcccgacgccugccgcagcgccuacaacuggaagguggccggggacccccgguacgaggagucccuccacaacccguaccccgacuaccacuggcugcgcaccgucaagacgaccaaggagagccugaucaucaucucccccagcguggcggaccucgaccccuacgacaagucccugcacagccggaucuucccgggcgggaagugcuccggcaugaccaucagcuccaccuacugcagcacgaaccacgacuacaccaucuggaugcccgagaaggccgggcugggcaccuccugcgacaucuucaccacgagcaagggcaagcgcgccagcaagggcgggcggaccugcggguucguggacgagcgcggccucuacaagucccugaagggcgccugcaagcugaagcucugcggggucagcggccugcggcugauggacgggaccugggcggccauccagaccuccgacgagacgaaguggugcagccccgaccagcucgugaaccugcacgaccugcacuccgacgagaucgagcaccucguggucgaggagcuggugcgccggcgcgaggagugccuggacgcccucgagagcaucaugaccaccaaguccgugagcuuccggcgccugucccaccuccggaagcugguccccggcuucgggaaggccuacaccaucuucaacaagacgcugauggaggccgacgcgcacuacaagagcgugcgcaccuggaacgagaucaucccguccaagggcugccugcgggugggcgggaagugccacccccacgucaacggcguguucuucaacgggaucauccucggccccgacgggcacgugcugauccccgagaugcagagcucccugcuccagcagcacauggagcugcuggagagcuccgucaucccgcucaugcacccccuggccgaccugagcaccguguucaaggacggcgacgaggccgaggacuucgucgaggugcaccuccccgacgugcacaagcaggucuccggcguggaccuggggcugcccagcuggggcaaguacaugcucauguccgccggggcccuggcgacccugaugcucgugaucccgcugaugcgcugcugccggcgcgucaaccggaccaagagcauccagcagggcccccgcgagagcgaccgcaagguguccgugacgccccagaacgggaaggucaucagcuccugggagagcuacaaguccggcggcgagaccgggcuguga

SEQ ID NO: 95566 - RNA, 1575 nt, Artificial Sequence
  derived and/or modified CDS sequence (opt1) from glycoprotein__RABV__KF484558.1
augauccugcacgcccuccuguucgcccccuuccugaucagcucccucugccugggcaaguucccgaucuacaccauccccgacaagcuggggcccuggagccccaucgacauccaccaccucuccugcccgaacaaccuggugaucgaggacgagggcugcaacagccuguccggguucagcuacauggagcucaaggucggcuacaucuccgcgaucaaggugaacggguucacgugcaccggcguggucaccgaggccgagaccuacaccaacuucgugggcuacgugaccaccaccuucaagcgcaagcacuuccggcccaugcccgacgccugccgcagcgccuacaacuggaagcuggccggggacccccgguacgaggagucccugcacaacccguaccccgaguaccacuggcuccgcaccgucaagacgaccaaggagagccugguggugaucucccccagcgucgcggaccuggaccccuacgacaagucccuccacagccggaucuucccguccggcaagugcagcgggaugaccguguccagcaccuacugcuccacgaaccacgaguacaccaucuggaugcccgagaaggugggccuggggaccagcugcgacaucuucaccacgagcaagggcaagcgcgccuccaagggcgggcggaccugcggcuucgucgacgagcgcgggcuguacaagagccucaagggcgccugcaagcugaagcugugcggcguguccgggcuccggcugauggacggcaccuggguggccauccagaccagcgacgagacgaaguggugcucccccgaccagcuggucaaccuccacgaccugcacagcgacgagaucgagcaccuggugguggaggagcucguccgcaagcgggaggagugccuggacgcgcuggaguccaucaugaccaccaagagcguguccuuccgccggcucagccaccuccgcaagcuggugcccggguucggcaaggccuacaccaucuucaacaagacgcugauggaggccgacgcccacuacaaguccguccggaccuggaacgagaucaucccgagcaaggggugccugcgcgugggcggcaagugccacccccacgugaacggggucuucuucaacggcaucauccuggggcccgacggccacgugcucauccccgagaugcaguccagccugcugcagcagcacauggagcuccuggaguccagcgucaucccgcugaugcacccccucgccgaccuguccaccguguucaaggacggggacgaggcggaggacuucguggagguccaccuccccgacgugcacaagcagaucagcggcguggaccugggccugcccuccugggggaaguacguccugaugagcgccggcgcccucgccacccugauccuggugaucagccugaugaagugcugccggugggugaaccgcacggaguccauccagcaggggccgcgggagagcgagcgcaaggucuccgugacgccccagaacggcaaggugaucagcuccugggagagcuacaagaucgggggcgagaccggccucuga

SEQ ID NO: 95567 - RNA, 1575 nt, Artificial Sequence
  derived and/or modified CDS sequence (opt1) from glycoprotein__RABV__KF484559.1
auggugcugcaggcccuccuguucgcccccuuccugaucagcucccucugcuucggcaaguucccgaucuacaccauccccgacaagcuggggcccuggagccccaucgacauccaccaccuguccugcccgaacaaccucgucguggaggacgagggcugcaacagccuguccggguucagcuacauggagcugaaggugggcuacaucuccgcgaucaaggucaacggguucacgugcaccggcguggugaccgaggccgagaccuacaccaacuucgucggcuacgugacgaccaccuucaagcgcaagcacuuccggcccaugcccgacgccugccgcagcgccuacaacuggaagguggccggggacccccgguacgaggagucccuccacaacccguaccccgacuaccacuggcugcgcaccgucaagacgaccaaggagagccugaucaucaucucccccagcguggcggaccucgaccccuacgacaagucccugcacagccggaucuucccgggcgggaagugcuccggcaugaccaucagcuccaccuacugcagcacgaaccacgacuacaccaucuggaugcccgagaaggccgggcugggcaccuccugcgacaucuucaccacgagcaagggcaagcgcgccagcaagggcgggcggaccugcggguucguggacgagcgcggccucuacaagucccugaagggcgccugcaagcugaagcucugcggggucagcggccugcggcugauggacgggaccugggcggccauccagaccuccgacgagacgaaguggugcagccccgaccagcucgugaaccugcacgaccugcacuccgacgagaucgagcaccucguggucgaggagcuggugcgccggcgcgaggagugccuggacgcccucgagagcaucaugaccaccaaguccgugagcuuccggcgccugucccaccuccggaagcugguccccggcuucgggaaggccuacaccaucuucaacaagacgcugauggaggccgacgcgcacuacaagagcgugcgcaccuggaacgagaucaucccguccaagggcugccugcgggugggcgggaagugccacccccacgucaacggcguguucuucaacgggaucauccucggccccgacgggcacgugcugauccccgagaugcagagcucccugcuccagcagcacauggagcugcuggagagcuccgucaucccgcucaugcacccccuggccgaccugagcaccguguucaaggacggcgacgaggccgaggacuucgucgaggugcaccuccccgacgugcacaagcaggucuccggcguggaccuggggcugcccagcuggggcaaguacaugcucauguccgccggggcccuggcgacccugaugcucgugaucccgcugaugaagugcugccgccgggucaaccgcaccaagagcauccagcagggcccccgggagagcgaccgcaagguguccgugacgccccagaacgggaaggucaucagcuccugggagagcuacaaguccggcggcgagaccgggcuguga

SEQ ID NO: 95568 - RNA, 1575 nt, Artificial Sequence
  derived and/or modified CDS sequence (opt1) from glycoprotein__RABV__KF620487.1
augaucccccaggcccugcuguucgugccguuccugggcuucccccugugccucgggaaguuccccaucuacaccauccccgacaagcugggcccguggagccccaucgacauccaccaccuguccugccccaacaacauggucguggaggacgaggggugcaccaaccucagcggcuucuccuacauggagcugaaggugggguacaucagcgccaucaaggucaacggcuucacgugcaccggcguggugaccgaggcggagaccuacacgaacuucgucggguacgugaccaccaccuucaagcgcaagcacuuccggcccgugccggacgccugccgcgacgcccacaacuggaagauggccggcgacccccgguacgaggagucccugcacaaccccuaccccgacuaccacuggcuccgcacggucaagaccaccaaggagagccuggugaucaucuccccgagcguggccgaccuggaccccuacgacaagucccuccacagcuccgucuuccccgggggcaagugcagcgggaucaccguguccagcacguacugcuccaccaaccacgacuacaccaucuggaugcccgagaacccgcggcugggcaccagcugcgacaucuucacguacuccaagggcaagcgcgcgagcaaggaguccaagaccugcggguucguggacgagcggggccuguacaagagccucaagggggccugcaagcugaagcugugcggcguccccggccuccgccugauggacgggaccuggguggccauccagaccagcgacgaggugaaguggugcccgcccgaccagcuggucaaccuccacgaccugcacuccgacgagcuggagcaccucgugguggaggagcuggucaagaagcgggaggagugccuggacgcccucgagagcaucaugacgaccaaguccgugagcuuccgccggcugucccaccuccgcaagcucgugcccggcuucgggaaggcguacaccaucuucaacaagacccugauggaggccgacgcccacuacaagagcguccggacguggaacgagaucauccccuccaagggcugccugcgcgucgggggccggugccacccccacgugaacggcguguucuucaacgggaucauccucggccccgacgggcacgugcugaucccggagaugcagagcucccugcuccagcagcacauggagcugcuggagagcuccgucaucccccucaugcacccccuggccgaccccagcgccguguucaagaccggcgacgaggcggaggacuucguggagguccaccucccggacgugcacaagcaggucuccgggguggaccugggccugcccagcuggggcaaguacgugcugauguccgccggggugcucaucguccuggugcugaugaucuuccucaugaccugcugcaagcgccccaaccgggccgagcugauccaccacagcccgcgcgagaccgagcggaagguguccgucacgagccagggcgggcgcgugaucuccagcugggagagcuacaagaacggcggggagaccaagcuguga

SEQ ID NO: 95569 - RNA, 1575 nt, Artificial Sequence
  derived and/or modified CDS sequence (opt1) from glycoprotein__RABV__KF620488.1
augaucccccaggcccugcuguucgugccguuccugggcuucccccugugccucgggaaguuccccaucuacaccauccccgacaagcugggcccguggagccccaucgacauccaccaccuguccugccccaacaacauggucguggaggacgaggggugcaccaaccucagcggcuucuccuacauggagcugaaggugggguacaucagcgccaucaaggucaacggcuucacgugcaccggcguggugaccgaggcggagaccuacacgaacuucgucggguacgugaccaccaccuucaagcgcaagcacuuccggcccaugccggacgccugccgcgacgcccacaacuggaagauggccggcgacccccgguacgaggagucccugcacaaccccuaccccgacuaccacuggcuccgcacggugaagaccaccaaggagagccuggucaucaucuccccgagcguggccgaccuggaccccuacgacaagucccuccacagcuccguguuccccgggggcaagugcagcgggaucaccgucuccagcacguacugcuccaccaaccacgacuacaccaucuggaugcccgagaacccgcggcugggcaccagcugcgacaucuucacguacuccaagggcaagcgcgcgagcaaggaguccaagaccugcggguucguggacgagcggggccuguacaagagccucaagggggccugcaagcugaagcugugcggcgugcucggccugcgccugauggacgggaccugggucgccauccagaccagcgacgaggugaaguggugcccgcccgaccagcucgugaaccugcacgacuuccgguccgacgagcuggagcaccucgucguggaggagcuggugaagaagcgcgaggagugccuggacgcccucgagagcaucaugacgaccaaguccgucagcuuccggcgccugucccaccuccggaagcucgugcccggcuucgggaaggcguacaccaucuucaacaagacccugauggaggccgacgcccacuacaagagcgugcgcacguggaacgagaucauccccuccaagggcugccugaaggucgggggccggugccacccccacgugaacggcgucuucuucaacgggaucauccucggccccgacgggcacgugcugauccccgagaugcagagcucccugcuccagcagcacauggagcugcuggagagcuccgugaucccgcucaugcacccccuggccgaccccagcgccgucuucaagaccggcgacgaggcggaggacuucguggaggugcaccuccccgacguccacaagcaggucuccgggguggaccugggccugccgagcuggggcaaguacgugcugauguccgccggggugcucaucgugcugguccugaugaucuuccucaugaugugcugcaagaagcccaaccgcgccgagcccauccaccacagcccgcgggagaccgagcgcaagauguccgugaccagccagggcgggcgggugaucuccagcugggagagcuacaagaacggcggggagacgaagcuguga

SEQ ID NO: 95570 - RNA, 1575 nt, Artificial Sequence
  derived and/or modified CDS sequence (opt1) from glycoprotein__RABV__KF620489.1
augaucccccaggcccugcuguucgugccguuccugggcuucccccugugccucgggaaguuccccaucuacaccauccccgacaagcugggcccguggagccccaucgacauccaccaccuguccugccccaacaacauggucguggaggacgaggggugcaccaaccucagcggcuucuccuacauggagcugaaggugggguacaucagcgccaucaaggucaacggcuucacgugcaccggcguggugaccgaggcggagaccuacacgaacuucgucggguacgugaccaccaccuucaagcgcaagcacuuccggcccgugccggacgccugccgcgacgcccacaacuggaagaucgccggcgacccccgguacgaggagucccugcacaaccccuaccccgacuaccacuggcuccgcacggucaagaccaccaaggagagccuggugaucaucuccccgagcguggccgaccuggaccccuacgacaagucccuccacagcuccgucuuccccgggggcaagugcagcgggaucaccguguccagcacguacugcuccaccaaccacgacuacaccaucuggaugcccgagaacccgcggcugggcaccagcugcgacaucuucacguacuccaagggcaagcgcgcgagcaaggaguccaagaccugcggguucguggacgagcggggccuguacaagagccucaagggggccugcaagcugaagcugugcggcguccccggccuccgccugauggacgggaccuggguggccauccagaccagcgacgaggugaaguggugcccgcccgaccagcuggucaaccuccacgaccugcacuccgacgagcuggagcaccgggugguggaggagcucgucaagaagcgcgaggagugccuggacgcccuggagagcaucaugacgaccaaguccgugagcuuccggcgccucucccaccuccggaagcuggugcccggcuucgggaaggcguacaccaucuucaacaagacccucauggaggccgacgcccacuacaagagcguccgcacguggaacgagaucauccccuccaagggcugccugcgggucgggggccgcugccacccccacgugaacggcguguucuucaacgggaucauccugggccccgacgggcacgugcucaucccggagaugcagagcucccugcugcagcagcacauggagcuccuggagagcuccgucaucccccugaugcacccccucgccgaccccagcgccguguucaagaccggcgacgaggcggaggacuucguggagguccaccucccggacgugcacaagcaggucuccgggguggaccugggccugcccagcuggggcaaguacgugcugauguccgccggggugcugaucguccucgugcugaugaucuuccugaugaccugcugcaagcggcccaaccgcgccgagccgauccaccacagcccccgggagaccgagcgcaagguguccgucacgagccagggcgggcgggugaucuccagcugggagagcuacaagaacggcggggagaccaagcucuga

SEQ ID NO: 95571 - RNA, 1575 nt, Artificial Sequence
  derived and/or modified CDS sequence (opt1) from glycoprotein__RABV__KF656698.1
augauccuccaggugcugcaguucgucccccugcugaucagcccgcucugccugggcaaguuccccaucuacaccauccccgacaagcuggggcccugguccccgaucgacauccaccaccucagcugccccaacaaccuggugguggaggacgagggcugcaccaaccuguccggguucagcuacauggagcucaaggucggcuacaucuccgccaucaaggugaacggguucacgugcaccggcguggucaccgaggccgagaccuacacgaacuucgugggcuacgugaccaccaccuucaagcgcaagcacuuccggcccauccccgacgcgugccgcgccgccuacaacuggaagauggccggggacccgcgguacgaggagagccugcagaaccccuaccccgaguaccacuggcugcgcacggucaagaccaccaaggagucccucaucaucaucagccccuccguggccgaccuggacccguacgacaagagccugcacucccggguguuccccggcgggagcgcgcucggcaucaccgucuccagcacguacugcuccaccaaccacgacuacaccaucuggaugcccgaggagccccgccuggggaccagcugcgacaucuucacguccagcaagggcaagaaggccuccaagggcgggaagaccugcggcuucguggacgagcgggggcuguacaagagccucaagggcgccugcaagcugaagcugugcggcgugcucgggcugcgccugauggacggcaccugggucagcauccagaccuccgacaacacgaaguggugcagcccggaccagcucgugaaccugcacgacuuccacuccgacgagaucgagcaccugguggucgaggagcucgugaagaagcgggaggagugccuggacgcccuggagagcaucaugaccaccaaguccgugagcuuccgccggcucaccuaccugcgcaagcugguccccggguucggcaaggcguacacgaucuucaacaagacccucauggaggccgacgcccacuacaaguccgugcggaccuggaacgagaucauccccagcaaggggugccugaaggugcgcgagcggugccacccgcccgucgacggcguguucuucaacggcaucauccuggggcccgacggcaacguccucauccccgagaugcaguccagccugcugcagcagcacauggagcuccuggaguccagcgugaucccccugaugcacccgcucgccgaccccuccaccguguucaaggagggggacgaggccgaggacuucgucgaggugcaccuccccgacgugcacaagcagaucagcggcgucgaccuggggcugcccuccuggggcaaguaccugcugaugaucgcgggcgggcucgccacgcuggugcugaucaucugcagcaucgccugcugccgccgggccaagcgcaccgagucccggcgccggggcagcggggaguccggcaagaaggccaccgcgaccccgcgcacgcgcaagguggucagcagcugggagcuguacaagcgggagggggacgcccgccucuga

SEQ ID NO: 95572 - RNA, 1575 nt, Artificial Sequence
  derived and/or modified CDS sequence (opt1) from glycoprotein__RABV__KF656699.1
augauccuccaggugcugcaguucgucccccugcugaucagcccgcucugccugggcaaguuccccaucuacaccauccccgacaagcuggggcccugguccccgaucgacauccaccaccucagcugccccaacaaccuggugguggaggacgagggcugcaccaaccuguccggguucagcuacauggagcucaaggucggcuacaucuccgccaucaaggugaacggguucacgugcaccggcguggucaccgaggccgagaccuacacgaacuucgugggcuacgugaccaccaccuucaagcgcaagcacuuccggcccauccccgacgcgugccgcgccgccuacaacuggaagauggccggggacccgcgguacgaggagagccugcagaaccccuaccccgaguaccacuggcugcgcacggucaagaccaccaaggagucccucaucaucaucagccccuccguggccgaccuggacccguacgacaagagccugcacucccggguguuccccggcgggagcgcgcucggcaucaccgucuccagcacguacugcuccaccaaccacgacuacaccaucuggaugcccgaggagccccgccuggggaccagcugcgacaucuucacguccagcaagggcaagaaggccuccaagggcgggaagaccugcggcuucguggacgagcgggggcuguacaagagccucaagggcgccugcaagcugaagcugugcggcgugcucgggcugcgccugauggacggcaccugggucagcauccagaccuccgacaacacgaaguggugcagcccggaccagcucgugaaccugcacgacuuccacuccgacgagaucgagcaccugguggucgaggagcucgugaagaagcgggaggagugccuggacgcccuggagagcaucaugaccaccaaguccgugagcuuccgccggcucuccuaccugcgcaagcugguccccggguucggcaaggcguacaccaucuucaacaagacgcucauggaggccgacgcccacuacaagagcgugcggaccuggaacgagaucauccccuccaaggggugccugaaggugcgcgagcggugccacccgcccgucgacggcguguucuucaacggcaucauccuggggcccgacggcaacguccucauccccgagaugcagagcucccugcugcagcagcacauggagcuccuggagagcuccgugaucccccugaugcacccgcucgccgaccccagcaccguguucaaggagggggacgaggccgaggacuucgucgaggugcaccuccccgacgugcacaagcagaucuccggcgucgaccuggggcugcccagcuggggcaaguaccugcugaugaucgcgggcgggcucgccacccuggugcugaucaucugcuccaucgccugcugccgccgggccaagcgcacggagagccggcgccggggcuccggggagagcggcaagaaggccaccgcgaccccgcgcacccgcaagguggucagcuccugggagcuguacaagcgggagggggacgcccgccucuga

SEQ ID NO: 95573 - RNA, 1575 nt, Artificial Sequence
  derived and/or modified CDS sequence (opt1) from glycoprotein__RABV__KF663531.1
augaucccccaggugcuccuguucgucccgcugcugguguucagcuccugcuucggcaaguuccccaucuacaccauccccgacaagcucgggcccuggagcccgaucgacauccaccaccuguccugccccaacaaccugguggucgaggacgagggcugcaccaaccucagcggguucuccuacauggagcugaaggugggcuacaucagcgccaucaaggugaacggguucacgugcaccggcgucgugaccgaggccgagaccuacacgaacuucgugggcuacgucaccaccaccuucaagcgcaagcacuuccggcccaugcccgacgcgugccgcgccgccuacaacuggaagguggccggggacccgcgguacgaggagucccugcacaaccccuaccccgacuaccacuggcuccgcacggugaagaccaccaaggagagccuggucaucaucucccccagcguggccgaccuggacccguacgacaagucccuccacagccggguguuccccggcgggaagugcuccggcaucaccgucagcuccacgugcugcagcaccaaccacgacuacaccaucuggaugcccgagaacccccgccuggggaccuccugcgacaucuucacgaacagccggggcaagcgcgcguccaagggcgggaagaccugcggcuucguggacgagcgggggcugugcaagagccucaagggcgccugcaagcugaagcugugcggcgugcucgggcugcgccugauggacggcaccugggucgccauccagaccagcgacgagaucaaguggugcccgcccgaccagcucgugaaccugcacgacuuccacuccgacgagaucgagcacuucguggucgaggagcuggugaagaagcgggaggagugccucgacgcccuggagacgaucaugaccaccaagagcguguccuuccgccggcugagccaccuccgcaagcugguccccggguucggcaaggcguacaccaucuucaacaagacgcugauggaggccgacgcccacuacaaguccauccggaccuggaacgagaucauccccagcaaggggugccuccgcgugggcggccggugccacccgcacgucaacgggguguucuucaacggcaucauccuggggcccgacggccacgugcugauccccgagaugcaguccagccuccugcaccagcacauggagcugcucgaguccagcgucaucccccugaugcacccgcuggccgaccccuccaccguguucaaggacggggacgaggccgaggacuucguggagguccaccuccccgacgugcacaagcagaucagcggcguggaccugggccugcccaacugggggaaguacguccucaucuccgcgggcgcccugaccgcccugaugcucacgaucuuccugaugaccugcugccgcaagaccaaccgggccgggagcauccagcacuccccgggcgagaccgggcgcaaggugagcgugacgucccacaacggccgggucaucagccugugggaguccuacaagagcggcagcgagaccaagcucuga

SEQ ID NO: 95574 - RNA, 1575 nt, Artificial Sequence
  derived and/or modified CDS sequence (opt1) from glycoprotein__RABV__KF663532.1
augaucccccaggugcugcuguucgucccgcugcuggccuucagcuccugcuucggcaaguuccccaucuacaccauccccgacaagcucgggcccuggagcccgaucgacauccaccaccuguccugccccaacaaccuggugguggaggacgagggcugcaccaaccucagcggguucuccuacauggagcugaaggucggcuacaucagcgccaucaaggugaacggguucacgugcaccggcguggucaccgaggcggagaccuacacgaacuucgugggcuacgugaccaccaccuucaagcgcaagcacuuccggcccaugcccgacgccugccgcgccgccuacaacuggaaggucgccggggacccgcgguacgaggagucccugcacaaccccuaccccgacuaccacuggcuccgcacggugaagaccaccaaggagagccuggugaucaucucccccagcgucgcggaccuggacccguacgacaagucccuccacagccggguguuccccggcgggaagugcuccggcaucaccgugagcuccacgugcugcagcaccaaccacgacuacaccaucuggaugcccgagaacccccgccuggggaccuccugcgacaucuucacgaacagccggggcaagcgcgccuccaagggcgggaagaccugcggcuucgucgacgagcgggggcuguacaagagccucaagggcgccugcaagcugaagcugugcggcgugcucgggcugggccugauggacgggaccuggguggccauccagaccagcgacgagaucaaguggugcccgcccgaccagcucgucaaccugcacgacuuccacuccgacgagaucgagcaccuggugguggaggagcucgucaagaagcgcgaggagugccuggacgcgcuggagacgaucaugaccaccaagagcguguccuuccggcgccucagccaccuccggaagcuggugcccggcuucgggaaggccuacaccaucuucaacaagacgcucauggaggccgacgcccacuacaaguccauccgcaccuggaacgagaucauccccagcaagggcugccugcgggucggcgggcgcugccacccgcacgugaacggcgucuucuucaacgggaucauccugggccccgacgggcacgugcucauccccgagaugcaguccagccugcugcaccagcacauggagcuccuggaguccagcgugaucccccugaugcacccgcucgccgaccccuccaccgucuucaaggacggcgacgaggcggaggacuucguggaggugcaccuccccgacguccacaagcagaucagcggcguggaccuggggcugcccaacuggggcaaguacgugcugaucuccgccggggcccugaccgcccucaugcugacgaucuuccugaugaccugcugccggaagaccaaccgcgccggcagcauccagcacuccccgggggagaccggccggaaggucagcgugacgucccacaacggccgcgugaugauccucugggagagcuacaaguccgggagcgagaccaagcuguga

SEQ ID NO: 95575 - RNA, 1575 nt, Artificial Sequence
  derived and/or modified CDS sequence (opt1) from glycoprotein__RABV__KF663533.1
augaucccccaggugcuccuguucgucccgcugcuggacuucagcuccugcuucggcaaguuccccaucuacaccauccccgacaagcucgggcccuggagcccgaucgacauccaccaccuguccugccccaacaaccuggugguggaggacgagggcugcaccaaccucagcggguucuccuacauggagcugaaggucggcuacaucagcgccaucaaggugaacggguucacgugcaccggcguggucaccgaggccgagaccuacacgaacuucgugggcuacgugaccaccaccuucaagcgcaagcacuuccggcccaugcccgacgcgugccgcgccgccuacaacuggaaggucgccggggacccgcgguacgaggagucccugcacaaccccuaccccgacuaccacuggcuccgcacggugaagaccaccaaggagagccuggugaucaucucccccagcgucgccgaccuggacccguacgacaagucccuccacagccggguguuccccggcgggaagugcuccggcaucaccgugagcuccacgugcugcagcaccaaccacgacuacaccaucuggaugcccgagaacccccgccuggggaccuccugcgacaucuucacgaacagccggggcaagcgcgcguccaagggcgggaagaccugcggcuucgaggacgagcgggggcuguacaagagccucaucggcgccugcaagcugaagcugugcggcguccucgggcugcgccggauggacggcaccuggguggccauccagaccagcgacaagaucaagcgcugcccgcccgaccagcuggugaaccuccacgacuuccacuccgacgagaucgagcaccuggucguggaggagcuggugaagaagcgggaggagugccucgacgcccuggagacgaucaugaccaccaagagcgucuccuuccgccggcugagccaccuccgcaagcuggugcccggguucggcaaggcguacaccaucuucaacaagacgcugauggaggccgacgcccacuacaaguccauccggaccuggaacgagaucauccccagcaaggggugccuccgcgugggcggccggugccacccgcacgucaacgggguguucuucaacggcaucauccuggggcccgacggccacguccugauccccgagaugcaguccagccuccugcaccagcacauggagcugcucgaguccagcgugaucccccugaugcacccgcuggccgaccccuccaccguguucaaggacggggacgaggccgaggacuucgucgaggugcaccuccccgacgugcacaagcagaucagcggcgucgaccugggccugcccaacugggggaaguacgugcucaucuccgcgggcgcccugaccgcccugaugcucacgaucuuccugaugaccugcugccgcaagaccaaccgggccgggagcauccagcacuccccgggcgagaccgggcgcaaggugagcgucacgucccacaacggccgcgugaucagccugugggaguccuacaagagcgagagcgagaccaagcucuga

SEQ ID NO: 95576 - RNA, 1575 nt, Artificial Sequence
  derived and/or modified CDS sequence (opt1) from glycoprotein__RABV__KF663534.1
augaucccccaggugcuccuguucgucccgcugcugguguucagcuccugcuucggcaaguuccccaucuacaccauccccgacaagcucgggcccuggagcccgaucgacauccaccaccuguccugccccaacaaccugguggucgaggacgagggcugcaccaaccucagcggguucuccuacauggagcugaaggugggcuacaucagcgccaucaaggugaacggguucacgugcaccggcgucgugaccgaggccgagaccuacacgaacuucgugggcuacgucaccaccaccuucaagcgcaagcacuuccggcccaugcccgacgcgugccgcgccgccuacaacuggaagguggccggggacccgcgguacgaggagucccugcacaaccccuaccccgacuaccacuggcuccgcacggugaagaccaccaaggagagccuggucaucaucucccccagcguggccgaccuggacccguacgacaagucccuccacagccggguguuccccggcgggaagugcuccggcaucaccgucagcuccacgugcugcagcaccaaccacgacuacaccaucuggaugcccgagaacccccgccuggggaccuccugcgacaucuucacgaacagccggggcaagcgcgcguccaagggcgggaagaccugcggcuucggggacgagcggggccuguacaagagccucaacggcgccugcaagcugaagcugugcggggugcucggccugcgccggauggacgggaccuggguggccauccagaccagcgacgagaucaaguggugcccgcccgaccagcuggucaaccuccacgacuuccacuccgacgagaucgagcaccuggugguggaggagcuggucaagaagcgcgaggagugccucgacgcccuggagacgaucaugaccaccaagagcguguccuuccggcgccugagccaccuccggaagcuggugcccggcuucgggaaggcguacaccaucuucaacaagacgcugauggaggccgacgcccacuacaaguccauccgcaccuggaacgagaucauccccagcaagggcugccuccgggucggcgggcgcugccacccgcacgugaacggcgucuucuucaacgggaucauccugggccccgacgggcacgugcugauccccgagaugcaguccagccuccugcaccagcacauggagcugcucgaguccagcgugaucccccugaugcacccgcuggccgaccccuccaccgucuucaaggacggcgacgaggccgaggacuucguggaggugcaccuccccgacguccacaagcagaucagcggcguggaccuggggcugcccaacuggggcaaguacgugaugaucuccgcgggggcccucaccgcccugaugcugacgaucuuccucaugaccugcugccggaagaccaaccgcgccggcagcauccagcacuccccgggggagaccggccggaaggucagcgugacgucccacaacggccgcgugaucagccugugggaguccuacaagagcgagagcgagaccaagcuguga

SEQ ID NO: 95577 - RNA, 1575 nt, Artificial Sequence
  derived and/or modified CDS sequence (opt1) from glycoprotein__RABV__KF663535.1
augaucccccaggugcugcuguucgucccgcugcuggugaucagcuccugcuucggcaaguuccccaucuacaccauccccgacaagcucgggcccuggagcccgaucgacauccaccaccuguccugccccaacaaccugguggucgaggacgagggcugcaccaaccucagcggguucuccuacauggagcugaaggugggcuacaucagcgccaucaaggugaacggguucacgugcaccggcgucgugaccgaggccgagaccuacacgaacuucgugggcuacgucaccaccaccuucaagcgcaagcacuuccggcccaugcccgacgcgugccgcgccgccuacaacuggaagguggccggggacccgcgguacgaggagucccugcacaaccccuaccccgacuaccacuggcuccgcacggugaagaccaccaaggagagccuggucaucaucucccccagcguggccgaccuggacccguacgacaagucccuccacagccggguguuccccggcgggaagugcuccggcaucaccgucagcuccacgugcugcagcaccaaccacgacuacaccaucuggaugcccgagaacccccgccuggggaccuccugcgacaucuucacgaacagccggggcaagcgcgcguccaagggcgggaagaccugcggcuucguggacgagcgggggcuguacaagagccucaagggcgccugcaagcugaagcugugcggcgugcucgggcugcgccugauggacggcaccugggucgccauccagaccagcgacgagaucaaguggugcccgcccgaccagcucgugaaccugcacgacuuccacuccgacgagaucgagcaccugguggucgaggagcucgugaagaagcgggaggagugccuggacgcccuggagacgaucaugaccaccaagagcguguccuuccgccggcucagccaccuccgcaagcugguccccggguucggcaaggcguacaccaucuucaacaagacgcucauggaggccgacgcccacuacaaguccauccggaccuggaacgagaucauccccagcaaggggugccugcgcgugggcggccggugccacccgcacgucaacgggguguucuucaacggcaucauccuggggcccgacggccacgugcucauccccgagaugcaguccagccugcugcaccagcacauggagcuccuggaguccagcgucaucccccugaugcacccgcucgccgaccccuccaccguguucaaggacggggacgaggccgaggacuucguggagguccaccuccccgacgugcacaagcagaucagcggcguggaccugggccugcccaacugggggaaguacguccugaucuccgcgggcgcccugaccgcccucaugcugacgaucuuccugaugaccugcugccgcaagaccaaccgggccgggagcauccagcacuccccgggcgagaccgggcgcaaggugagcgugacgucccacaacggccgggucaucuuccucugggagagcuacaaguccggcagcgagaccaagcuguga

SEQ ID NO: 95578 - RNA, 1575 nt, Artificial Sequence
  derived and/or modified CDS sequence (opt1) from glycoprotein__RABV__KF663536.1
augaucccccaggugcugcuguucgucccgcugcugguguucagcuccugcuucggcaaguuccccaucuacaccauccccgacaagcucgggcccuggagcccgaucgacauccaccaccuguccugccccaacaaccugguggucgaggacgagggcugcaccaaccucagcggguucuccuacauggagcugaaggugggcuacaucagcgccaucaaggugaacggguucacgugcaccggcgucgugaccgaggccgagaccuacacgaacuucgugggcuacgucaccaccaccuucaagcgcaagcacuuccggcccaugcccgacgcgugccgcgccgccuacaacuggaagguggccggggacccgcgguacgaggagucccugcacaaccccuaccccgacuaccacuggcuccgcacggugaagaccaccaaggagagccuggucaucaucucccccagcguggccgaccuggacccguacgacaagucccuccacagccggguguuccccggcgggaagugcuccggcaucaccgucagcuccacgugcugcagcaccaaccacgacuacaccaucuggaugcccgagaacccccgccuggggaccuccugcgacaucuucacgaacagccggggcaagcgcgcguccaagggcgggaagaccugcggcuucguggacgagcgggggcugugcaagagccucaagggcgccugcaagcugaagcugugcggcgugcucgggcugcgccugauggacggcaccugggucgccauccagaccagcgacgagaucaaguggugcccgcccgaccagcucgugaaccugcacgacuuccacuccgacgagaucgagcaccugguggucgaggagcucgugaagaagcgggaggagugccuggacgcccuggagacgaucaugaccaccaagagcguguccuuccgccggcucagccaccuccgcaagcugguccccggguucggcaaggcguacaccaucuucaacaagacgcucauggaggccgacgcccacuacaaguccauccggaccuggaacgagaucauccccagcaaggggugccugcgcgugggcggccggugccacccgcacgucaacgggguguucuucaacggcaucauccuggggcccgacggccacgugcucauccccgagaugcaguccagccugcugcaccagcacauggagcuccuggaguccagcgucaucccccugaugcacccgcucgccgaccccuccaccguguucaaggacggggacgaggccgaggacuucguggagguccaccuccccgacgugcacaagcagaucagcggcguggaccugggccugcccaacugggggaaguacguccugaucuccgcgggcgcccugaccgcccucaugcugacgaucuuccugaugaccugcugccgcaagaccaaccgggccgggagcauccagcacuccccgggcgagaccgggcgcaaggugagcgugacgucccacaacggccgggucaucagccucugggaguccuacaagagcggcagcgagaccaagcuguga

SEQ ID NO: 95579 - RNA, 1575 nt, Artificial Sequence
  derived and/or modified CDS sequence (opt1) from glycoprotein__RABV__KF663537.1
augaucccccaggugcuccuguucgucccgcugcuggacuucagcuccugcuucggcaaguuccccaucuacaccauccccgacaagcucgggcccuggagcccgaucgacauccaccaccuguccugccccaacaaccuggugguggaggacgagggcugcaccaaccucagcggguucuccuacauggagcugaaggucggcuacaucagcgccaucaaggugaacggguucacgugcaccggcguggucaccgaggccgagaccuacacgaacuucgugggcuacgugaccaccaccuucaagcgcaagcacuuccggcccaugcccgacgcgugccgcgccgccuacaacuggaaggucgccggggacccgcgguacgaggagucccugcacaaccccuaccccgacuaccacuggcuccgcacggugaagaccaccaaggagagccuggugaucaucucccccagcgucgccgaccuggacccguacgacaagucccuccacagccggguguuccccggcgggaagugcuccggcaucaccgugagcuccacgugcugcagcaccaaccacgacuacaccaucuggaugcccgagaacccccgccuggggaccuccugcgacaucuucacgaacagccggggcaagcgcgcguccaagggcgggaagaccugcggcuucgucgacgagcgggggcuguacaagagccucaacggcgccugcaagcugaagcugugcggcgugcucgggcugcgccggauggacggcaccuggguggccauccagaccagcgacgagaucaaguggugcccgcccgaccagcuggucaaccuccacgacuuccacuccgacgagaucgagcaccuggugguggaggagcuggucaagaagcgcgaggagugccucgacgcccuggagacgaucaugaccaccaagagcguguccuuccggcgccugagccaccuccggaagcuggugcccggguucggcaaggcguacaccaucuucaacaagacgcugauggaggccgacgcccacuacaaguccauccgcaccuggaacgagaucauccccagcaaggggugccuccgggucggcggccgcugccacccgcacgugaacggggucuucuucaacggcaucauccuggggcccgacggccacgugcugauccccgagaugcaguccagccuccugcaccagcacauggagcugcucgaguccagcgugaucccccugaugcacccgcuggccgaccccuccaccgucuucaaggacggggacgaggccgaggacuucguggaggugcaccuccccgacguccacaagcagaucagcggcguggaccugggccugcccaacugggggaaguacgugcucaucuccgcgggcgcccugaccgcccugaugcucacgaucuuccugaugaccugcugccggaagaccaaccgcgccgggagcauccagcacuccccgggcgagaccgggcggaaggucagcgugacgucccacaacggccgcgugaucagccugugggaguccuacaagagcgagagcgagaccaagcucuga

SEQ ID NO: 95580 - RNA, 1575 nt, Artificial Sequence
  derived and/or modified CDS sequence (opt1) from glycoprotein__RABV__KF663538.1
augaucccccaggugcugcuguucgucccgcugcugguguucagcuccugcuucggcaaguuccccaucuacaccauccccgacaagcucgggcccuggagcccgaucgacauccaccaccuguccugccccaacaaccugguggucgaggacgagggcugcaccaaccucagcggguucuccuacauggagcugaaggugggcuacaucagcgccaucaaggugaacggguucacgugcaccggcgucgugaccgaggccgagaccuacacgaacuucgugggcuacgucaccaccaccuucaagcgcaagcacuuccggcccaugcccgacgcgugccgcgccgccuacaacuggaagguggccggggacccgcgguacgaggagucccugcacaaccccuaccccgacuaccacuggcuccgcacggugaagaccaccaaggagagccuggucaucaucucccccagcguggccgaccuggacccguacgacaagucccuccacagccggguguuccccggcgggaagugcuccggcaucaccgucagcuccacgugcugcagcaccaaccacgacuacaccaucuggaugcccgagaacccccgccuggggaccuccugcgacaucuucacgaacagccggggcaagcgcgcguccaagggcgggaagaccugcggcuucguggacgagcgggggcuguacaagagccucaagggcgccugcaagcugaagcugugcggcgugcucgggcugcgccugauggacggcaccugggucgccauccagaccagcgacgagaucauccggugcccgcccgaccagcucgugaaccugcacgacuuccacuccgacgagaucgagcaccugguggucgaggagcucgugaagaagcgcgaggagugccuggacgcccuggagacgaucaugaccaccaagagcguguccuuccggcgccucagccaccuccggaagcugguccccggguucggcaaggcguacaccaucuucaacaagacgcucauggaggccgacgcccacuacaaguccauccgcaccuggaacgagaucauccccagcaaggggugccugcgggugggcggccgcugccacccgcacgucaacgggguguucuucaacggcaucauccuggggcccgacggccacgugcucauccccgagaugcaguccagccugcugcaccagcacauggagcuccuggaguccagcgucaucccccugaugcacccgcucgccgaccccuccaccguguucaaggacggggacgaggccgaggacuucguggagguccaccuccccgacgugcacaagcagaucagcggcguggaccugggccugcccaacugggggaaguacguccugaucuccgcgggcgcccugaccgcccucaugcugacgaucuuccugaugaccugcugccggaagaccaaccgcgccgggagcauccagcacuccccgggcgagaccgggcggaaggugagcgugacgucccacaacggccgcgucaucagccucugggaguccuacaagagcgagagcgagaccaagcuguga

SEQ ID NO: 95581 - RNA, 1575 nt, Artificial Sequence
  derived and/or modified CDS sequence (opt1) from glycoprotein__RABV__KF663539.1
augaucccccaggugcugcuguucgucccgcugcugguguucagcuccugcuucggcaaguuccccaucuacaccauccccgacaagcucgggcccuggagcccgaucgacauccaccaccuguccugccccaacaaccugguggucgaggacgagggcugcaccaaccucagcggguucuccuacauggagcugaaggugggcuacaucagcgccaucaaggugaacggguucacgugcaccggcgucgugaccgaggccgagaccuacacgaacuucgugggcuacgucaccaccaccuucaagcgcaagcacuuccggcccaugcccgacgcgugccgcgccgccuacaacuggaagauggccggggacccgcgguacgaggagucccugcacaaccccuaccccgacuaccacuggcuccgcacggugaagaccaccaaggagagccuggugaucaucucccccagcgucgccgaccuggacccguacgacaagucccuccacagccggguguuccccggcgggaagugcuccggcaucaccgugagcuccacgugcugcagcaccaaccacgacuacaccaucuggaugcccgagaacccccgccuggggaccuccugcgacaucuucacgaacagccggggcaagcgcgcguccaagggcgggaagaccugcggcuucggggacgagcggggccuguacaagagccuccgcggcgccugcaagcugaagcugugcgggguccucggccugcggcugauggacgggaccuggguggugauccagaccagcgacgagaucaaguggugcuccccggaccagcucgucaaccugcacgacuuccacagcgacgagaucgagcaccuggugguggaggagcucgucaagaagcgcgaggagugccuggacgcccuggagacgaucaugaccaccaaguccgugagcuuccggcgccucucccaccuccggaagcuggugcccggcuucgggaaggccuacaccaucuucaacaagacgcucauggaggcggacgcccacuacaagagcauccgcaccuggaacgagaucauccccuccaagggcugccugcgggucggcgggcgcugccacccccacgugaacggcgucuucuucaacgggaucauccugggcccggacgggcacgugcucauccccgagaugcagagcucccugcugcaccagcacauggagcuccuggagagcuccgugaucccccugaugcacccccucgccgacccgagcaccgucuucaaggacggcgacgaggccgaggacuucguggaggugcaccuccccgacguccacaagcagaucuccggcguggaccuggggcugcccaacuggggcaaguacgugcugaucagcgccggggcgcugaccgcccucaugcugaugaucuuccugaugacgugcugccggaagaccaaccgcgccgaguccauccagcacagccccggcgagaccgggcggaaggucuccgugaccagccacaacggccgcgugaucuccagcugggagagcuacaaguccgagagcgagacgaagcucuga

SEQ ID NO: 95582 - RNA, 1575 nt, Artificial Sequence
  derived and/or modified CDS sequence (opt1) from glycoprotein__RABV__KF663540.1
augaucccccaggugcugcuguucgucccgcugcugguguucagcuccugcuucggcaaguuccccaucuacaccauccccgacaagcucgggcccuggagcccgaucgacauccaccaccuguccugccccaacaaccugguggucgaggacgagggcugcaccaaccucagcggguucuccuacauggagcugaaggugggcuacaucagcgccaucaaggugaacggguucacgugcaccggcgucgugaccgaggccgagaccuacacgaacuucgugggcuacgucaccaccaccuucaagcgcaagcacuuccggcccaugcccgacgcgugccgcgccgccuacaacuggaagauggccggggacccgcgguacgaggagucccugcacaaccccuaccccgacuaccacuggcuccgcacggugaagaccaccaaggagagccuggugaucaucucccccagcgucgccgaccuggacccguacgacaagucccuccacagccggguguuccccggcgggaagugcuccggcaucaccgugagcuccacgugcugcagcaccaaccacgacuacaccaucuggaugcccgagaacccccgccuggggaccuccugcgacaucuucacgaacagccggggcaagcgcgcguccaagggcgggaagaccugcggcuucgucgacgagcgggggcuguacaagagccucaccggcgccugcaagcugaagcugugcggcgugcucgggcugagccugauggacggcaccuggguggccauccagacguccgacgagaucaaguggugcagcccggaccagcucgucaaccugcacgacuuccacuccgacgagaucgagcaccuggugguggaggagcucgucaagaagcgcgaggagugccuggacgcccuggagaccaucaugaccaccaagagcguguccuuccggcgccucagccaccuccggaagcuggugcccggguucggcaaggcguacacgaucuucaacaagacccucauggaggccgacgcccacuacaaguccauccgcaccuggaacgagaucauccccagcaaggggugccugcgggucggcggccgcugccacccccacgugaacggggucuucuucaacggcaucauccuggggccggacggccacgugcucauccccgagaugcaguccagccugcugcaccagcacauggagcuccuggaguccagcgugaucccccugaugcacccccucgccgacccguccaccgucuucaaggacggggacgaggccgaggacuucguggaggugcaccuccccgacguccacaagcagaucagcggcguggaccugggccugcccaacugggggaaguacgugcugaucuccgcgggcgcccugacggcccucaugcugaugaucuuccugaugaccugcugccggaagaccaaccgcgccgagagcauccagcacucccccggggagaccggccggaaggucagcgugacgucccacaacgggcgcgugaucagcagcugggaguccuacaagagcgaguccgagaccaagcucuga

SEQ ID NO: 95583 - RNA, 1575 nt, Artificial Sequence
  derived and/or modified CDS sequence (opt1) from glycoprotein__RABV__KF663541.1
augaucccccaggugcuccuguucgucccgcugcugguguucagcuccugcuucggcaaguuccccaucuacaccauccccgacaagcucgggcccuggagcccgaucgacauccaccaccuguccugccccaacaaccugguggucgaggacgagggcugcaccaaccucagcggguucuccuacauggagcugaaggugggcuacaucagcgccaucaaggugaacggguucacgugcaccggcgucgugaccgaggccgagaccuacacgaacuucgugggcuacgucaccaccaccuucaagcgcaagcacuuccggcccaugcccgacgcgugccgcgccgccuacaacuggaagauggccggggacccgcgguacgaggagucccugcacaaccccuaccccgacuaccacuggcuccgcacggugaagaccaccaaggagagccuggugaucaucucccccagcgucgccgaccuggacccguacgacaagucccuccacagccggguguuccccggcgggaagugcuccggcaucaccgugagcuccacgugcugcagcaccaaccacgacuacaccaucuggaugcccgagaacccccgccuggggaccuccugcgacaucuucacgaacagccggggcaagcgcgcguccaagggcgggaagaccugcggcuucgucgacgagcgggggcuguacaagagcagcaagggcgccugcaagcucaagcugugcggcgugcuggggcuccgccugauggacggcaccuggguggccauccagaccuccgacgagaucaaguggugcagcccggaccagcuggucaaccuccacgacuuccacuccgacgagaucgagcaccuggugguggaggagcuggucaagaagcgggaggagugccucgacgcccuggagacgaucaugaccaccaagagcguguccuuccgccggcugagccaccuccgcaagcuggugcccggguucggcaaggcguacaccaucuucaacaagacgcugauggaggccgacgcccacuacaaguccauccggaccuggaacgagaucauccccagcaaggggugccuccgcgucggcggccggugccacccccacgugaacggggucuucuucaacggcaucauccuggggccggacggccacgugcugauccccgagaugcaguccagccuccugcaccagcacauggagcugcucgaguccagcgugaucccccugaugcacccccuggccgacccguccaccgucuucaaggacggggacgaggccgaggacuucguggaggugcaccuccccgacguccacaagcagaucagcggcguggaccugggccugcccaacugggggaaguacgugcucaucuccgcgggcgcccugaccgcccugaugcucaugaucuuccugaugacgugcugccgcaagaccaaccgggccgagagcauccagcacucccccggggagaccggccgcaaggucagcgugaccucccacaacgggcgggugaucagcagcugggaguccuacaagagcggcuccgagacgaagcuguga

SEQ ID NO: 95584 - RNA, 1575 nt, Artificial Sequence
  derived and/or modified CDS sequence (opt1) from glycoprotein__RABV__KF663542.1
auguucccgcccgugcugcuguucgucccccugcugguguucagcuccugcuucggcaaguuccccaucuacaccauccccgacaagcucgggccguggagccccaucgacauccaccaccuguccugccccaacaaccugguggucgaggacgagggcugcaccaaccucagcggguucuccuacauggagcugaaggugggcuacaucagcgccaucaaggugaacggguucacgugcaccggcgucgugaccgaggccgagaccuacacgaacuucgugggcuacgucaccaccaccuucaagcgcaagcacuuccggcccaugccggacgcgugccgcgccgccuacaacuggaagguggccggggacccccgguacgaggagucccugcacaaccccuaccccgacuaccacuggcuccgcacggugaagaccaccaaggagagccuggucaucaucuccccgagcguggccgaccuggaccccuacgacaagucccuccacagccggguguuccccggcgggaagugcuccggcaucaccgucagcuccacgugcugcagcaccaaccacgacuacaccaucuggaugcccgagaacccgcgccuggggaccuccugcgacaucuucacgaacagccggggcaagcgcgcguccaagggcgggaagaccugcggcuuccgggacgagcgcgggcuguacaagagccucaagggcgccugcaagcugaagcugugcggcgugcucgggcugcggcugauggacggcaccuggguggccacccagacgagcaacgagaucaaguggugcccgcccgaccagcucgucaaccugcacgacuuccacuccgacgagaucgagcaccuggugguggaggagcucgucaagaagcgcgaggagugccuggacgcccuggagaccaucaugaccaccaagagcguguccuuccggcgccucagccaccuccggaagcuggugcccggguucggcaaggcguacacgaucuucaacaagacccucauggaggccgacgcccacuacaaguccauccgcaccuggaacgagaucauccccagcaaggggugccugcgggucggcggccgcugccacccccacgugaacggggucuucuucaacggcaucauccuggggcccgacggccacgugcucauccccgagaugcaguccagccugcugcaccagcacauggagcuccuggaguccagcgugaucccgcugaugcacccccucgccgaccccuccaccgucuucaaggacggggacgaggccgaggacuucguggaggugcaccuccccgacguccacaagcagaucagcggcguggaccugggccugccgaacugggggaaguacgugcugaucuccgcgggcgcccugacggcccucaugcugaccaucuuccugaugaccugcugccggaagaccaaccgcgccgggagcauccagcacucccccggcgagacggggcggaaggucagcgugaccucccacaacggccgcgugaucuuccucugggagagccacaucuccggcagcgagaccaagcuguga

SEQ ID NO: 95585 - RNA, 1575 nt, Artificial Sequence
  derived and/or modified CDS sequence (opt1) from glycoprotein__RABV__KF663543.1
auguucccccaggugcugcuguucgucccgcugcugguguucagcuccugcuucggcaaguuccccaucuacaccauccccgacaagcucgggcccuggagcccgaucgacauccaccaccuguccugccccaacaaccugguggucgaggacgagggcugcaccaaccucagcggguucuccuacauggagcugaaggugggcuacaucagcgccaucaaggugaacggguucacgugcaccggcgucgugaccgaggccgagaccuacacgaacuucgugggcuacgucaccaccaccuucaagcgcaagcacuuccggcccaugcccgacgcgugccgcgccgccuacaacuggaagguggccggggacccgcgguacgaggagucccugcacaaccccuaccccgacuaccacuggcuccgcacggugaagaccaccaaggagagccuggucaucaucucccccagcguggccgaccuggacccguacgacaagucccuccacagccggguguuccccggcgggaagugcuccggcaucaccgucagcuccacgugcugcagcaccaaccacgacuacaccaucuggaugcccgagaacccccgccuggggaccuccugcgacaucuucacgaacagccggggcaagcgcgcguccaagggcgggaagaccugcggcuucgaggacgagcgggggcuguacaagagccucaccggcgccugcaagcugaagcugugcggcgugcucgggcugcgccugauggacggcaccuggguggccauccagacgagcgacgagaucaaguggugcccgcccgaccagcucgucaaccugcacgacuuccacuccgacgagaucgagcaccuggugguggaggagcucgucaagaagcgggaggagugccuggacgcccuggagaccaucaugaccaccaagagcguguccuuccgccggcucagccaccuccgcaagcuggugcccggguucggcaaggcguacacgaucuucaacaagacccucauggaggccgacgcccacuacaaguccauccggaccuggaacgagaucauccccagcaaggggugccugcgcgucggcggccggugccacccgcacgugaacggggucuucuucaacggcaucauccuggggcccgacggccacgugcucauccccgagaugcaguccagccugcugcaccagcacauggagcuccuggaguccagcgugaucccccugaugcacccgcucgccgaccccuccaccgucuucaaggacggggacgaggccgaggacuucguggaggugcaccuccccgacguccacaagcagaucagcggcguggaccugggccugcccaacugggggaaguacgugcugaucuccgcgggcgcccugacggcccucaugcugaccaucuuccugaugaccugcugccgcaagaccaaccgggccgggagcauccagcacuccccgggcgagacggggcgcaaggucagcgugaccucccacaacggccgggugaucagccucugggaguccuacaagagcggcagcgagaccaagcuguga

SEQ ID NO: 95586 - RNA, 1575 nt, Artificial Sequence
  derived and/or modified CDS sequence (opt1) from glycoprotein__RABV__KF663544.1
auguucccccaggugcuccuguucgucccgcugcugguguucagcuccugcuucggcaaguuccccaucuacaccauccccgacaagcucgggcccuggagcccgaucgacauccaccaccuguccugccccaacaaccugguggucgaggacgagggcugcaccaaccucagcggguucuccuacauggagcugaaggugggcuacaucagcgccaucaaggugaacggguucacgugcaccggcgucgugaccgaggccgagaccuacacgaacuucgugggcuacgucaccaccaccuucaagcgcaagcacuuccggcccaugcccgacgcgugccgcgccgccuacaacuggaagguggccggggacccgcgguacgaggagucccugcacaaccccuaccccgacuaccacuggcuccgcacggugaagaccaccaaggagagccuggucaucaucucccccagcguggccgaccuggacccguacgacaagucccuccacagccggguguuccccggcgggaagugcuccggcaucaccgucagcuccacgugcugcagcaccaaccacgacuacaccaucuggaugcccgagaacccccgccuggggaccuccugcgacaucuucacgaacagccggggcaagcgcgcguccaagggcgggaagaccugcggcuucgaggacgagcgggggcuguacaagagccucaagggcgccugcaagcugaagcugugcggcgugcucgggcugcgccggauggacggcaccuggguggccauccagaccagcgacgagaucaaguggugcccgcccgaccagcuggucaaccuccacgacuuccacuccgacgagaucgagcaccuggugguggaggagcuggucaagaagcgcgaggagugccucgacgcccuggagacgaucaugaccaccaagagcguguccuuccggcgccugagccaccuccggaagcuggugcccggguucggcaaggcguacaccaucuucaacaagacgcugauggaggccgacgcccacuacaaguccauccgcaccuggaacgagaucauccccagcaaggggugccuccgggucggcggccgcugccacccgcacgugaacggggucuucuucaacggcaucauccuggggcccgacggccacgugcugauccccgagaugcaguccagccuccugcaccagcacauggagcugcucgaguccagcgugaucccccugaugcacccgcuggccgaccccuccaccgucuucaaggacggggacgaggccgaggacuucguggaggugcaccuccccgacguccacaagcagaucagcggcguggaccugggccugcccaacugggggaaguacgugcucaucuccgcgggcgcccugaccgcccugaugcucacgaucuuccugaugaccugcugccggaagaccaaccgcgccgggagcauccagcacuccccgggcgagaccgggcggaaggucagcgugacgucccacaacggccgcgugaucagccugugggaguccuacaagagcggcagcgagaccaagcucuga

SEQ ID NO: 95587 - RNA, 1575 nt, Artificial Sequence
  derived and/or modified CDS sequence (opt1) from glycoprotein__RABV__KF663545.1
auguucccccaggugcugcuguucgucccgcugcugguguucagcuccugcuucggcaaguuccccaucuacaccauccccgacaagcucgggcccuggagcccgaucgacauccaccaccuguccugccccaacaaccugguggucgaggacgagggcugcaccaaccucagcggguucuccuacauggagcugaaggugggcuacaucagcgccaucaaggugaacggguucacgugcaccggcgucgugaccgaggccgagaccuacacgaacuucgugggcuacgucaccaccaccuucaagcgcaagcacuuccggcccaugcccgacgcgugccgcgccgccuacaacuggaagguggccggggacccgcgguacgaggagucccugcacaaccccuaccccgacuaccacuggcuccgcacggugaagaccaccaaggagagccuggucaucaucucccccagcguggccgaccuggacccguacgacaagucccuccacagccggguguuccccggcgggaagugcuccggcaucaccgucagcuccacgugcugcagcaccaaccacgacuacaccaucuggaugcccgagaacccccgccuggggaccuccugcgacaucuucacgaacagccggggcaagcgcgcguccaagggcgggaagaccugcggcuucggggacgagcggggccuguacaagagccucaagggcgccugcaagcugaagcugugcggggugcucggccugcgccugauggacgggaccuggguggccauccagaccagcgacgagaucaaguggugcccgcccgaccagcucgucaaccugcacgacuuccacuccgacgagaucgagcaccuggugguggaggagcucgucaagaagcgggaggagugccuggacgcccuggagacgaucaugaccaccaagagcguguccuuccgccggcucagccaccuccgcaagcuggugcccggcuucgggaaggcguacaccaucuucaacaagacgcucauggaggccgacgcccacuacaaguccauccggaccuggaacgagaucauccccagcaagggcugccugcgcgucggcgggcggugccacccgcacgugaacggcgucuucuucaacgggaucauccugggccccgacgggcacgugcucauccccgagaugcaguccagccugcugcaccagcacauggagcuccuggaguccagcgugaucccccugaugcacccgcucgccgaccccuccaccgucuucaaggacggcgacgaggccgaggacuucguggaggugcaccuccccgacguccacaagcagaucagcggcguggaccuggggcugcccaacuggggcaaguacgugcugaucuccgcgggggcccugaccgcccucaugcugaugaucuuccugaugacgugcugccgcaagaccaaccgggccgagagcauccagcacuccccgggcgagaccgggcgcaaggucagcgugaccucccacaacggccgggugaucagcuccugggagagcuacaagagcggcuccgagacgaagcucuga

SEQ ID NO: 95588 - RNA, 1575 nt, Artificial Sequence
  derived and/or modified CDS sequence (opt1) from glycoprotein__RABV__KF663546.1
auguucccccaggugcugcuguucgucccgcugcugguguucagcuccugcuucggcaaguuccccaucuacaccauccccgacaagcucgggcccuggagcccgaucgacauccaccaccuguccugccccaacaaccugguggucgaggacgagggcugcaccaaccucagcggguucuccuacauggagcugaaggugggcuacaucagcgccaucaaggugaacggguucacgugcaccggcgucgugaccgaggccgagaccuacacgaacuucgugggcuacgucaccaccaccuucaagcgcaagcacuuccggcccaugcccgacgcgugccgcgccgccuacaacuggaagguggccggggacccgcgguacgaggagucccugcacaaccccuaccccgacuaccacuggcuccgcacggugaagaccaccaaggagagccuggucaucaucucccccagcguggccgaccuggacccguacgacaagucccuccacagccggguguuccccggcgggaagugcuccggcaucaccgucagcuccacgugcugcagcaccaaccacgacuacaccaucuggaugcccgagaacccccgccuggggaccuccugcgacaucuucacgaacagccggggcaagcgcgcguccaagggcgggaagaccugcggcuucguggacgagcgggggcuguacaagagccucaagggcgccugcaagcugaagcugugcggcgugcucgggcugcgccugauggacggcaccugggucgccauccagaccagcgacgagaucaaguggugcccgcccgaccagcucgugaaccugcacgacuuccacuccgacgagaucgagcaccugguggucgaggagcucgugaagaagcgggaggagugccuggacgcccuggagacgaucaugaccaccaagagcguguccuuccgccggcucagccaccuccgcaagcugguccccggguucggcaaggcguacaccaucuucaacaagacgcucauggaggccgacgcccacuacaaguccauccggaccuggaacgagaucauccccagcaaggggugccugcgcgugggcggccggugccacccgcacgucaacgggguguucuucaacggcaucauccuggggcccgacggccacgugcucauccccgagaugcaguccagccugcugcaccagcacauggagcuccuggaguccagcgucaucccccugaugcacccgcucgccgaccccuccaccguguucaaggacggggacgaggccgaggacuucguggagguccaccuccccgacgugcacaagcagaucagcggcguggaccugggccugcccaacugggggaaguacguccugaucuccgcgggcgcccugaccgcccucaugcugccgaucuuccugaugacgugcugccgcaagaccaaccgggccgggagcauccagcccucccccggcgagaccgggcgcaaggugagcgugaccucccacaacggccgggucaucagccucugggaguccuacaagagcggcagcgagacgaagcuguga

SEQ ID NO: 95589 - RNA, 1575 nt, Artificial Sequence
  derived and/or modified CDS sequence (opt1) from glycoprotein__RABV__KF709069.1
auggugccccaggcccugcuguucgucccccugcugguguucagcaugugcuucggcaaguuccccaucuacaccauccccgacaagcucgggcccugguccccgaucgacauccaccaccugagcugccccaacaaccugguggucgaggacgagggcugcaccaaccucuccggguucagcuacauggagcugaaggugggcuacaucuccgccaucaaggugaacggguucacgugcaccggcgucgugaccgaggcggagaccuacacgaacuucgugggcuacgucaccaccauguucaagcgcaagcacuuccggcccacccccgacgccugccgcgccgccuacaacuggaagauggccggggacccgcgguacgaggagagccugcacaaccccuaccccgacuaccacuggcuccgcacggugaagaccaccaaggagucccuggugaucaucagccccuccgucgcggaccuggacccguacgacaagagccuccacucccggguguuccccaacggcaagugcagcgggaucaccaucuccagcacguacugccccaccaaccacgacuacaccaucuggcugcccgagaacccgcgccugggcaccuccugcgacaucuucacgaacagccgggggaagcgcgccuccaagggcagcaagaccugcggcuucguggacgagcgggggcucuacaagucccugaagggcgccugcaagcugaagcucugcgggguccugggccugcgccucauggacggcaccuggguggccaugcaggcgagcgacgagaccaaguggugcccgcccgaccagcuggugaaccugcacgacuuccggagcgacgagaucgagcacuucgucguggaggagcucgugaagaagcgcgaggagugccuggacgcccuggaguccaucaugacgaccaagagcgucuccuuccggcgccucagccaccuccggaagcuggugcccggguucggcaaggccuacaccaucuucaacaagacccucauggaggccgacgcccacuacaaguccgugcgcacguggaacgagaucauccccagcaaggggugccugcgggucggcgggcgcugccacccccacgugaacggcgucuucuucaacggcaucauccuggggcccgacggccacgugcucauccccgagaugcaguccagccugcugcagcagcacauggagcuccuggaguccagcgugaucccgcugaugcacccccucgcggaccccuccaccgucuucaaggacggggacgaggccgagaacuucguggaggugcaccuccccgacguccacaagcagaucagcggcguggaccuggggcugccgaacuggggcaaguacgugcuggucuccgccggcgugcugaucgcccucaugcugaucaucuuccugaugaccugcugcgggcgggugaaccgccccaagagcacccagcacaaccucggcgggacgggccgggaggucuccgugaccccgcagagcgggaaggugaucuccagcugggaguccuacaagagcggcggcgagacccgccuguga

SEQ ID NO: 95590 - RNA, 1575 nt, Artificial Sequence
  derived and/or modified CDS sequence (opt1) from glycoprotein__RABV__KF709070.1
auggugccccaggcccugcuguucgucccccugcugguguucagcaugugcuucggcaaguuccccaucuacaccauccccgacaagcucgggcccugguccccgaucgacauccaccaccugagcugccccaacaaccugguggucgaggacgagggcugcaccaaccucuccggguucagcuacauggagcugaaggugggcuacaucuccgccaucaaggugaacggguucacgugcaccggcgucgugaccgaggcggagaccuacacgaacuucgugggcuacgucaccaccauguucaagcgcaagcacuuccggcccacccccgacgccugccgcgccgccuacaacuggaagauggccggggacccgcgguacgaggagagccugcacaaccccuaccccgacuaccacuggcuccgcacggugaagaccaccaaggagucccuggugaucaucagccccuccgucgcggaccuggacccguacgacaagagccuccacucccggguguuccccaacggcaagugcagcgggaucaccaucuccagcacguacugccccaccaaccacgacuacaccaucuggcugcccgagaacccgcgccugggcaccuccugcgacaucuucacgaacagccgggggaagcgcgccuccaagggcagcaagaccugcggcuucguggacgagcgggggcucuacaagucccugaagggcgccugcaagcugaagcucugcgggguccugggccugcgccucauggacggcaccuggguggccaugcaggcgagcgacgagaccaaguggugcccgcccgaccagcuggugaaccugcacgacuuccggagcgacgagaucgagcaccucgucguggaggagcuggugaagaagcgcgaggagugccuggacgcccucgaguccaucaugacgaccaagagcgucuccuuccggcgccugagccaccuccggaagcucgugcccggguucggcaaggccuacaccaucuucaacaagacccugauggaggccgacgcccacuacaaguccgugcgcacguggaacgagaucauccccagcaaggggugccugcgggucggcgggcgcugccacccccacgugaacggcgucuucuucaacggcaucauccucgggcccgacggccacgugcugauccccgagaugcaguccagccugcuccagcagcacauggagcugcuggaguccagcgugaucccgcucaugcacccccuggcggaccccuccaccgucuucaaggacggggacgaggccgagaacuucguggaggugcaccuccccgacguccacaagcagaucagcggcguggaccuggggcugccgaacuggggcaaguacgugcuggucuccgccggcgugcucaucgcccugaugcugaucaucuuccucaugaccugcugcgggcgggugaaccgccccaagagcacccagcacaaccugggcgggacgggccgggaggucuccgugaccccgcagagcgggaaggugaucuccagcugggaguccuacaagagcggcggcgagacccgccuguga

SEQ ID NO: 95591 - RNA, 1575 nt, Artificial Sequence; identical to SEQ ID NO: 95131
  derived and/or modified CDS sequence (opt1) from glycoprotein__RABV__KF709071.1

SEQ ID NO: 95592 - RNA, 1575 nt, Artificial Sequence; identical to SEQ ID NO: 95131
  derived and/or modified CDS sequence (opt1) from glycoprotein__RABV__KF709072.1

SEQ ID NO: 95593 - RNA, 1575 nt, Artificial Sequence
  derived and/or modified CDS sequence (opt1) from glycoprotein__RABV__KF709074.1
auggugccccaggcccugcuguucgucccgcugcugguguuccccaugugcuucggcaaguuccccaucuacaccauccccgacaagcucgggccguggagccccaucgacauccaccaccuguccugccccaacaaccugguggucgaggacgagggcugcaccaaccucagcggguucuccuacauggagcugaaggugggcuacaucagcgccaucaaggugaacggguucacgugcaccggcgucgugaccgaggcggagaccuacacgaacuucgugggcuacgucaccaccaccuucaagcgcaagcacuuccggcccacgccggacgccugccgcgccgccuacaacuggaagauggccggggacccccgguacgaggagucccugcacaaccccuaccccgacuaccacuggcuccgcaccgugaagaccaccaaggagagccuggugaucaucuccccgagcgucgcggaccuggaccccuacgacaagucccuccacagccggguguuccccaacggcaagugcuccgggaucacgaucagcuccaccuacugccccaccaaccacgacuacaccaucuggcugccggagaacccccgccugggcacgagcugcgacaucuucaccaacucccgggggaagcgcgccagcaagggcuccaagaccugcggcuucguggacgagcgggggcucuacaagagccugaagggcgccugcaagcugaagcucugcgggguccugggccugcgccucauggacggcaccuggguggccaugcaggcguccgacgagacgaaguggugcccgcccgaccagcuggugaaccugcacgacuuccggagcgacgagaucgagcaccucgucguggaggagcuggugaagaagcgcgaggagugccuggacgcccucgagagcaucaugaccaccaaguccgucagcuuccggcgccugucccaccuccggaagcucgugcccggguucggcaaggccuacaccaucuucaacaagacgcugauggaggccgacgcccacuacaagagcgugcgcaccuggaacgagaucauccccuccaaggggugccugcgggucggcgggcgcugcuacccccacgugaacggcgucuucuucaacggcaucauccucgggcccgacggccacgugcugaucccggagaugcagagcucccugcuccagcagcacauggagcugcuggagagcuccgugaucccccucaugcacccccuggcggaccccagcaccgucuucaaggacggggacgaggccgagaacuucguggaggugcaccucccggacguccacaagcagaucuccggcguggaccuggggcugcccaacuggggcaaguacgugcuggucagcgccggcgugcucaucgcccugaugcugaucaucuuccucaugaccugcugcgggcgggugaaccgccccaaguccacgcagcacaaccugggcgggaccggccgggaggucagcgugaccccgcaguccgggaaggugaucagcuccugggagagcuacaaguccggcggcgagacccgccuguga

SEQ ID NO: 95594 - RNA, 1575 nt, Artificial Sequence
  derived and/or modified CDS sequence (opt1) from glycoprotein__RABV__KF709075.1
auggugccccaggcccugcuguucgucccccugcugguguucagcaugugcuucggcaaguuccccaucuacaccauccccgacaagcucgggcccugguccccgaucgacauccaccaccugagcugccccaacaaccugguggucgaggacgagggcugcaccaaccucuccggguucagcuacauggagcugaaggugggcuacaucuccgccaucaaggugaacggguucacgugcaccggcgucgugaccgaggcggagaccuacacgaacuucgugggcuacgucaccaccaccuucaagcgcaagcacuuccggcccacgcccgacgccugccgcgccgccuacaacuggaagauggccggggacccgcgguacgaggagagccugcacaaccccuaccccgacuaccacuggcuccgcaccgugaagaccaccaaggagucccuggugaucaucagccccuccgucgcggaccuggacccguacgacaagagccuccacucccggguguuccccaacggcaagugcagcgggaucacgaucuccagcaccuacugccccaccaaccacgacuacaccaucuggcugcccgagaacccgcgccugggcacguccugcgacaucuucaccaacagccgggggaagcgcgccuccaagggcagcaagaccugcggcuucguggacgagcgggggcucuacaagucccugaagggcgccugcaagcugaagcucugcgggguccugggccugcgccucauggacggcaccuggguggccaugcaggcgagcgacgagacgaaguggugcccgcccgaccagcuggugaaccugcacgacuuccggagcgacgagaucgagcaccucgucguggaggagcuggugaagaagcgcgaggagugccuggacgcccucgaguccaucaugaccaccaagagcgucuccuuccggcgccugagccaccuccggaagcucgugcccggguucggcaaggccuacaccaucuucaacaagacgcugauggaggccgacgcccacuacaaguccgugcgcaccuggaacgagaucauccccagcaaggggugccugcgggucggcgggcgcugccacccccacgugaacggcgucuucuucaacggcaucauccucgggcccgacggccacgugcugauccccgagaugcaguccagccugcuccagcagcacauggagcugcuggaguccagcgugaucccgcucaugcacccccuggcggaccccuccaccgucuucaaggacggggacgaggccgagaacuucguggaggugcaccuccccgacguccacaagcagaucagcggcguggaccuggggcugccgaacuggggcaaguacgugcuggucuccgccggcgugcucaucgcccugaugcugaucaucuuccucaugaccugcugcgggcgggugaaccgccccgagagcacgcagcacaaccugggcgggaccggccgggaggucuccgugaccccgcagagcgggaaggugaucuccagcugggaguccuacaagagcggcggcgagacccgccuguga

SEQ ID NO: 95595 - RNA, 1575 nt, Artificial Sequence; identical to SEQ ID NO: 95594
  derived and/or modified CDS sequence (opt1) from glycoprotein__RABV__KF709076.1

SEQ ID NO: 95596 - RNA, 1575 nt, Artificial Sequence
  derived and/or modified CDS sequence (opt1) from glycoprotein__RABV__KF709077.1
auggugccccaggcccugcuguucgucccgcugcugguguucagcaugugcuucggcaaguuccccaucuacaccauccccgacaagcccgggccguggucccccaucgacauccaccaccucagcugccccaacaaccugguggucgaggacgagggcugcaccaaccuguccggguucagcuacauggagcucaaggugggcuacaucuccgccaucaaggugaacggguucacgugcaccggcgucgugaccgaggcggagaccuacacgaacuucgugggcuacgucaccaccaccuucaagcgcaagcacuuccggcccacgccggacgccugccgcgccgccuacaacuggaagauggccggggacccccgguacgaggagagccugcacaaccccuaccccgacuaccacuggcugcgcaccgugaagaccaccaaggagucccucgugaucaucagcccguccgucgcggaccuggaccccuacgacaagagccugcacucccggguguuccccaacgagaagugcagcggcaucacgaucuccagcaccuacugccccaccaaccacgacuacaccaucuggcucccggagaacccccgccuggggacguccugcgacaucuucaccaacagccggggcaagcgcgccuccaaggggagcaagaccugcggcuucguggacgagcggggccuguacaagucccucaagggggccugcaagcugaagcugugcggcguccucgggcugcgccugauggacggcaccuggguggccaugcaggcgagcgacgagacgaaguggugcccgcccgaccagcucgugaaccugcacgacuuccggagcgacgagaucgagcaccuggucguggaggagcucgugaagaagcgcgaggagugccuggacgcccuggaguccaucaugaccaccaagagcgucuccuuccggcgccucagccaccuccggaagcuggugcccggcuucgggaaggccuacaccaucuucaacaagacgcucauggaggccgacgcccacuacaaguccgugcgcaccuggaacgagaucauccccagcaagggcugccugcgggucgggggccgcugccacccccacgugaacggggucuucuucaacggcaucauccugggccccgacgggcacgugcucaucccggagaugcaguccagccugcugcagcagcacauggagcuccuggaguccagcgugaucccccugaugcacccccucgcggaccccuccaccgucuucaaggacggcgacgaggccgagaacuucguggaggugcaccucccggacguccacaagcagaucagcgggguggaccugggccugcccaacugggggaaguacgugcuggucuccgccggcgugcugaucgcccucaugcugaucaucuuccugaugaccugcugcggccgggugaaccgccccgagagcacgcagcacaaccucgggggcaccgggcgggaggucuccgugaccccgcagagcggcaaggugaucuccagcugggaguccuacaagagcgggggcgagacccgccuguga

SEQ ID NO: 95597 - RNA, 1575 nt, Artificial Sequence
  derived and/or modified CDS sequence (opt1) from glycoprotein__RABV__KF709078.1
auggugccccaggcccuccuguucgucccgcugcugguguucagcaugugcuucggcaaguuccccaucuacaccauccccgacaagcucgggcccugguccccgaucgacauccaccaccugagcugccccaacaaccugguggucgaggacgagggcugcaccaaccucuccggguucagcuacauggagcugaaggugggcuacaucuccgccaucaaggugaacggguucacgugcaccggcgucgugaccgaggcggagaccuacacgaacuucgugggcuacgucaccaccaccuucaagcgcaagcacuuccggcccacgcccgacgccugccgcgccgccuacaacuggaagauggccggggacccgcgguacgaggagagccugcacaaccccuaccccgacuaccacuggcuccgcaccgugaagaccaccaaggagucccuggugaucaucagccccuccgucgcggaccuggacccguacgacaagagccuccacucccgggugcugcccaacggcaagugcagcgggacgaccaccuccagcaccuacugccccacgaaccacgacuacaccaucuggcugcccgagaacccgcgccucggcaccuccugcgacaucuucaccaacagccgggggaagcgcgccuccaagggcagcaagacgugcggcuucguggacgagcgggggcuguacaagucccugaagggcgccugcaagcucaagcugugcgggguccugggccuccgccugauggacggcaccuggguggccaugcaggcgagcgacgagaccaaguggugcccgcccgaccagcuggugaaccuccacgacuuccggagcgacgagaucgagcaccuggucguggaggagcuggugaagaagcgcgaggagugccucgacgcccuggaguccaucaugaccaccaagagcgucuccuuccggcgccugagccaccuccggaagcuggugcccggguucggcaaggccuacacgaucuucaacaagacccugauggaggccgacgcccacuacaaguccgugcgcaccuggaacgagaucauccccagcaaggggugccuccgggucggcgggcgcugccacccccacgugaacggcgucuucuucaacggcaucauccuggggcccgacggccacgugcugauccccgagaugcaguccagccuccugcagcagcacauggagcugcucgaguccagcgugaucccgcugaugcacccccuggcggaccccuccacggucuucaaggacggggacgaggccgagaacuucguggaggugcaccuccccgacguccacaagcagaucagcggcguggaccuggggcugccgaacuggggcaaguacgugcucgucuccgccggcgugcugaucgcccugaugcucaucaucuuccugaugaccugcugcgggcgggugaaccgccccgagagcacccagcacaaccugggcgggaccggccgggaggucuccgugacgccccagagcgggaaggugaucuccagcugggaguccuacaagagcggcggcgagacccgccuguga

SEQ ID NO: 95598 - RNA, 1575 nt, Artificial Sequence
  derived and/or modified CDS sequence (opt1) from glycoprotein__RABV__KF709080.1
auggugccccaggcccugcuguucgucccccugcugguguucagcaugugcuucggcaaguuccccaucuacaccauccccgacaagcucgggcccugguccccgaucgacauccaccaccugagcugccccaacaaccugguggucgaggacgagggcugcaccaaccucuccggguucagcuacauggagcugaaggugggcuacaucuccgccaucaaggugaacggguucacgugcaccggcgucgugaccgaggcggagaccuacacgaacuucgugggcuacgucaccaccaccuucaagcgcaagcacuuccggcccacgcccgacgccugccgcgccgccuacaacuggaagauggccggggacccgcgguacgaggagagccugcacaaccccuaccccgacuaccacuggcuccgcaccgugaagaccaccaaggagucccuggugaucaucagccccuccgucgcggaccuggacccguacgacaagagccuccacucccggguguuccccaacggcaagugcagcgggaucacgaucuccagcaccuacugccccaccaaccacgacuacaccaucuggcugcccgagaacccgcgccugggcacguccugcgacaucuucaccaacagccgggggaagcgcgccuccaagggcagcaagaccugcggcuucguggacgagcgggggcucuacaagucccugaagggcgccugcaagcugaagcucugcgggguccugggccugcgccucauggacggcaccuggguggccaugcaggcgagcgacgagacgaaguggugcccgcccgaccagcuggugaaccugcacgacuuccggagcgacgagaucgagcaccucgccgucgaggagcuggugaagaagcgcgaggagugccuggacgcccucgaguccaucaugaccaccaagagcguguccuuccggcgccugagccaccuccggaagcucguccccggguucggcaaggccuacaccaucuucaacaagacgcugauggaggccgacgcgcacuacaaguccgugcgcaccuggaacgagaucauccccagcaaggggugccugcgggugggcgggcgcugccacccccacgucaacggcguguucuucaacggcaucauccucgggcccgacggccacguccugauccccgagaugcaguccagccugcuccagcagcacauggagcugcuggaguccagcgugaucccgcucaugcacccccuggccgaccccuccaccguguucaaggacggggacgaggccgagaacuucgucgaggugcaccuccccgacgugcacaagcagaucagcggcgucgaccuggggcugccgaacuggggcaaguacgugcugguguccgccggcguccucaucgcccugaugcugaucaucuuccucaugaccugcugcgggcgggugaaccgccccgagagcacgcagcacaaccugggcgggaccggccgggagguguccgucaccccgcagagcgggaaggugaucuccagcugggaguccuacaagagcggcggcgagacccgccuguga

SEQ ID NO: 95599 - RNA, 1575 nt, Artificial Sequence; identical to SEQ ID NO: 95410
  derived and/or modified CDS sequence (opt1) from glycoprotein__RABV__KF726852.1

SEQ ID NO: 95600 - RNA, 1575 nt, Artificial Sequence
  derived and/or modified CDS sequence (opt1) from glycoprotein__RABV__KF726853.1
augaucagccaggccuuccuguucgugccccuccuggccuucuccccgugcuucggcaaguuccccaucuacaccauccccgacaagcuggggcccuggagcccgaucgacauccaccaccucuccugccccaacaaccuggucguggaggacgagggcugcaccaaccugagcggguucuccuacauggagcucaaggugggcuacaucagcgcgaucaaggucaacggguucacgugcaccggcguggugaccgaggccgagaccuacacgaacuucgucggcuacgugaccaccaccuucaagcgcaagcacuuccggcccaugcccgacgccugccgcacggccuacuccuggaagauggccggggacccgcgguacgaggagagccugcacaaccccuaccccgacuaccacuggcugcgcaccgugaagaccaccaaggagucccucgucaucaucagccccuccguggcggaccuggacccguacgacaagagccugcacucccggguguuccccggcgggaagugcagcggccucacggucuccagcacgugcugcuccaccaaccacgacuacaccaucuggaugcccgagaacccccgccuggggaccagcugcgacaucuucaccaacucccggggcaagcgcgccagcaagggcgggaagaccugcggcuucguggacgagcgggggcuguacaagagccucaagggcgccugcaagcugaagcugugcggcguguccgggcuccgccugauggacggcaccugggucgccauccagacgagcgacgagaucaaguggugcuccccggaccagcuggugaaccuccacgaccugcacagcgacgagaucgagcaccugguggucgaggagcucgugaagaagcgggaggagugccuggacgcgcuggaguccaucaugaccaccaagagcguguccuuccgccggcucagccaccuccgcaagcugguccccggguucggcaaggccuacaccaucuucaacaagacgcugauggaggccgacgcccacuacaaguccauccggaccuggaacgagaucauccccagcaaggggugccugcgcgugggcggccggugccacccccacgugaacggggucuucuucaacggcaucauccuggggccggacggccacgugcucauccccgagaugcaguccagccugcugcaccagcacauggagcuccuggaguccagcgucaucccccugaugcacccccucgccgacccguccaccguguucaaggacggggacgaggcggaggacuucguggagguccaccuccccgacgcccacaagcagaucagcggcguggaccugggccugcccaacugggggaaguacgugcugauguccgccggcgcccugaccgcccucaugcugaugaucuuccugaugacgugcugccgcaagaccaaccgggcggagagcaugccccacuccccgggggagaccggccgcaaggucagccucaccagccacaacgggcgggugaucuccagcugggaguccuacaagagcggcggcgagacgaagcuguga

SEQ ID NO: 95601 - RNA, 1575 nt, Artificial Sequence
  derived and/or modified CDS sequence (opt1) from glycoprotein__RABV__KJ004416.1
augaucccccaggugcugcuguucgucccgcugcugguguucagcuccugcuucggcaaguuccccaucuacaccauccccgacaagcucgggcccuggagcccgaucgacauccaccaccuguccugccccaacaaccugguggucgaggacgagggcugcaccaaccucagcggguucuccuacauggagcugaaggugggcuacaucagcgccaucaaggugaacggguucacgugcaccggcgucgugaccgaggccgagaccuacacgaacuucgugggcuacgucaccaccaccuucaagcgcaagcacuuccggcccaugcccgacgcgugccgcgccgccuacaacuggaagauggccggggacccgcgguacgaggagucccugcacaaccccuaccccgacuaccacuggcuccgcacggugaagaccaccaaggagagccuggugaucaucucccccagcgucgccgaccuggacccguacgacaagucccuccacagccggguguuccccggcgggaagugcuccggcaucaccgugagcuccacgugcugcagcaccaaccacgacuacaccaucuggaugcccgagaacccccgccuggggaccuccugcgacaucuucacgaacagccggggcaagcgcgcguccaagggcgggaagaccugcggcuucgucgacgagcgggggcuguacaagagccucaagggcgccugcaagcugaagcugugcggcgugcucgggcugcgccugauggacggcaccuggguggccauccagaccagcgacgagacgaaguggugcuccccggaccagcucgucaaccugcacgacuuccacagcgacgagaucgagcaccuggugguggaggagcucgucaagaagcgggaggagugccuggacgcccuggagaccaucaugaccaccaaguccgugagcuuccgccggcucucccaccuccgcaagcuggugcccggguucggcaaggcguacacgaucuucaacaagacccucauggaggccgacgcccacuacaagagcauccggaccuggaacgagaucauccccuccaaggggugccugcgcgucggcggccggugccacccccacgugaacggggucuucuucaacggcaucauccuggggccggacggccacgugcucauccccgagaugcagagcucccugcugcaccagcacauggagcuccuggagagcuccgugaucccccugaugcacccccucgccgacccgagcaccgucuucaaggacggggacgaggccgaggacuucguggaggugcaccuccccgacguccacaagcagaucuccggcguggaccugggccugcccaacugggggaaguacgugcugaucagcgcgggcgcccugacggcccucauguucaccaucuuccugaugaccugcugccgcaagaccaaccgggccggguccauccagcugagccccggcgagacggggcgcaaggucuccgugaccagccacaacggccgggugaucuccagcugggagagcuacaaguccggcagcgagaccaagcucuga

SEQ ID NO: 95602 - RNA, 1575 nt, Artificial Sequence
  derived and/or modified CDS sequence (opt1) from glycoprotein__RABV__KJ174608.1
augaucccccaggcccugcucagcgugccgcugcugaucuccagccucugcuucggcaaguuccccaucuacaccauccccgagaagcuggggcccugguccccgaucgacauccaccaccugagcugccccaacaaccucgucguggaggacgagggcugcaacucccugagcggguucuccuacauggagcugaaggugggcuacaucagcgccaucaaggucaacggguucacgugcaccggcguggugaccgaggcggagaccuacaccaacuucgucggcuacgugacgaccaccuucaagcgcaagcacuuccggcccaugcccgacgccugccgcgccgccuacaacuggaagaccgccggggacccgcgguacgaggagucccuccacaaccccuaccccgacuaccacuggcugcgcacggugaagaccaccaaggagagccugaucaucaucucccccagcgucgcggaccucgacccguacgacaagucccugcacagccggaucuuccccggcgggaagugccugggcaucaccaucuccagcacguacugcuccaccaaccacgacuacaccaucuggaugcccgaggaggcccgccucgggaccagcugcgacaucuucacgaacuccaagggcaagcgggccagcaagggcgggcggaccugcggcuucguggacgagcgcgggcuguacaagagccugaagggcgccugcaagcucaagcugugcggcgugcccgggcugcgccucauggacggcaccugggucgcgauccagaccccgaacgagacgaaguggugcucccccgaccagcuggugaacgugcacgacuuccggagcgacgagaucgagcaccuggucguggaggagcucauccgcaagcgggaggagugccuggacgcccuggaguccaucaugaccaccaagagcguguccuuccgccggcucagcaaccugcgcaagcugguccccggguucggcaaggccuacaccaucuucaacaagacgcucauggaggccgacgcccacuacaaguccgugcggaccuggaacgagaucauccccagccgcgggugccugaaggugggcggccggugccacccgcacgucaacgggguguucuucaacggcaucauccuggggcccgacggccacauccucauccccgagaugcaguccagccugcugcagcagcacauggagcuccuggaguccagcgugaucccccugauccacccgcucgcggaccccuccaccgucuucaaggacggggacgaggccgaggacuucguggagguccaccuccccgacgugcaccagcaggucagcggcguggaccugggccugcccgacugggggaaguacgugcugauguccgccggcgcccuggccaccgugaugcucacgaucuuccugaucacgugcugccgccgggucaagcgcaccgagagcauccagcagucccugggggagagcggccgcaagguguccgugaccccgcagaacgggaaggucaugagcagcugggaguacuacaaguccggcggcgggacccggcucuga

SEQ ID NO: 95603 - RNA, 1575 nt, Artificial Sequence; identical to SEQ ID NO: 95439
  derived and/or modified CDS sequence (opt1) from glycoprotein__RABV__KJ174609.1

SEQ ID NO: 95604 - RNA, 1575 nt, Artificial Sequence
  derived and/or modified CDS sequence (opt1) from glycoprotein__RABV__KJ174615.1
augaucccccaggcccugcucagcgugccgcugcugaucuccagccucugcuucggcaaguuccccaucuacaccauccccgagaagcuggggcccugguccccgaucgacauccaccaccugagcugccccaacaaccucgucguggaggacgagggcugcaacucccugagcggguucuccuacauggagcugaaggugggcuacaucagcgccaucaaggucaacggguucacgugcaccggcguggugaccgaggcggagaccuacaccaacuucgucggcuacgugacgaccaccuucaagcgcaagcacuuccggcccauggccgacgccugccgcgccgccuacaacuggaagaccgcgggggacccccgguacgaggagucccuccacaacccguaccccgacuaccacuggcugcgcacggugaagaccaccaaggagagccugaucaucaucucccccagcgucgccgaccucgaccccuacgacaagucccugcacagccggaucuucccgggcgggaagugccugggcaucaccaucuccagcacguacugcuccaccaaccacgacuacaccaucuggaugcccgaggaggcccgccucgggaccagcugcgacaucuucacgaacuccaagggcaagcgggccagcaagggcgggcggaccugcggcuucguggacgagcgcgggcuguacaagagccugaagggcgcgugcaagcucaagcugugcggcgugcccgggcugcgccucauggacggcaccugggucgccauccagacccccaacgagacgaaguggugcuccccggaccagcuggugaacgugcacgacuuccggagcgacgagaucgagcaccuggucguggaggagcucauccgcaagcgggaggagugccuggacgcccuggaguccaucaugaccaccaagagcguguccuuccgccggcucagcaaccugcgcaagcugguccccggguucggcaaggccuacaccaucuucaacaagacgcucauggaggccgacgcgcacuacaaguccgugcggaccuggaacgagaucauccccagccgcgggugccugaaggugggcggccggugccacccccacgucaacgggguguucuucaacggcaucauccuggggccggacggccacauccucauccccgagaugcaguccagccugcugcagcagcacauggagcuccuggaguccagcgugaucccccugauccacccccucgccgacccguccaccgucuucaaggacggggacgaggccgaggacuucguggagguccaccuccccgacgugcaccagcaggucagcggcguggaccugggccugcccgacugggggaaguacgugcugauguccgccggcgcccuggcgaccgugaugcucacgaucuuccugaucacgugcugccgccgggucaagcgcaccgagagcauccagcaggggcccggcgaguccgggcgcaagcugagcgugaccccgcagaacggcaaggugauguccagcugggaguacuacaagagcggcgggggcacccggcucuga

SEQ ID NO: 95605 - RNA, 1575 nt, Artificial Sequence
  derived and/or modified CDS sequence (opt1) from glycoprotein__RABV__KJ174616.1
augaucccccaggcccugcucagcgugccgcugcugaucuccagccucugcuucggcaaguuccccaucuacaccauccccgagaagcuggggcccugguccccgaucgacauccaccaccugagcugccccaacaaccucgucguggaggacgagggcugcaacucccugagcggguucuccuacauggagcugaaggugggcuacaucagcgccaucaaggucaacggguucacgugcaccggcguggugaccgaggcggagaccuacaccaacuucgucggcuacgugaccaccaccuucaagcgcaagcacuuccggcccaugcccgacgccugccgcgccgccuacaacuggaagaccgccggggacccgcgguacgaggagucccuccacaaccccuaccccgacuaccacuggcugcgcacggugaagaccaccaaggagagccugaucaucaucucccccagcgucgcggaccucgacccguacgacaagucccugcacagccggaucuuccccggcgggaagugccugggcaucaccaucuccagcacguacugcuccaccaaccacgacuacaccaucuggaugcccgaggaggcccgccucgggaccagcugcgacaucuucacgaacuccaagggcaagcgggccagcaagggcgggcggaccugcggcuucguggacgagcgcgggcuguacaagagccugaagggcgccugcaagcucaagcugugcggcgugcccgggcugcgccucauggacggcaccugggucgcgauccagaccccgaacgagacgaaguggugcucccccgaccagcuggugaacgugcacgacuuccggagcgacgagaucgagcaccuggucguggaggagcucauccgcaagcgggaggagugccuggacgcccuggaguccaucaugaccaccaagagcguguccuuccgccggcucagcaaccugcgcaagcugguccccggguucggcaaggccuacaccaucuucaacaagacgcucauggaggccgacgcccacuacaaguccgugcggaccuggaacgagaucauccccagcaaggggugccugaaggugggcggccgcugccacccgcacgucaacgggguguucuucaacggcaucauccuggggcccgacggccacauccucauccccgagaugcaguccagccugcugcagcagcacauggagcuccuggaguccagcgugaucccccugauccacccgcucgcggaccccuccaccgucuucaaggacggggacgaggccgaggacuucguggagguccaccuccccgacgugcaccagcaggucagcggcguggaccugggccugcccgacugggggaaguacgugcugauguccgccggcgcccuggccaccgugaugcucacgaucuuccugaucacgugcugccggcgcgucaagcggaccgagagcgugcagcaggggcugggcgaguccgggcgcaaggugagcgucgcgccgcagaacggcaaggugauguccagcugggaguacuacaagagcggcgggggcacccgccucuga

SEQ ID NO: 95606 - RNA, 1575 nt, Artificial Sequence
  derived and/or modified CDS sequence (opt1) from glycoprotein__RABV__KJ174617.1
augaucccccaggcccugcucagcgugccgcugcugaucuccagccucugcuucggcaaguuccccaucuacaccauccccgagaagcuggggcccugguccccgaucgacauccaccaccugagcugccccaacaaccucgucguggaggacgagggcugcaacucccugagcggguucuccuacauggagcugaaggugggcuacaucagcgccaucaaggucaacggguucacgugcaccggcguggugaccgaggcggagaccuacaccaacuucgucggcuacgugaccaccaccuucaagcgcaagcacuuccggcccaugcccgacgccugccgcgccgccuacaacuggaagaccgccggggacccgcgguacgaggagucccuccacaaccccuaccccgacuaccacuggcugcgcacggugaagaccaccaaggagagccugaucaucaucucccccagcgucgcggaccucgacccguacgacaagucccugcacagccggaucuuccccggcgggaagugccugggcaucaccaucuccagcacguacugcuccaccaaccacgacuacaccaucuggaugcccgaggaggcccgccucgggaccagcugcgacaucuucacgaacuccaagggcaagcgggccagcaagggcgggcggaccugcggcuucguggacgagcgcgggcuguacaagagccugaagggcgccugcaagcucaagcugugcggcgugcccgggcugcgccucauggacggcaccugggucgcgauccagaccccgaacgagacgaaguggugcucccccgaccagcuggugaacgugcacgacuuccggagcgacgagaucgagcaccuggucguggaggagcucauccgcaagcgggaggagugccuggacgcccuggaguccaucaugaccaccaagagcguguccuuccgccggcucagcaaccugcgcaagcugguccccggguucggcaaggccuacaccaucuucaacaagacgcucauggaggccgacgcccacuacaaguccgugcggaccuggaacgagaucauccccagccgcgggugccugaaggugggcggccggugccacccgcacgucaacgggguguucuucaacggcaucauccuggggcccgacggccacauccucauccccgagaugcaguccagccugcugcagcagcacauggagcuccuggaguccagcgugaucccccugauccacccgcucgcggaccccuccaccgucuucaaggacggggacgaggccgaggacuucguggagguccaccuccccgacgugcaccagcaggucagcggcguggaccugggccugcccgacugggggaaguacgugcugauguccgccggcgcccuggccaccgugaugcucacgaucuuccugaucacgugcugccgccgggucaagcgcaccgagagcauccagcaggggcugggcgaguccgggcgcaaggugagcguggcgccgcagaacggcaaggucauguccagcugggaguacuacaagagcggcgggggcacccggcucuga

SEQ ID NO: 95607 - RNA, 1575 nt, Artificial Sequence
  derived and/or modified CDS sequence (opt1) from glycoprotein__RABV__KJ174618.1
augaucccccaggcccuccucuucgugccguuccuguuccccagccugugccucggcaaguuccccaucuacaccauccccgagaagcuggggccguggucccccaucgacauccaccaccugagcugccccaacaaccucgucguggaggacgagggcugcgacucccugagcggguucuccuacauggagcugaaggugggcuacaucagcgccaucaaggucaacggguucacgugcaccggcguggugaccgaggcggagaccuacaccaacuucgucggcuacgugacgaccaccuucaagcgcaagcacuuccggcccaugccggacgccugccgcgccgccuacaacuggaagaccgccggggacccccgguacgaggagucccuccacaaccccuaccccgacuaccacuggcugcgcacggugaagaccaccaaggagagccugaucaucaucuccccgagcgucgcggaccucgaccccuacgacaagucccugcacagccggguguuccccggcgggaagugccugggcaucaccaucuccagcacguacugcuccaccaaccacgacuacaccaucuggaugcccgaggaggcccgccucgggaccagcugcgacaucuucacgaacuccaagggcaagcgggccagcaagggcgggcggaccugcggcuucguggacgagcgcgggcuguacaagucccugaagggcgccugcaagcucaagcugugcggcgucccggggcugcgccucauggacggcaccuggguggcgauccagacccccggggagacgaaguggugcagccccgaccagcuggugaaccugcacgacuuccggagcgacgagaucgagcaccucgucguggaggagcugaucaagaagcgcgaggagugccuggacgcccucgaguccaucaugaccaccaagagcguguccuuccggcgccugagcaaccugcggaagcucguccccggcuucgggaaggccuacaccaucuucaacaagacgcugauggaggccgacgcccacuacaaguccauccgcaccugggacgagaucaucccgagcaagggcugccugcgggugggcgggcgcugccacccccacgugaacggcgucuucuucaacgggaucauccucggccccgacgggcacgugcugauccccgagaugcaguccagccugcuccagcagcacauggagcugcuggaguccagcgugaucccgcucauccacccccuggcggaccccuccaccgucuucaaggacggcgacgaggccgaggacuucguggagguccaccuccccgacgugcacgagcaggucagcggcguggaccuggggcugccgaacuggggcaaguacgugcugaucuccgccggggugcucgccaccgucauccugacgaucuuccugcugaccugcugccggcgcgugaaccggaccaagcccaagcagcagagccugggcgacuccgggcgcaaggugagcgucacgccccagaacggcaaggugauguccagcugggaguacuacaaguccgagggccgcaccagccuguga

SEQ ID NO: 95608 - RNA, 1575 nt, Artificial Sequence
  derived and/or modified CDS sequence (opt1) from glycoprotein__RABV__KJ174619.1
augaucccccaggccuuccuguucgugccguuccucuuccccagccugugccugggcaaguuccccaucuacaccauccccgagaagcucgggccguggucccccaucgacauccaccaccugagcugccccaacaaccuggucguggaggacgagggcugcgacucccucagcggguucuccuacauggagcugaaggugggcuacaucagcgccaucaaggucaacggguucacgugcaccggcguggugaccgaggcggagaccuacaccaacuucgucggcuacgugacgaccaccuucaagcgcaagcacuuccggcccaugccggacgccugccgcgccgccuacaacuggaagaccgccggggacccccgguacgaggagucccugcacaaccccuaccccgacuaccacuggcuccgcacggugaagaccaccaaggagagccugaucaucaucuccccgagcgucgcggaccuggaccccuacgacaagucccuccacagccggguguuccccggcgggaagugccugggcaucaccaucuccagcacguacugcuccaccaaccacgacuacaccaucuggaugcccgaggaggcccgccuggggaccagcugcgacaucuucacgaacuccaagggcaagcgggccagcaagggcgggcggaccugcggcuucguggacgagcgcgggcucuacaagucccugaagggcgccugcaagcugaagcucugcggcgucccggggcugcgccugauggacggcaccuggguggcgauccagacccccggggagacgaaguggugcagccccgaccagcucgugaaccugcacgacuuccggagcgacgagaucgagcaccuggucguggaggagcucaucaagaagcgcgaggagugccuggacgcccuggaguccaucaugaccaccaagagcguguccuuccggcgccucagcaaccugcggaagcugguccccggcuucgggaaggccuacaccaucuucaacaagacgcucauggaggccgacgcccacuacaaguccauccgcaccugggacgagaucaucccgagcaagggcugccugcgggugggcgggcgcugccacccccacgugaacggcgucuucuucaacgggaucauccugggccccgacgggcacgugcucauccccgagaugcaguccagccugcugcagcagcacauggagcuccuggaguccagcgugaucccgcugauccacccccucgcggaccccuccaccgucuucaaggacggcgacgaggccgaggacuucguggagguccaccuccccgacgugcacgagcaggucagcggcguggaccuggggcugccgaacuggggcaaguacgugcugaucuccgccggggugcuggccaccgucauccucacgaucuuccugcugaccugcugccggcgcgugaaccggaccaagcccaagcagcagagccucggcgaguccgggcgcaaggugagcgucacgccccagaacggcaaggugauguccagcugggaguacuacaaguccgagggccgcaccagccuguga

SEQ ID NO: 95609 - RNA, 1575 nt, Artificial Sequence
  derived and/or modified CDS sequence (opt1) from glycoprotein__RABV__KJ174620.1
augaucccccaggcccuccucuucgugccguuccuguuccccagccugugccucggcaaguuccccaucuacaccauccccgagaagcuggggccguggucccccaucgacauccaccaccugagcugccccaacaaccucgucguggaggacgagggcugcgacucccugagcggguucuccuacauggagcugaaggugggcuacaucagcgccaucaaggucaacggguucacgugcaccggcguggugaccgaggcggagaccuacaccaacuucgucggcuacgugacgaccaccuucaagcgcaagcacuuccggcccaugccggacgccugccgcgccgccuacaacuggaagaccgccggggacccccgguacgaggagucccuccacaaccccuaccccgacuaccacuggcugcgcacggugaagaccaccaaggagagccugaucaucaucuccccgagcgucgcggaccucgaccccuacgacaagucccugcacagccggguguuccccggcgggaagugccugggcaucaccaucuccagcacguacugcuccaccaaccacgacuacaccaucuggaugcccgaggaggcccgccucgggaccagcugcgacaucuucacgaacuccaagggcaagcgggccagcaagggcgggaagaccugcggcuucguggacgagcgcgggcuguacaagucccugaagggcgccugcaagcucaagcugugcggcgucccggggcugcggcucauggacggcaccuggguggcgauccagacccccggggagacgaaguggugcagccccgaccagcuggugaaccugcacgacuuccgcagcgacgagaucgagcaccucgucguggaggagcugaucaagaagcgggaggagugccuggacgcccucgaguccaucaugaccaccaagagcguguccuuccgccggcugagcaaccugcgcaagcucguccccggcuucgggaaggccuacaccaucuucaacaagacgcugauggaggccgacgcccacuacaaguccauccggaccugggacgagaucaucccgagcaagggcugccugcgcgugggcgggcggugccacccccacgugaacggcgucuucuucaacgggaucauccucggccccgacgggcacgugcugauccccgagaugcaguccagccugcuccagcagcacauggagcugcuggaguccagcgugaucccgcucauccacccccuggcggaccccuccaccgucuucaaggacggcgacgaggccgaggacuucguggagguccaccuccccgacgugcacgagcaggucagcggcguggaccuggggcugccgaacuggggcaaguacgugcugaucuccgccggggugcucgccaccgucauccugacgaucuuccugcugaccugcugccgccgggugaaccgcaccaagcccaagcagcagagccugggcgaguccgggcggaaggugagcgucacgccccagaacggcaaggugauguccagcugggaguacuacaaguccgagggccgcaccagccuguga

SEQ ID NO: 95610 - RNA, 1575 nt, Artificial Sequence
  derived and/or modified CDS sequence (opt1) from glycoprotein__RABV__KJ174622.1
augaucccccaggcccuccucuucgugccguuccuguuccccagccugugccucggcaaguuccccaucuacaccauccccgagaagcuggggccguggucccccaucgacauccaccaccugagcugccccaacaaccucgucguggaggacgagggcugcgacucccugagcggguucuccuacauggagcugaaggugggcuacaucagcgccaucaaggucaacggguucacgugcaccggcguggugaccgaggcggagaccuacaccaacuucgucggcuacgugacgaccaccuucaagcgcaagcacuuccggcccaugccggacgccugccgcgccgccuacaacuggaagaccgccggggacccccgguacgaggagucccuccacaaccccuaccccgacuaccacuggcugcgcacggugaagaccaccaaggagagccugaucaucaucuccccgagcgucgcggaccucgaccccuacgacaagucccugcacagccggguguuccccggcgggaagugccugggcaucaccaucuccagcacguacugcuccaccaaccacgacuacaccaucuggaugcccgaggaggcccgccucgggaccagcugcgacaucuucacgaacuccaagggcaagcgggccagcaagggcgggcggaccugcggcuucguggacgagcgcgggcuguacaagucccugaagggcgccugcaagcucaagcugugcggcgucccggggcugcgccucauggacggcaccuggguggcgauccagacccccggggagacgaaguggugcagccccgaccagcuggugaaccugcacgacuuccggagcgacgagaucgagcaccucgucguggaggagcugaucaagaagcgcgaggagugccuggacgcccucgaguccaucaugaccaccaagagcguguccuuccggcgccugagcaaccugcggaagcucguccccggcuucgggaaggccuacaccaucuucaacaagacgcugauggaggccgacgcccacuacaaguccauccgcaccugggacgagaucaucccgagcaagggcugccugcgggugggcgggcgcugccacccccacgugaacggcgucuucuucaacgggaucauccucggccccgacgggcacgugcugauccccgagaugcaguccagccugcuccagcagcacauggagcugcuggaguccagcgugaucccgcucauccacccccuggcggaccccuccaccgucuucaaggacggcgacgaggccgaggacuucguggagguccaccuccccgacgugcacgagcaggucagcggcguggaccuggggcugccgaacuggggcaaguacgugcugaucuccgccggggugcucgccaccgucauccugacgguguuccugcugaccugcugccggcgcgugaaccggaccaagcccaagcagcagagccugggcgaguccgggcgcaaggucagcgugacgccccagaacggcaaggugauguccagcugggaguacuacaaguccgagggccgcaccagccuguga

SEQ ID NO: 95611 - RNA, 1575 nt, Artificial Sequence
  derived and/or modified CDS sequence (opt1) from glycoprotein__RABV__KJ174623.1
augaucccccaggcccuccucuucgugccguuccuguuccccagccugugccucggcaaguuccccaucuacaccauccccgagaagcuggggccguggucccccaucgacauccaccaccugagcugccccaacaaccucgucguggaggacgagggcugcgacucccugagcggguucuccuacauggagcugaaggugggcuacaucagcgccaucaaggucaacggguucacgugcaccggcguggugaccgaggcggagaccuacaccaacuucgucggcuacgugacgaccaccuucaagcgcaagcacuuccggcccaugccggacgccugccgcgccgccuacaacuggaagaccgccggggacccccgguacgaggagucccuccacaaccccuaccccgacuaccacuggcugcgcacggugaagaccaccaaggagagccugaucaucaucuccccgagcgucgcggaccucgaccccuacgacaagucccugcacagccggguguuccccggcgggaagugccugggcaucaccguguccagcacguacugcuccaccaaccacgacuacaccaucuggaugcccgaggaggcccgccucgggaccagcugcgacaucuucacgaacuccaagggcaagcgggccagcaagggcgggcggaccugcggcuucgucgacgagcgcgggcuguacaagucccugaagggcgccugcaagcucaagcugugcggcgugccggggcugcgccucauggacggcaccuggguggcgauccagacccccggggagacgaaguggugcagccccgaccagcuggucaaccugcacgacuuccggagcgacgagaucgagcaccucgugguggaggagcugaucaagaagcgcgaggagugccuggacgcccucgaguccaucaugaccaccaagagcgucuccuuccggcgccugagcaaccugcggaagcucgugcccggcuucgggaaggccuacaccaucuucaacaagacgcugauggaggccgacgcccacuacaaguccgugcgcaccugggacgagaucaucccgagcaagggcugccugcgggucggcgggcgcugccacccccacgugaacggcguguucuucaacgggaucauccucggccccgacgggcacguccugauccccgagaugcaguccagccugcuccagcagcacauggagcugcuggaguccagcgugaucccgcucauccacccccuggcggaccccuccaccgucuucaaggacggcgacgaggccgaggacuucguggaggugcaccuccccgacguccacaagcaggucagcggcguggaccuggggcugccgaacuggggcaaguacgugcugaugggggccggcgugcucgccaccgugauccugacgaucuuccugcugaccugcugccggcgcgucaaccggaccaagcccaagcagcagucccugggggagagcggccgcaagguguccgugacgccccagaacggcaaggucaugagcuccugggaguacuacaagagcgaggggcgcaccucccuguga

SEQ ID NO: 95612 - RNA, 1575 nt, Artificial Sequence; identical to SEQ ID NO: 95431
  derived and/or modified CDS sequence (opt1) from glycoprotein__RABV__KJ174624.1

SEQ ID NO: 95613 - RNA, 1575 nt, Artificial Sequence
  derived and/or modified CDS sequence (opt1) from glycoprotein__RABV__KJ174625.1
augaucccccaggcccuccucuucgugccguuccuguuccccagccugugccucggcaaguuccccaucuacaccauccccgagaagcuggggccguggucccccaucgacauccaccaccugagcugccccaacaaccucgucguggaggacgagggcugcgacucccugagcggguucuccuacauggagcugaaggugggcuacaucagcgccaucaaggucaacggguucacgugcaccggcguggugaccgaggcggagaccuacaccaacuucgucggcuacgugacgaccaccuucaagcgcaagcacuuccggcccaugccggacgccugccgcgccgccuacaacuggaagaccgccggggacccccgguacgaggagucccuccacaaccccuaccccgacuaccacuggcugcgcacggugaagaccaccaaggagagccugaucaucaucuccccgagcgucgcggaccucgaccccuacgacaagucccugcacagccggguguuccccggcgggaagugccugggcaucaccguguccagcacguacugcuccaccaaccacgacuacaccaucuggaugcccgaggaggcccgccucgggaccagcugcgacaucuucacgaacuccaagggcaagcgggccagcaagggcgggcggaccugcggcuucgucgacgagcgcgggcuguacaagucccugaagggcgccugcaagcucaagcugugcggcgugccggggcugcgccucauggacggcaccuggguggcgauccagacccccggggagacgaaguggugcagccccgaccagcuggucaaccugcacgacuuccggagcgacgagaucgagcaccucgugguggaggagcugaucaagaagcgcgaggagugccuggacgcccucgaguccaucaugaccaccaagagcgucuccuuccggcgccugagcaaccugcggaagcucgugcccggcuucgggaaggccuacaccaucuucaacaagacgcugauggaggccgacgcccacuacaaguccgugcgcaccugggacgagaucaucccgagcaagggcugccugcgggucggcgggcgcugccacccccacgugaacggcguguucuucaacgggaucauccucggccccgacgggcacguccugauccccgagaugcaguccagccugcuccagcagcacauggagcugcuggaguccagcgugaucccgcucauccacccccuggcggaccccuccaccgucuucaaggacggcgacgaggccgaggacuucguggaggugcaccuccccgacguccacaagcaggucagcggcguggaccuggggcugccgaacuggggcaaguacgugcugaugggggccggcgugcucgccaccgugauccugacgaucuuccugcugaccugcugccggcgcgucaaccggaccaagcccaagcagcagucccuggaggagagcgggcgcaagguguccgugacgccccagaacggcaaggucaugagcuccugggaguacuacaagagcgagggccgcaccucccuguga

SEQ ID NO: 95614 - RNA, 1575 nt, Artificial Sequence; identical to SEQ ID NO: 95613
  derived and/or modified CDS sequence (opt1) from glycoprotein__RABV__KJ174626.1

SEQ ID NO: 95615 - RNA, 1575 nt, Artificial Sequence; identical to SEQ ID NO: 95445
  derived and/or modified CDS sequence (opt1) from glycoprotein__RABV__KJ174627.1

SEQ ID NO: 95616 - RNA, 1575 nt, Artificial Sequence; identical to SEQ ID NO: 95273
  derived and/or modified CDS sequence (opt1) from glycoprotein__RABV__KJ174628.1

SEQ ID NO: 95617 - RNA, 1575 nt, Artificial Sequence; identical to SEQ ID NO: 95445
  derived and/or modified CDS sequence (opt1) from glycoprotein__RABV__KJ174629.1

SEQ ID NO: 95618 - RNA, 1575 nt, Artificial Sequence; identical to SEQ ID NO: 95273
  derived and/or modified CDS sequence (opt1) from glycoprotein__RABV__KJ174630.1

SEQ ID NO: 95619 - RNA, 1575 nt, Artificial Sequence
  derived and/or modified CDS sequence (opt1) from glycoprotein__RABV__KJ174631.1
augaucccccaggcccuccuguucgugccgcugcugauccccagccucugccugggcgaguuccccaucuacaccauccccgacaagcuggggccguggucccccaucgacauccaccaccucagcugccccaacaaccuggucgccgagaacgacggcugcaccucccugagcggguucuccuacauggagcucaaggugggcuacaucagcgcgaucaaggugaacggguucacgugcaccggcgucgugaccgaggccgagaccuacacgaacuucgugggcuacgucaccaccaccuucaagcgcaagcacuuccggcccacgccggacgccugccgcgccgcccacgacuggaagauggcgggggacccccgguacgaggccucccugcagaaccccuaccccgacuaccacuggcugcgcaccgugaagaccaccaaggagagccucgugaucaucuccccgagcgucgccgaccuggaccccuacgacaagucccugcacagccggguguuccccuccggcaagugccucgggaucacggugagcuccaccuacugcagcaccaaccacgacuacaccaucuggaugcccgucgagccgcgccugggcacguccugcgacaucuucaccaacagccgggggaagcgcgccuccaagggcggccgggugugcggguucguggacgagcgcggccuguacaagagccucaagggggcgugccggcugaagcugugcggcguccccggcauccgccuccuggacgggaccugggugagcauccagaccuccgaggacaucaaguggugcccgcccgaccggcuggugaaccuccacgacuuccacagcgacgagaucgagcaccuggucguggccgagcugaucaagcgccgggagaacugccucgacgcccuggaguccaucaugacgaccaagagcguguccuuccgccggcugagccaccuccgcaagcugguccccggcuucgggaaggccuacaccaucuucaacaagacccugauggaggccgacgcgcacuacaaguccgugaagacguggaacgaggugauccccagcaagggcugccucgaggucgggggccggugccacccccacgugaacggcgucuucuucaacgggaucauccugggccccgacgggaacgugcugaucccggagaugcaguccagccuccugcagcagcacauggagcugcucgaguccagcgugaucccccugaugcacccccuggccgaccccuccaccgucuucaaggagggcgacgaggccgaggacuucguggaggugcaccucccggacguccacaagcaggucagcgacguggaccuggggcugcccuccuggggcaaguaccuccugaucggcgccggggcccuggcgauccucauccuggccaucgugcugaucaucugcugccgccgggugaacaagacccgcagcacccagcgcggccaccgggaguccgggggcaagaugagcguggucccccagaacgggaagaucaucuccagcugggagcuguacaagagcgaguccgagacgggccucuga

SEQ ID NO: 95620 - RNA, 1575 nt, Artificial Sequence
  derived and/or modified CDS sequence (opt1) from glycoprotein__RABV__KJ174632.1
augaucccccaggcccuccuguucgugccgcugcugauccccagccucugccugggcgaguuccccaucuacaccauccccgacaagcuggggccguggucccccaucgacauccaccaccucagcugccccaacaaccuggucgccgagaacgacggcugcaccucccugagcggguucuccuacauggagcucaaggugggcuacaucagcgcgaucaaggugaacggguucacgugcaccggcgucgugaccgaggccgagaccuacacgaacuucgugggcuacgucaccaccaccuucaagcgcaagcacuuccggcccacgccggacgccugccgcgccgcccacgacuggaagauggcgggggacccccgguacgaggccucccugcagaaccccuaccccgacuaccacuggcugcgcaccgugaagaccaccaaggagagccucgugaucaucuccccgagcgucgccgaccuggaccccuacgacaagucccugcacagccggguguuccccuccggcaagugccucgggaucacggugagcuccaccuacugcagcaccaaccacgacuacaccaucuggaugcccgucgagccgcgccugggcacguccugcgacaucuucaccaacagccgggggaagcgcgccuccaagggcggccgggugugcggguucguggacgagcgcggccuguacaagagccucaagggggcgugccggcugaagcugugcggcguccccggcauccgccuccuggacgggaccugggugagcauccagaccuccgaggacaucaaguggugcccgcccgaccggcuggugaaccuccacgacuuccacagcgacgagaucgagcaccuggucguggccgagcugaucaagcgccgggagaacugccucgacgcccuggaguccaucaugacgaccaagagcguguccuuccgccggcugagccaccuccgcaagcugguccccggcuucgggaaggccuacaccaucuucaacaagacccugauggaggccgacgcgcacuacaaguccgugaagacguggaacgaggugauccccagcaagggcugccucgaggucgggggccggugccacccccacgugaacggcgucuucuucaacgggaucauccugggccccgacgggaacgugcugaucccggagaugcaguccagccuccugcagcagcacauggagcugcucgaguccagcgugaucccccugaugcacccccuggccgaccccuccaccgucuucaaggagggcgacgaggccgaggacuucguggaggugcaccucccggacguccacaagcaggucagcgacguggaccuggggcugcccuccuggggcaaguaccuccugaucagcgccggcgcccuggcgauccucauccuggccaucgugcugaucaucugcugcaagcgcgugaagaagaccggguccauccagcggggccaccgcgagagcgggggcaagauguccguggucccccagaacgggaagaucaucagcagcugggagcuguacaaguccgagagcgagaccggccucuga

SEQ ID NO: 95621 - RNA, 1575 nt, Artificial Sequence
  derived and/or modified CDS sequence (opt1) from glycoprotein__RABV__KJ174633.1
augaucccccaggcccuccuguucgugccgcugcugauccccagccucugccugggcgaguuccccaucuacaccauccccgacaagcuggggccguggucccccaucgacauccaccaccucagcugccccaacaaccuggucgccgagaacgacggcugcaccucccugagcggguucuccuacauggagcucaaggugggcuacaucagcgcgaucaaggugaacggguucacgugcaccggcgucgugaccgaggccgagaccuacacgaacuucgugggcuacgucaccaccaccuucaagcgcaagcacuuccggcccacgccggacgccugccgcgccgcccacgacuggaagauggcgggggacccccgguacgaggccucccugcagaaccccuaccccgacuaccacuggcugcgcaccgugaagaccaccaaggagagccucgugaucaucuccccgagcgucgccgaccuggaccccuacgacaagucccugcacagccggguguuccccuccggcaagugccucgggaucacggugagcuccaccuacugcagcaccaaccacgacuacaccaucuggaugcccgucgagccgcgccugggcacguccugcgacaucuucaccaacagccgggggaagcgcgccuccaagggcggccgggugugcggguucguggacgagcgcggccuguacaagagccucaagggggcgugccggcugaagcugugcggcguccccggcauccgccuccuggacgggaccugggugagcauccagaccuccgaggacaucaaguggugcccgcccgaccggcuggugaaccuccacgacuuccacagcgacgagaucgagcaccuggucguggccgagcugaucaagcgccgggagaacugccucgacgcccuggaguccaucaugacgaccaagagcguguccuuccgccggcugagccaccuccgcaagcugguccccggcuucgggaaggccuacaccaucuucaacaagacccugauggaggccgacgcgcacuacaaguccgugaagacguggaacgaggugauccccagcaagggcugccucgaggucgggggccggugccacccccacgugaacggcgucuucuucaacgggaucauccugggccccgacgggaacgugcugaucccggagaugcagcccucccuccugcagcagcacauggagcugcucgagagcuccgugaucccccugaugcacccccuggccgacccgagcaccgucuucaaggagggcgacgaggccgaggacuucguggaggugcaccuccccgacguccacaagcaggucuccgacguggaccuggggcugcccagcuggggcaaguaccuccugaucuccgccggcgcccuggcgauccucauccuggccaucgugcugaugaucugcugccgccgggugaacaagaccgggagcacccagcgcggccaccgcgaguccgggggcaagaugagcguggucccgcagaacgggaagaucaucuccagcugggagcuguacaagagcgaguccgagacgggccucuga

SEQ ID NO: 95622 - RNA, 1575 nt, Artificial Sequence
  derived and/or modified CDS sequence (opt1) from glycoprotein__RABV__KJ174634.1
augaucccccaggccauccuguucgugccgcuccugauccccagccugugccucggcgaguuccccaucuacaccauccccgacaagcuggggccguggucccccaucgacauccaccaccugagcugccccaacaaccucgucgccgagaacgacggcugcaccucccugagcggguucuccuacauggagcugaaggugggcuacaucagcgcgaucaaggugaacggguucacgugcaccggcgucgugaccgaggccgagaccuacacgaacuucgugggcuacgucaccaccaccuucaagcgcaagcacuuccggcccacgccggacgccugccgcgccgcccacgacuggaagauggcgggggacccccgguacgaggccucccuccagaaccccuaccccgacuaccacuggcugcgcaccgugaagaccaccaaggagagccuggugaucaucuccccgagcgucgccgaccucgaccccuacgacaaguuccugcacucccggguguuccccagcggcaagugccuggggaucacgguguccagcaccuacugcuccaccaaccacgacuacaccaucuggaugcccgucgagccgcgccucggcacgagcugcgacaucuucaccaacucccgggggaagcgcgccagcaagggcggccgggugugcggguucguggacgagcgcggccuguacaagucccugaagggggcgugccggcucaagcugugcggcguccccggcauccgccugcucgacgggaccugggugagcauccagaccagcgaggacaucaaguggugcccgcccgaccggcuggugaaccugcacgacuuccacuccgacgagaucgagcaccucgucguggccgagcugaucaagcgccgggagaacugccuggacgcccucgagagcaucaugacgaccaaguccgugagcuuccgccggcugucccaccuccgcaagcugguccccggcuucgggaaggccuacaccaucuucaacaagacccugauggaggccgacgcgcacuacaagagcgugaagacguggaacgaggugauccccuccaagggcugccuggaggucgggggccggugccacccccacgugaacggcgucuucuucaacgggaucauccucggccccgacgggaacgugcugaucccggagaugcagagcucccugcuccagcagcacauggagcugcuggagagcuccgugaucccccucaugcacccccuggccgaccccagcaccgucuucaaggagggcgacgaggccgaggaguucguggaggugcaccucccggacguccacaagcaggucuccgacguggaccuggggcugcccagcuggggcaaguaccugcucaucuccgccggcgcccuggcgauccugauccucgccaucgugcugaucaucugcugccgccgggugaacaagaccgggagcacccagcgcggccaccgcgaguccgggggcaagaugagcguggucccccagaacgggaagaucaucuccagcugggagcuguacaagagcgaguccgagacgggccuguga

SEQ ID NO: 95623 - RNA, 1575 nt, Artificial Sequence
  derived and/or modified CDS sequence (opt1) from glycoprotein__RABV__KJ174635.1
augaucccccaggcccuccuguucgugccgcugcugauccccagccucugccugggcgaguuccccaucuacaccauccccgacaagcuggggccguggucccccaucgacauccaccaccucagcugccccaacaaccuggucgccgagaacgacggcugcaccucccugagcggguucuccuacauggagcucaaggugggcuacaucagcgcgaucaaggugaacggguucacgugcaccggcgucgugaccgaggccgagaccuacacgaacuucgugggcuacgucaccaccaccuucaagcgcaagcacuuccggcccacgccggacgccugccgcgccgcccacgacuggaagauggcgggggacccccgguacgaggccucccugcagaaccccuaccccgacuaccacuggcugcgcaccgugaagaccaccaaggagagccucgugaucaucuccccgagcgucgccgaccuggaccccuacgacaagucccugcacagccggguguuccccuccggcaagugccucgggaucacggugagcuccaccuacugcagcaccaaccacgacuacaccaucuggaugcccgucgagccgcgccugggcacguccugcgacaucuucaccaacagccgggggaagcgcgccuccaagggcggccgggugugcggguucguggacgagcgcggccuguacaagagccucaagggggcgugccggcugaagcugugcggcguccccggcauccgccuccuggacgggaccugggugagcauccagaccuccgaggacaucaaguggugcccgcccgaccggcuggugaaccuccacgacuuccacagcgacgagaucgagcaccuggucguggccgagcugaucaagcgccgggagaacugccucgacgcccuggaguccaucaugacgaccaagagcguguccuuccgccggcugagccaccuccgcaagcugguccccggcuucgggaaggccuacaccaucuucaacaagacccugauggaggccgacgcgcacuacaaguccgugaagacguggaacgaggugauccccagcaagggcugccucgaggucgggggccggugccacccccacgugaacggcgucuucuucaacgggaucauccugggccccgacgggaacgugcugaucccggagaugcaguccagccuccugcagcagcacauggagcugcucgaguccagcgugaucccccugaugcacccccuggccgaccccuccaccgucuucaaggagggcgacgaggccgaggacuucguggaggugcaccucccggacguccacaagcaggucagcgacguggaccuggggcugcccuccuggggcaaguaccuccugaucagcgccggcgcccuggcgauccucauccuggccguggugcugaucaucugcugccgccgggugaacaagacccgcuccacccagcgcgggcaccgggagagcggcgggaagauguccgucgugccccagaacggcaagaucaucagcagcugggagcuguacaaguccgagagcgagacggggcucuga

SEQ ID NO: 95624 - RNA, 1575 nt, Artificial Sequence
  derived and/or modified CDS sequence (opt1) from glycoprotein__RABV__KJ174636.1
augaucccccaggcccuccuguucgugccgcugcugauccccagccucugccugggcgaguuccccaucuacaccauccccgacaagcuggggccguggucccccaucgacauccaccaccucagcugccccaacaaccuggucgccgagaacgacggcugcaccucccugagcggguucuccuacauggagcucaaggugggcuacaucagcgcgaucaaggugaacggguucacgugcaccggcgucgugaccgaggccgagaccuacacgaacuucgugggcuacgucaccaccaccuucaagcgcaagcacuuccggcccacgccggacgccugccgcgccgcccacgacuggaagauggcgggggacccccgguacgaggccucccugcagaaccccuaccccgacuaccacuggcugcgcaccgugaagaccaucaaggagagccucgugaucaucuccccgagcgucgccgaccuggaccccuacgacaagucccugcacagccggguguuccccuccggcaagugccucgggaucaccgugagcuccacguacugcagcaccaaccacgacuacaccaucuggaugcccgucgagccgcgccugggcaccuccugcgacaucuucacgaacagccgggggaagcgcgccuccaagggcggccgggugugcggguucguggacgagcgcggccuguacaagagccucaagggggcgugccggcugaagcugugcggcguccccggcauccgccuccuggacgggaccugggugagcauccagaccuccgaggacaucaaguggugcccgcccgaccggcuggugaaccuccacgacuuccacagcgacgagaucgagcaccuggucguggccgagcugaucaagcgccgggagaacugccucgacgcccuggaguccaucaugaccaccaagagcguguccuuccgccggcugagccaccuccgcaagcugguccccggcuucgggaaggccuacacgaucuucaacaagacccugauggaggccgacgcgcacuacaaguccgugaagaccuggaacgaggugauccccagcaagggcugccucgaggucgggggccggugccacccccacgugaacggcgucuucuucaacgggaucauccugggccccgacgggaacgugcugaucccggagaugcaguccagccuccugcagcagcacauggagcugcucgaguccagcgugaucccccugaugcacccccuggccgaccccuccacggucuucaaggagggcgacgaggccgaggacuucguggaggugcaccucccggacguccacaagcaggucagcgacguggaccuggggcugcccuccuggggcaaguaccuccugaucagcgccggcgcccugaccauccucauccuggcgaucgugcugauccgcugcugccggcgcgugaacaagacccgcuccacccagcgggggcaccgcgagagcggcgggaagauguccguggucccccagaacggcaagaucaucagcagcugggagcuguacaaguccgagagcgagacggggcucuga

SEQ ID NO: 95625 - RNA, 1575 nt, Artificial Sequence
  derived and/or modified CDS sequence (opt1) from glycoprotein__RABV__KJ174637.1
augaucccccaggcccuccuguucaugccgcugcugauccccagccucugccugggcgaguuccccaucuacaccauccccgacaagcuggggccguggucccccaucgacauccaccaccucagcugccccaacaaccugguggccgagaacgacggcugcaccucccugagcggguucuccuacauggagcucaaggucggcuacaucagcgcgaucaaggugaacggguucacgugcaccggcguggucaccgaggccgagaccuacacgaacuucgugggcuacgugaccaccaccuucaagcgcaagcacuuccggcccacgccggacgccugccgcgccgcccacgacuggaagauggcgggggacccccgguacgaggccucccugcagaaccccuaccccgacuaccacuggcugcgcaccgucaagaccaccaaggagagccucgugaucaucuccccgagcguggccgaccuggaccccuacgacaagucccugcacagccgggucuuccccuccggcaagugccucgggaucacggugagcuccaccuacugcagcaccaaccacgacuacaccaucuggaugcccguggagccgcgccugggcacguccugcgacaucuucaccaacagccgggggaagcgcgccuccaagggcggccgggucugcggguucguggacgagcgcggccuguacaagagccucaagggggcgugccggcugaagcugugcggcgugcccggcauccgccuccuggacgggaccugggucagcauccagaccuccgaggacaucaaguggugcccgcccgaccggcuggugaaccuccacgacuuccacagcgacgagaucgagcaccugguggucgccgagcugaucaagcgccgggagaacugccucgacgcccuggaguccaucaugacgaccaagagcguguccuuccgccggcugagccaccuccgcaagcuggugcccggcuucgggaaggccuacaccaucuucaacaagacccugauggaggccgacgcgcacuacaaguccgucaagacguggaacgaggugauccccagcaagggcugccucgaggucgggggccggugccacccccacgugaacggcguguucuucaacgggaucauccugggccccgacgggaacguccugaucccggagaugcaguccagccuccugcagcagcacauggagcugcucgaguccagcgugaucccccugaugcacccccuggccgaccccuccaccguguucaaggagggcgacgaggccgaggacuucgucgaggugcaccucccggacgugcacaagcaggucagcgacguggaccuggggcugcccuccuggggcaaguaccuccugaucagcgccggcgcccuggcgauccucauccuggccaucgugcugaucaucugcugccgccgggucaacaagaccguguccacccagcgcgggcaccgcgagagcggcgggaagauguccguggucccccagaacggcaagaucaucagcagcugggagcuguacaaguccgagagcgagacggggcucuga

SEQ ID NO: 95626 - RNA, 1575 nt, Artificial Sequence
  derived and/or modified CDS sequence (opt1) from glycoprotein__RABV__KJ174638.1
augaucccccaggcccugcuguucgugccgcugcugauccccagccucugccugggcgaguuccccaucuacaccauccccgacaagcuggggccguggucccccaucgacauccaccaccucagcugccccaacaaccuggucgccgagaacgacggcugcaccucccugagcggguucuccuacauggagcucaaggugggcuacaucagcgcgaucaaggugaacggguucacgugcaccggcgucgugaccgaggccgagaccuacacgaacuucgugggcuacgucaccaccaccuucaagcgcaagcacuuccggcccacgccggacgccugccgcgccgcccacgacuggaagauggcgggggacccccgguacgaggccuccgugcagaaccccuaccccgacuaccacuggcugcgcaccgugaagaccaccaaggagagccuggucaucaucuccccgagcguggccgaccucgaccccuacgacaagucccugcacagccggguguuccccuccggcaagugccuggggaucacggucagcuccaccuacugcagcaccaaccacgacuacaccaucuggaugcccguggagccgcgccucggcacguccugcgacaucuucaccaacagccgggggaagcgcgccuccaagggcggccgggugugcggguucgucgacgagcgcggccuguacaagagccugaagggggcgugccggcucaagcugugcggcgugcccggcauccgccugcucgacgggaccugggugagcauccagaccuccgaggacaucaaguggugcccgcccgaccggcuggucaaccugcacgacuuccacagcgacgagaucgagcaccucgugguggccgagcugaucaagcgccgggagaacugccuggacgcccucgaguccaucaugacgaccaagagcgucuccuuccgccggcugagccaccuccgcaagcucgugcccggcuucgggaaggccuacaccaucuucaacaagacccugauggaggccgacgcgcacuacaaguccgugaagacguggaacgaggucauccccagcaagggcugccuggaggucgggggccggugccacccccacgugaacggcguguucuucaacgggaucauccucggccccgacgggaacgugcugaucccggagaugcaguccagccugcuccagcagcacauggagcugcuggaguccagcgucaucccccucaugcacccccuggccgaccccuccaccguguucaaggagggcgacgaggccgaggacuucguggagguccaccucccggacgugcacaagcaggucagcgacguggaccuggggcugcccuccuggggcaaguaccugcucaucagcgccggcgcccuggcgauccugauccucgccaucgugcugaucaucugcugccgccgggugaacaagaccggguccacccagcgcggccaccgcgagagcgggggcaagauguccgucgugccccagaacgggaagaucaucagcagcugggagcuguacaaguccgagagcgagacgggccuguga

SEQ ID NO: 95627 - RNA, 1575 nt, Artificial Sequence; identical to SEQ ID NO: 95445
  derived and/or modified CDS sequence (opt1) from glycoprotein__RABV__KJ174639.1

SEQ ID NO: 95628 - RNA, 1575 nt, Artificial Sequence
  derived and/or modified CDS sequence (opt1) from glycoprotein__RABV__KJ174640.1
augaucccccaggcccuccuguucgugccgcugcugauccccagccucugccugggcgaguuccccaucuacaccauccccgacaagcuggggccguggucccccaucgacauccaccaccucagcugccccaacaaccuggucgccgagaacgacggcugcaccucccugagcggguucuccuacauggagcucaaggugggcuacaucagcgcgaucaaggugaacggguucacgugcaccggcgucgugaccgaggccgagaccuacacgaacuucgugggcuacgucaccaccaccuucaagcgcaagcacuuccggcccacgccggacgccugccgcgccgcccacgacuggaagauggcgggggacccccgguacgaggccucccugcagaaccccuaccccgacuaccacuggcugcgcaccgugaagaccaccaaggagagccucgugaucaucuccccgagcgucgccgaccuggaccccuacgacaagucccugcacagccggguguuccccuccggcaagugccucgggaucacggugagcuccaccuacugccccaccaaccacgacuacaccaucuggaugccggucgagccccgccugggcacgagcugcgacaucuucaccaacucccgggggaagcgcgccagcaagggcggccgggugugcggguucguggacgagcgcggccuguacaagucccucaagggggcgugccggcugaagcugugcggcguccccggcauccgccuccuggacgggaccugggugagcauccagaccagcgaggacaucaaguggugcccgcccgaccggcuggugaaccuccacgacuuccacuccgacgagaucgagcaccuggucguggccgagcugaucaagcgccgggagaacugccucgacgcccuggagagcaucaugacgaccaaguccgugagcuuccgccggcugucccaccuccgcaagcugguccccggcuucgggaaggccuacaccaucuucaacaagacccugauggaggccgacgcgcacuacaagagcgugaagacguggaacgaggugauccccuccaagggcugccucgaggucgggggccggugccacccccacgugaacggcgucuucuucaacgggaucauccugggcccggacgggaacgugcugauccccgagaugcagagcucccuccugcagcagcacauggagcugcucgagagcuccgugaucccccugaugcacccccuggccgacccgagcaccgucuucaaggagggcgacgaggccgaggacuucguggaggugcaccuccccgacguccacaagcaggucuucgggguggaccugggccugcccuccuggggcaaguaccuccugaucagcgccggggcccuggcgauccucauccuggccaucgugcugaucaucugcugccgccgggugaacaagaccgaguccaccccgcgcggccaccgcgagagcgggggcaagauguccguggucccccagaacgggaagaucaucagcuccugggagcuguacaagagcgagagcgagacgggccucuga

SEQ ID NO: 95629 - RNA, 1575 nt, Artificial Sequence; identical to SEQ ID NO: 95272
  derived and/or modified CDS sequence (opt1) from glycoprotein__RABV__KJ174641.1

SEQ ID NO: 95630 - RNA, 1575 nt, Artificial Sequence
  derived and/or modified CDS sequence (opt1) from glycoprotein__RABV__KJ174642.1
auggugccccaggcccugcuguucgucccgcugcugauccccagccucugccugggcgaguuccccaucuacaccauccccgacaagcuggggccguggacccccaucgacauccaccaccucuccugccccaacaaccugguggccgagaacgacggcugcacgagccuguccggguucagcuacauggagcucaaggugggcuacaucuccgcgaucaaggucaacggguucacgugcaccggcguggugaccgaggccgagaccuacaccaacuucgucggcuacgugaccaccacguucaagcgcaagcacuuccggcccaugccggacgccugccgcgccgcccacgacuggaagauggcgggggacccccgguacgaggacagccugcagaaccccuaccccgacuaccacuggcugcgcaccgugaagaccaccaaggagucccucgucaucaucagcccguccguggccgaccuggaccccuacgacaagagccugcacucccggguguuccccagcggcaagugccucgggaucacggucuccagcaccuacugcuccaccaaccacgacuacaccaucuggaugcccguggagccgcgccugggcacgagcugcgacaucuucaccaacucccgggggaagcgcgccagcaagggcggccgggugugcggguucgucgacgagcgcggccuguacaagucccucaagggggccugcaagcugaagcugugcggcgugcccggcauccggcuccuggacgggaccugggugagcauccagaccagcgaggacaucaaguggugcccgcccgaccgccuggucaaccuccacgacuuccacuccgacgagcuggagcaccuggugguggaggagcucaucaagcggcgcgagaacugccuggacgcgcuggagagcaucaugacgaccaaguccgucagcuuccggcgccucucccaccuccggaagcuggugcccggcuucgggaaggccuacaccaucuucaacaagacccucauggaggccgacgcccacuacaagagcgugaagacguggaacgaggucauccccuccaagggcugccuggaggucgggggcaagugccacccgcccgugaacggcguguucuucaacgggaucauccugggccccgacgggaacgugcucauccccgagaugcagagcucccugcugcagcagcacauggagcuccuggagagcuccgucaucccccugaugcacccccucgccgacccgagcaccguguucaaggagggcgacgaggcggaggacuucguggagguccaccuccccgacgugcacaagcaggucuccgacguggaccuggggcugcccagcuggggcaaguaccugcugauguccgccggcgcccucgccauccugauccuggccaucgugcugaucaucugcugccgccgggugaacaagaccgggagcacccagcgcggccaccgggagucccgcgggaagaugagcgucuccccgcagaacggcaagaucaucagcagcugggagcucuacaagcgcgaguccgagacggggcuguga

SEQ ID NO: 95631 - RNA, 1575 nt, Artificial Sequence
  derived and/or modified CDS sequence (opt1) from glycoprotein__RABV__KJ174643.1
augaucccccaggcccugcuguucgugccgcugcugauccccagccucugccugggcgaguuccccaucuacaccauccccgacaagcuggggccguggacccccaucgacauccaccaccucuccugccccaacaaccuggucgccgagaacgacggcugcacgagccuguccggguucagcuacauggagcucaaggugggcuacaucuccgcgaucaaggugaacggguucacgugcaccggcgucgugaccgaggccgagaccuacaccaacuucgugggcuacgucaccaccacguucaagcgcaagcacuuccggcccaugccggacgccugccgcgccgcccacgacuggaagauggcgggggacccccgguacgaggacagccugcagaaccccuaccccgacuaccacuggcugcgcaccgugaagaccaccaaggagucccucgugaucaucagcccguccgucgccgaccuggaccccuacgacaagagccugcacucccggguguuccccagcggcaagugccucgggaucacgguguccagcaccuacugcuccaccaaccacgacuacaccaucuggaugcccgucgagccgcgccugggcacgagcugcgacaucuucaccaacucccgggggaagcgcgccagcaagggcggccgggugugcggguucguggacgagcgcggccuguacaagucccucaagggggccugcaagcugaagcugugcggcguccccggcauccggcuccuggacgggaccugggugagcauccagaccagcgaggacaucaaguggugcccgcccgaccgccuggugaaccuccacgacuuccacuccgacgagcuggagcaccuggucguggaggagcucaucaagcggcgcgagaacugccuggacgcgcuggagagcaucaugacgaccaaguccgugagcuuccggcgccucucccaccuccggaagcugguccccggcuucgggaaggccuacaccaucuucaacaagacccucauggaggccgacgcccacuacaagagcgugaagacguggaacgaggugauccccuccaagggcugccuggaggucgggggcaagugccacccgcccgugaacggcgucuucuucaacgggaucauccugggccccgacgggaacgugcucauccccgagaugcagagcucccugcugcagcagcacauggagcuccuggagagcuccgugaucccccugaugcacccccucgccgacccgagcaccgucuucaaggagggcgacgaggcggaggacuucguggaggugcaccuccccgacguccacaagcaggucuccgacguggaccuggggcugcccagcuggggcaaguaccugcugauguccgccggcgcccucgccauccugauccuggccaucgugcugaucaucugcugccgccgggugaacaagaccgggagcacccagcgcggccaccgggagucccgcgggaagaugagcguggcgccgcagaacggcaagaucaucuccagcugggagcucuacaagcgcgagagcgagacggggcuguga

SEQ ID NO: 95632 - RNA, 1575 nt, Artificial Sequence; identical to SEQ ID NO: 95631
  derived and/or modified CDS sequence (opt1) from glycoprotein__RABV__KJ174644.1

SEQ ID NO: 95633 - RNA, 1575 nt, Artificial Sequence
  derived and/or modified CDS sequence (opt1) from glycoprotein__RABV__KJ174645.1
augaucccccaggcccugcucagccugcugcuccugaucuccagccugugccucggcaaguucccgaucuacaccauccccgacaagcuggggcccuggucccccaucgacauccaccaccugagcugcccgaacaaccucguggucgaggacgagggcugcaccucccugagcggguucuccuacauggagcugaaggugggcuacaucagcgccaucaaggugaacggguucacgugcaccggcgucgugaccgaggcggagaccuacaccaacuucgugggcuacgucaccaccaccuucaagcgcaagcacuuccggcccaugcccgacgccugccgcgccgcccacgaguggaagauggccggggacccccgguacgaggacucccuccagaacccguaccccgacuaccacuggcugcgcacggugaagaccaccaaggagagccugaucaucaucucccccagcguggcggaccucgaccccuacgacaagucccugcacagccgggucuucccgggcgggaacugccugggcaucaccaucuccagcacguacugcuccaccaaccacgacuacaccaucuggaugcccgaggaggcccgccucgggaccagcugcgacaucuucacguccagccggggcaagcgcgccagcaagggcgggaagaucugcggcuucguggacgagcgggggcuguacaagucccugaagggcgccugcaagcucaagcugugcggcgugcccgggcugcgccucauggacggcaccugggucagcauccagaccuccgacgagaccaaguggugcccgcccgaccagcuggugaacgugcacgacuuccacagcgacgagaucgagcaccugaucgucgaggagcucgugaagaagcgggaggagugccuggacgcgcuggaguccaucaugacgaccaagagcguguccuuccgccggcucagccaccuccgcaagcugguccccggguucggcaaggccuacaccaucuucaacaagacccugauggaggccgacgcccacuacaaguccgugcggacguggaacgagaucauccccagcaaggggugccugaaggugggcggcaugugccacccccacgucgggggcguguucuucaacgggaucauccugggcccggacgggaccgugcucauccccgagaugcaguccagccugcugcagcagcacauggagcuccuggaguccagcgucaucccccugaugcacccccucgccgacccguccaccguguucaaggagggcgacgaggcggaggacuucgucgagauccaccuccccgacgugcacaagcagaucagcggcguggaccuggggcugcccuccuggggcaaguaccugcugaucagcgccggggcccucgccacccugauccugacgaucuuccugaucacgugcugccgcaaggucaaccggaccgaguccauccagcgcggccacggggagagcgagcggaaggugagcgugagcccccagaacggccgcgucaucuccuccugggagcucuacaagagcggcggggagaccaaccuguga

SEQ ID NO: 95634 - RNA, 1575 nt, Artificial Sequence
  derived and/or modified CDS sequence (opt1) from glycoprotein__RABV__KJ174646.1
augaucccccaggcccuccuguucgugccgcugcugauccccagccucugccugggcaaguuccccaucuacaccauccccgacaagcuggggccguggucccccaucgacauccaccaccucagcugccccaacaaccuggucgccgaggacgagggcugcaccucccugagcggguucuccuacauggagcucaaggugggcuacaucagcgccaucaaggugaacggguucacgugcaccggcgucgugaccgaggccgagaccuacacgaacuucgugggcuacgucaccaccaccuucaagcgcaagcacuuccggcccaugccggacgccugccgcgccgcccacgacuggaagauggcgggggacccccgguacgaggacucccugcagaaccccuaccccgacuaccacuggcugcgcacggugaagaccaccaaggagagccucgugaucaucuccccgagcgucgccgaccuggaccccuacgacaagucccugcacagccggguguuccccuccggcaagugccucgggaucaccgugagcuccacguacugcagcaccaaccacgacuacaccaucuggaugcccgucgaggcccgccugggcaccuccugcgacaucuucacgaacagcaaggggaagaaggccuccaagggcggccggaccugcggguucguggacgagcgcggccuguacaagagccucaagggggcgugcaagcugaagcugugcggcgugccgggccuccggcugauggacgggaccugggucagcauccagaccuccgacgacaucaaguggugcccgcccgaccagcuggugaaccuccacgacuuccacagcgacgagaucgagcaccugguggucgaggagcugaucaagaagcgcgagggcugccucgacgcccuggaguccaucaugacgaccaagagcguguccuuccggcgccugagccaccuccggaagcuggugcccggguucggcaaggccuacaccaucuucaacaacacccugauggaggccgacgcccacuacaaguccguccgcacguggaacgaggugauccccagcaaggggugccucaaggugggcggccggugccacccgcccgucaacgggguguucuucaacggcaucauccuggggcccgacggcaacguccugauccccgagaugcaguccagccuccugcagcagcacauggagcugcucgaguccagcgugaucccccugaugcacccccuggcggaccccuccaccguguucaaggacggggacgaggccgaggacuucgucgaggugcaccucccggacgugcacaagcaggucagcgagaucgaccugggccugcccuccuggggcaaguaccuccugaugagcgccggggugcuggccacccucauccuggccaucuuccugaucacgugcugccgccgggcgaaccgcaccgaguccacccagcggggccgccgggagagcgggggcaagguguccgucgcgccccagaacgggaaggugaucagcagcugggagcuguacaaguccgagagcgagaccggccucuga

SEQ ID NO: 95635 - RNA, 1575 nt, Artificial Sequence
  derived and/or modified CDS sequence (opt1) from glycoprotein__RABV__KJ174647.1
augaucccccaggcccuccuguucgugccgcugcugauccccagccucugccugggcaaguuccccaucuacaccauccccgacaagcuggggccguggucccccaucgacauccaccaccucagcugccccaacaaccuggucgccgaggacgagggcugcaccucccugagcggguucuccuacauggagcucaaggugggcuacaucagcgcgaucaaggugaacggguucacgugcaccggcgucgugaccgaggccgagaccuacacgaacuucgugggcuacgucaccaccaccuucaagcgcaagcacuuccggcccaugccggacgccugccgcgccgcccacgacuggaagauggcgggggacccccgguacgaggacucccugcagaaccccuaccccgacuaccacuggcugcgcacggugaagaccaccaaggagagccucgugaucaucuccccgagcgucgccgaccuggaccccuacgacaagucccugcacagccggguguuccccuccggcaagugccucgggaucaccgugagcuccacguacugcagcaccaaccacgacuacaccaucuggaugcccgucgaggcccgccugggcaccuccugcgacaucuucacgaacagcaaggggaagaaggccuccaagggcggccggaccugcggguucguggacgagcgcggccuguacaagagccucaagggggcgugcaagcugaagcugugcggcgugccgggccuccggcugauggacgggaccugggucagcauccagaccuccgacgacaucaaguggugcccgcccgaccagcuggugaaccuccacgacuuccacagcgacgagaucgagcaccugguggucgaggagcugaucaagaagcgcgagggcugccucgacgcccuggaguccaucaugacgaccaagagcguguccuuccggcgccugagccaccuccggaagcuggugcccggguucggcaaggccuacaccaucuucaacaacacccugauggaggccgacgcccacuacaaguccguccgcacguggaacgaggugauccccagcaaggggugccucaaggugggcggccggugccacccgcccgucaacgggguguucuucaacggcaucauccuggggcccgacggcaacguccugauccccgagaugcaguccagccuccugcagcagcacauggagcugcucgaguccagcgugaucccccugaugcacccccuggcggaccccuccaccguguucaaggacggggacgaggccgaggacuucgucgaggugcaccucccggacgugcacaagcaggucagcgagaucgaccugggccugcccuccuggggcaaguaccuccugaugagcgccggggugcuggccacccucauccuggccaucuuccugaucacgugcugccgccggaccaaccgcaccgaguccacccagcggggccgccgggagagcgggggcaagguguccgucgcgccccagaacgggaagaucaucagcagcugggagcuguacaaguccgagagcgagaccggccucuga

SEQ ID NO: 95636 - RNA, 1575 nt, Artificial Sequence; identical to SEQ ID NO: 95307
  derived and/or modified CDS sequence (opt1) from glycoprotein__RABV__KJ174648.1

SEQ ID NO: 95637 - RNA, 1575 nt, Artificial Sequence; identical to SEQ ID NO: 95307
  derived and/or modified CDS sequence (opt1) from glycoprotein__RABV__KJ174649.1

SEQ ID NO: 95638 - RNA, 1575 nt, Artificial Sequence
  derived and/or modified CDS sequence (opt1) from glycoprotein__RABV__KJ174650.1
augauccugcaggcccuccuguucgugccccugcucaucagcccgcugugccugggcaaguuccccaucuacaccauccccgacaagaucgggcccugguccccgaucgacauccaccaccucagcugccccaacaaccuggucguggaggacgagggcugcaccacgcuguccggguucagcuacauggagcucaaggugggcuacaucuccgccaucaaggucaacggguucacgugcaccggcguggugaccgaggcggagacguacaccaacuucgucggcuacgugaccaccacguucaagcgcaagcacuuccggcccacccccgacgccugccgcgccgccuacaacuggaagaucgccggggacccgcgguacgaggacagccugcagaaccccuaccccgacuaccacuggcugcgcaccgugaagaccacgaaggagucccucaucaucaucagccccuccgucgcggaccuggacccguacgacaagagccugcacucccggguguuccccagcggcaagugccucgggaucaccaucuccagcaccuacugcuccaccaaccacgacuacacgaucuggaugcccgaggaggcccgccugggcaccagcugcgacaucuucgccaacuccaaggggaagcgggccagcaagggcggcaagaccugcggguucguggacgagcgcggccuguacaagucccuccgcggggcgugcaagcugaagcugugcggcguccccggccuccggcugauggacgggaccugggugagcauccagacgaccgacgagaccaaguggugcccgcccgaccagcuggugaaccuccacgacuuccacagcgacgagaucgagcaccuggucguggaggagcuggugaagaagcgggaggagugccucgacgcccuggaguccaucaugaccaccaagagcgucuccuuccgccggcugagccaccuccgcaagcuggugcccggcuucgggaaggccuacaccaucuucaacaagacccugauggaggccgacgcccacuacaaguccgugcagaccuggaacgagaucauccccagcaagggcugccucaaggucgggggccggugccacccgcacguggacggcguguucuucaacgggaucauccugggccccgacgggaacguccugauccccgagaugcaguccagccuccugcagcagcacauggagcugcucgaguccagcgugaucccccugaugcacccgcuggcggaccccuccacggucuucaaggacggcgacgaggccgaggacuucguggaggugcaccuccccgacguccacaagcaggucagcgggguggaccugggccugcccgacuggggcaaguaccuccugauguccgccggggcccuggccacccuccugcugaccaucuuccugaugaccugcugccgcaaggugaacaagacggagagcacccaccgggacccgggcgaguccgggcgcaaggugagcguggcgccccggaacggcaaggucaucuccagcugggagcucuacaaguccgggggcgagacccgccuguga

SEQ ID NO: 95639 - RNA, 1575 nt, Artificial Sequence
  derived and/or modified CDS sequence (opt1) from glycoprotein__RABV__KJ174651.1
augauccugcaggcccuccuguucgugccccugcucaucagcccgcugugccugggcaaguuccccaucuacaccauccccgacaagaucgggcccugguccccgaucgacauccaccaccucagcugccccaacaaccuggucguggaggacgagggcugcaccacgcuguccggguucagcuacauggagcucaaggugggcuacaucuccgccaucaaggucaacggguucacgugcaccggcguggugaccgaggccgagaccuacaccaacuucgucggcuacgugaccaccacguucaagcgcaagcacuuccggcccacccccgacgccugccgcgccgccuacaacuggaagaucgccggggacccgcgguacgaggacagccugcagaaccccuaccccgacuaccacuggcugcgcaccgugaagaccacgaaggagucccucaucaucaucagccccuccgucgcggaccuggacccguacgacaagagccugcacucccggguguuccccagcggcaagugccucgggaucaccaucuccagcaccuacugcuccaccaaccacgacuacacgaucuggaugcccgaggaggcccgccugggcaccagcugcgacaucuucaccaacuccaaggggaagcgggccagcaagggcggcaagaccugcggguucguggacgagcgcggccuguacaagucccuccgcggggccugcaagcugaagcugugcggcguccccggccuccggcugauggacgggacgugggugagcauccagaccaccgacgacaccaaguggugcccgcccgaccagcuggugaaccuccacgacuuccacagcgacgagaucgagcaccuggucguggaggagcuggugaagaagcgggaggagugccucgacgcgcuggaguccaucaugacgaccaagagcgucuccuuccgccggcugagccaccuccgcaagcuggugcccggcuucgggaaggccuacaccaucuucaacaagacccugauggaggccgacgcccacuacaaguccgugcagacguggaacgagaucauccccagcaagggcugccucaaggucgggggccggugccacccgcacguggacggcguguucuucaacgggaucauccugggccccgacgggaacguccugauccccgagaugcaguccagccuccugcagcagcacauggagcugcucgaguccagcgugaucccccugaugcacccgcuggccgaccccuccaccgucuucaaggacggcgacgaggcggaggacuucguggagauccaccuccccgacgugcacaagcaggucagcgggguggaccugggccugcccgacuggggcaaguaccuccugauguccgccggggcccuggccacccuccugcugaccaucuuccugaugacgugcugccgcaaggugaacaagaccgagagcacccaccgggacccgggcgaguccgggcgcaaggucagcguggcgccccggaacggcaaggugaucuccagcugggagcucuacaaguccgggggcgagacccgccuguga

SEQ ID NO: 95640 - RNA, 1575 nt, Artificial Sequence
  derived and/or modified CDS sequence (opt1) from glycoprotein__RABV__KJ174653.1
augaucccccaggcccugcuguucgugccgcugcugaucagcucccucugcuucggcgaguuccccaucuacaccauccccgagaagcuggggcccuggagcccgaucgacauccaccaccuguccugccccaacaaccucgucguggaggacgagggcugcaacagccuguccggguucagcuacauggagcugaaggugggcuacaucuccagcaucaaggucaacggguucacgugcaccggcguggugaccgaggccgagaccuacaccaacuucgucggcuacgugacgaccaccuucaagcgcaagcacuuccggcccaugcccgacgcgugccgcgccgccuacuccuggaagaucgccggggacccgcgguacgaggagagccuccacaaccccuaccccgacuaccacuggcugcgcaccgugaagacgaccaaggagucccuggucaucaucagccccuccguggccgaccucgacccguacgacaagagccugcacucccggguguucagcggcgggaagugccugggcaucaccaucuccagcaccuacugcuccacgaaccacgacuacaccaucuggaugcccgaggaggcgcgccucgggaccagcugcgacaucuucaccaacagcaagggcaagcgggccuccaagggcgggaagacgugcggcuucgucgacgagcgcgggcuguacaagagccugaagggcgccugcaagcucaagcugugcggcgugcccgggcugcggcucauggacggcaccuggguguccauccagaccagcgacgagaccaaguggugcccgcccgaccagcuggucaacauccacgacuuccgcuccgacgagaucgagcaccuggugguggaggagcucgucaagaagcgggaggagugccuggacgcccuggagagcaucaugacgaccaaguccgugagcuuccgccggcucucccaccuccgcaagcuggugcccggguucggcaaggcguacaccaucuucaacaagacccucauggaggccgacgcccacuacaagagcguccggacguggaacgagaucauccccuccaaggggugccugagcgugggcggccgcugccacccccacgugaacggggucuucuucaacggcaucaucauggggccggacggcuccgugcugauccccgagaugcagagcucccuccugcagcagcacauggagcugcucgagagcuccgucaucccccugaugcacccccuggccaacccgagcaccguguucaaggacggggacgaggccgaggacuucaucgaggugcaccuccccgacguccaggagcaggucuccggcguggaccugggccugcccaacugggggaaguacgugcucaugagcgcgggcgcccuggccauccugaugcucaccaucuuccugaugaccuucugccggcgcacgaaccggaccaagagcauccagcaggggcccggcgaguccgggcgcaaggugagcgugccgccccagaacggcaaggucaucuccagcugggaguccuucaagagcggcggggagaccggccuguga

SEQ ID NO: 95641 - RNA, 1575 nt, Artificial Sequence; identical to SEQ ID NO: 95315
  derived and/or modified CDS sequence (opt1) from glycoprotein__RABV__KJ174654.1

SEQ ID NO: 95642 - RNA, 1575 nt, Artificial Sequence; identical to SEQ ID NO: 95358
  derived and/or modified CDS sequence (opt1) from glycoprotein__RABV__KJ174655.1

SEQ ID NO: 95643 - RNA, 1575 nt, Artificial Sequence
  derived and/or modified CDS sequence (opt1) from glycoprotein__RABV__KJ174656.1
augaucccccagacccugcuguucgugccgcugcugauccuccccagcugccugggcaaguuccccaucuacaccauccccgacaagaucgggccguggucccccaucgacauccaccaccugagcugccccaacaaccucgucguggaggacgagggcugcacgucccugagcggguucuccuacauggagcugaaggugggcuacaucagcgccaucaaggucaacggguucacgugcaccggcguggugaccgaggccgagaccuacaccaacuucgucggcuacgugaccaccacguucaagcgcaagcacuuccggcccaccccggacgcgugccgcgccgccuacaacuggaagauggccggggacccccgguacgaggacucccuccagaaccccuaccccgacuaccacuggcugcgcaccgugaagaccacgaaggagagccugaucaucaucuccccgagcgucgccgaccucgaccccuacgacaagucccugcacagccggguguuccccuccggcaagugccuggggaucaccgugagcuccaccuacugcagcaccaaccacgacuacacgaucuggaugcccgaggaggcgcgccucggcaccuccugcgacaucuucaccaacagcaaggggaagcgggccuccaagggcggcaagaccugcggguucgucgacgagcgcggccuguacaagagccugcgcggggccugcaagcucaagcugugcggcgugccgggccugcggcucauggacgggacgugggugagcauccagaccaccgacgagaccaaguggugccccuccgaccagcuggucaaccugcacgacuuccacagcgacgagaucgagcaccucgugguggaggagcuggucaagaagcgggaggagugccuggacgcccucgaguccaucaugacgaccaagagcguguccuuccgccggcugagccaccuccgcaagcucgugcccggcuucgggaaggcguacaccaucuucaacaagacccugauggaggccgacgcccacuacaaguccguccagacguggaacgagaucauccccagcaagggcugccugaaggucgggggccggugccacccgcacguggacggcguguucuucaacgggaucauccucggccccgacgggaacgugcugauccccgagaugcaguccagccugcuccagcagcacauggagcugcuggaguccagcgucaucccccucaugcacccgcuggccgaccccuccaccguguucaaggacggcgacgaggccgaggacuucguggagguccaccuccccgacgugcacaagcaggucagcgggguggaccugggccugcccgacuggggcaaguaccugcucauguccgcgggggcccuggccacccugcuccugaccaucuuccugaugacgugcugccgcaaggugaacaagaccgagagcacccagcgggacuccggcgagagcgggcgcaagguguccaucgccccgcggaacggcaaggucaucagcagcugggagcuguacaaguccgggggcgacacccgccucuga

SEQ ID NO: 95644 - RNA, 1575 nt, Artificial Sequence; identical to SEQ ID NO: 95643
  derived and/or modified CDS sequence (opt1) from glycoprotein__RABV__KJ174657.1

SEQ ID NO: 95645 - RNA, 1575 nt, Artificial Sequence
  derived and/or modified CDS sequence (opt1) from glycoprotein__RABV__KJ174658.1
augaucagccagacccugcuguucgugacccugcugaucuccagccucugcuucggcgaguuccccaucuacacgauccccgagaagcuggggcccuggucccccaucgacauccaccaccugagcugccccaacaaccucgucguggaggacgagggcugcaacucccugagcggguucuccuacauggagcugaaggugggcuacaucagcuccaucaaggucaacggguucacgugcaccggcguggugaccgaggccgagaccuacaccaacuucgucggcuacgugaccaccacguucaagcgcaagcacuuccggccgaugcccgacgccugccgcgcggccuacaacuggaagaugagcggggacccccgguacgaggagucccuccacaaccccuacccggacuaccacuggcugcgcaccgugaagaccaccaaggagagccuggucaucaucucccccagcguggccgaccucgaccccuacgacaagucccugcacagccggguguucuccggcgggaagugccugggcaucacgaucagcuccaccuacugcagcaccaaccacgacuacacccucuggaugcccgaggaggcccgccuggggacgagcugcgacaucuucaccaacuccaagggcaagcgggccagcaagggcgggcggaccugcggcuucgucgacgagcgcgggcuguacaagucccucaagggcgcgugcaagcugaagcugugcggcgugccggggcuccgccugauggacggcaccugggugagcauccagacguccgacgagaccaaguggugcccgcccgaccagcuggucaacauccacgacuuccggagcgacgagaucgagcaccucgugguggaggagcuggucaagaagcgcgaggagugccuggacgcccucgaguccaucaugaccaccaagagcguguccuuccggcgccugagccaccuccggaagcucgugcccggguucggcaaggccuacacgaucuucaacaagacccugauggaggccgacgcgcacuacaaguccguccgcaccuggaacgaggugauccccagcaaggggugccuguccgugggcggccggugccacccccacgucgacgggguguucuucaacggcaucauccucgggcccgacggcagcguccugauccccgagaugcaguccagccugcuccagcagcacauggagcugcuggaguccagcgugaucccgcucaugcacccccuggccaaccccuccaccguguucaaggacggggacgaggccgaggacuucgucgaggugcaccuccccgacgugcaggagcaggucagcggcguggaccugggccugccgaacugggggaaguacgugcugaugagcgccggcgcccucgcgauccugcugcucacgaucuuccugaugaccugcugccgccgggccaaccgcaccaaguccauccggcaggggcccgaggagagcggccgccgcgucuccgugccgccccagaacgggaaggugaucagcuccugggagagcuucaaguccggcggcgagaccgggcuguga

SEQ ID NO: 95646 - RNA, 1575 nt, Artificial Sequence
  derived and/or modified CDS sequence (opt1) from glycoprotein__RABV__KJ174659.1
augaucagccagacccuccuguucgugccccugcugaucuccagccucugccugggcgaguucccgaucuacaccauccccgagaagcuggggcccuggucccccaucgacauccaccaccucagcugcccgaacaaccuggucguggaggacgagggcugcaacucccugagcggguucuccuacauggagcucaaggugggcuacaucagcuccaucaaggucaacggguucacgugcaccggcguggugaccgaggccgagaccuacacgaacuucgucggcuacgugaccaccaccuucaagcgcaagcacuuccggcccaugcccgacgccugccgcgcggccuacaacuggaagaugagcggggacccccgguacgaggagucccugcacaacccguaccccgacuaccacuggcugcgcacggugaagaccaccaaggagagccucgucaucaucucccccagcguggccgaccuggaccccuacgacaagucccugcacagccggguguucuccggcgggaagugccucggcaucaccaucagcuccacguacugcagcaccaaccacgacuacacccuguggaugccggaggaggcccgccuggggaccagcugcgacaucuucacgaacuccaagggcaagcgggccagcaagggcgggaagaccugcggcuucgucgacgagcgcgggcucuacaagucccugaagggcgcgugcaagcugaagcucugcggcgugcccgggcugcggcugauggacggcaccugggugagcauccagaccuccgacgagacgaaguggugcccgcccgaccagcucgucaacauccacgacuuccacagcgacgagaucgagcaccuggugguggaggagcuggucaagaagcgcgaggagugccucgacgcccuggaguccaucaugaccaccaagagcguguccuuccggcgccugagccaccuccggaagcuggugcccggguucggcaaggccuacaccaucuucaacaagacgcugauggaggccgacgcgcacuacaaguccguccgcaccuggaacgaggugauccccagcaaggggugccucuccgugggcggccggugccacccccacgucgacgggguguucuucaacggcaucauccuggggcccgacggcagcguccugaucccggagaugcaguccagccuccugcagcagcacauggagcugcucgaguccagcgugaucccccugaugcacccccuggccaaccccuccaccguguucaaggacggggacgaggccgaggacuucgucgaggugcaccucccggacgugcaggagcaggucagcggcguggaccugggccugcccaacugggggaaguacgugcucaugagcgccggcgcccuggcgauccugcuccugaccaucuuccugaugacgugcugccgccgggccaaccgcaccaaguccauccggcgcgggcccgaggagagcggccggaaggucuccgugcccccgcagaacgggaaggugaucagcuccugggagagcuucaaguccggcggcgagacccgccuguga

SEQ ID NO: 95647 - RNA, 1575 nt, Artificial Sequence
  derived and/or modified CDS sequence (opt1) from glycoprotein__RABV__KJ174660.1
augaucccccaggcccugcuguucgugccgcugcugaucagcucccucugccugggcaaguuccccaucuacaccauccccgagaagcuggggcccuggagcccgaucgacauccaccaccucggcugccccaacaaccuggucguggaggacgaggggugcgacucccugagcggcuucuccuacauggagcucaaggugggguacaucagcgccaucaaggucaacggcuucacgugcaccggcguggugaccgaggcggagaccuacaccaacuucgucggguacgugacgaccaccuucaagcgcaagcacuuccggcccaugcccgacgccugccgcgccgccuacaacuggaagaccgccggcgacccgcgguacgaggagucccugcacaaccccuaccccgacuaccacuggcugcgcacggugaagaccaccaaggagagccucaucaucaucucccccagcgucgcggaccuggacccguacgacaagucccugcacagccggguguuccccgggggcaagugccucgggaucaccguguccagcacguacugcuccaccaaccacgacuacaccaucuggaugcccgaggagacccgccugggcacgagcugcgacaucuucaccaacucccggggcaagcgcgccagcaagggcgggaagaccugcggguucgucgacgagcggggccuguacaagucccucaagggcgccugcaagcugaagcugugcggggugcccggccuccgccugauggacgggaccugggugagcauccagacgccggacgagaccaaguggugcagccccgaccagcuggucaaccuccacgacuuccacuccgacgagaucgagcaccuggugguggaggagcuggucaagaagcgggaggagugccucgacgcccuggagagcaucaugaccaccaaguccgugagcuuccgccggcugucccaccuccgcaagcuggugcccggcuucgggaaggcguacacgaucuucaacaagacccugauggaggccgacgcccacuacaagagcguccggaccugggacgagaucauccccuccaagggcugccuccgcgugggcgggcggugccacccgcacgugaacggcgucuucuucaacgggaucauccugggccccgacgggcacgugcugauccccgagaugcagagcucccuccugcagcagcacauggagcugcucgagagcuccgucaucccccugaugcacccgguggccaaccccagcaccguguucaaggacggcgacgaggccgaggacuucgucgaggugcaccuccccgacgugcacgagcaggucuccggcguggaccucgggcugcccaacuggggcaaguacaugcugaugagcgcgggggcccucgccacgaucauccugaccaucuuccugaucgccugcugccgccgggugaaccgcaaggagucccggcagcagggccucggggagagcggccgcaaggucuccgugaccccgcagaacggcaaggugcugagcuccugggagugguacaagagcgggggcgagacccgccuguga

SEQ ID NO: 95648 - RNA, 1575 nt, Artificial Sequence
  derived and/or modified CDS sequence (opt1) from glycoprotein__RABV__KJ174661.1
augaucccccaggcccugcuccugcugccccucaugaucagcucccugugccugggcaaguuccccaucuacaccauccccgacaagcucgggcccuggagcccgaucgacauccaccaccuguccugccccaacaaccugguggucgaggacgagggcugcaccagccucuccggguucagcuacauggagcugaaggugggcuacaucuccgccaucaaggugaacggguucacgugcaccggcgucgugaccgaggcggagaccuacacgaacuucgugggcuacgucaccaccaccuucaagcgcaagcacuuccggcccaugcccgacgccugccgcgccgccuacaacuggaagguggccggggacccgcgguacgaggagagccugcagaaccccuaccccgacuaccacuggcuccgcacggugaagaccaccaaggagucccugaucaucaucagccccuccgucgcggaccuggacccguacgacaagagccuccggucccgcaucuuccccggcgggaagugccugggcaucaccgugagcuccacguacugcagcaccaaccacgacuacaccaucuggaugcccgaggaggcccggcuggggaccuccugcgacaucuucacgaacagcaagggcaagcgcgccuccaagggcgggaagaucugcggcuucguggacgagcgggggcucuacaagagccugaagggcgccugcaagcugaagcucugcggcgucagcgggcugcgccugauggacggcaccuggguggcgauccagaccuccgaggagaccaaguggugccccagcgaccagcucgugaaccugcacgacuuccacuccgacgagaucgagcaccuggucguggaggagcucgugaagaagcgggaggagugccuggacgcccuggagagcaucaugacgaccaaguccgucagcuuccgccggcucucccaccuccgcaagcuggugccgggguucggcaaggccuacaccaucuucaacaagacccugauggaggccgacgcccacuacaacagcgugcggacguggaacgagaucauccccuccaaggggugccugaaggucggcggccgcugccacccccacguggacgggguguucuucaacggcaucauccuggggcccgacggcaacguccucaucccggagaugcagagcucccugcugcagcagcacauggagcuccuggagagcuccgugaucccccugaugcacccccucgcggaccccagcaccgucuucaaggagggggacgaggccgagaacuucguggaggugcaccucccggacauccacaagcaggucuccggcaucgaccugggccugcccaacugggggaaguaccugcugaugagcgccggcgcccucgccgcgcugauccugaccaucuuccugaucacgugcugccggcgcgugaacaccaccaaguccaucaagcaggggcccgaggagagccggcgcaagguguccgucaccccgcagagcggccggguggugagcuccugggagcucuacaagaagggcggggagaccaagcuguga

SEQ ID NO: 95649 - RNA, 1575 nt, Artificial Sequence
  derived and/or modified CDS sequence (opt1) from glycoprotein__RABV__KJ174662.1
augaucccccaggcccugcuccugcugccccucaugaucagcucccugugccugggcaaguuccccaucuacaccauccccgacaagcucgggcccuggagcccgaucgacauccaccaccuguccugccccaacaaccugguggucgaggacgagggcugcaccagccucuccggguucagcuacauggagcugaaggugggcuacaucuccgccaucaaggugaacggguucacgugcaccggcgucgugaccgaggcggagaccuacacgaacuucgugggcuacgucaccaccaccuucaagcgcaagcacuuccggcccaugcccgacgccugccgcgccgccuacaacuggaagguggccggggacccgcgguacgaggagagccugcagaaccccuaccccgacuaccacuggcuccgcacggugaagaccaccaaggagucccugaucaucaucagccccuccgucgcggaccuggacccguacgacaagagccuccggucccgcaucuuccccggcgggaagugccugggcaucaccgugagcuccacguacugcagcaccaaccacgacuacaccaucuggaugcccgaggaggcccggcuggggaccuccugcgacaucuucacgaacagcaagggcaagcgcgccuccaagggcgggaagaucugcggcuucguggacgagcgggggcucuacaagagccugaagggcgccugcaagcugaagcucugcggcgucagcgggcugcgccugauggacggcaccuggguggcgauccagaccuccgaggagaccaaguggugccccagcgaccagcucgugaaccugcacgacuuccacuccgacgagaucgagcaccuggucguggaggagcucgugaagaagcgggaggagugccuggacgcccuggagagcaucaugacgaccaaguccgucagcuuccgccggcucucccaccuccgcaagcuggugccgggguucggcaaggccuacaccaucuucaacaagacccugauggaggccgacgcccacuacaacagcgugcggacguggaacgagaucauccccuccaaggggugccugaaggucggcggccgcugccacccccacguggacgggguguucuucaacggcaucauccuggggcccgacggcaacguccucaucccggagaugcagagcucccugcugcagcagcacauggagcuccuggagagcuccgugaucccccugaugcacccccucgcggaccccagcaccgucuucaaggagggggacgaggccgagaacuucguggaggugcaccucccggacauccacaagcaggucuccggcaucgaccugggccugcccaacugggggaaguaccugcugaugagcgccggcgcccucgccgcgcugaugcugaccaucuuccugaucacgugcugccggcgcgugaacaccaccaaguccaucaagcaggggcccgaggagagccggcgcaagguguccgucaccccgcagagcggccggguggugagcuccugggagcucuacaagaagggcggggagacccgccuguga

SEQ ID NO: 95650 - RNA, 1575 nt, Artificial Sequence
  derived and/or modified CDS sequence (opt1) from glycoprotein__RABV__KJ174663.1
augaucccccaggccauccugagcgugccgcuccugaucuccagccugugcuucggcaaguuccccaucuacaccauccccgagaagcucgggcccugguccccgaucgacauccaccaccugagcugccccaacaaccuggucguggaggacgagggcugcaccacgcucuccggguucagcuacaucgagcugaaggugggcuacaucuccgccaucaaggucaacggguucacgugcaccggcguggugaccgaggcggagaccuacaccaacuucgucggcuacgugaccaccacguucaagcgcaagcacuuccggcccaugcccgacgccugccgcgccgccuacaacuggaagaucgccggggacccgcgguacgaggagagccugcacaaccccuaccccgacuaccacuggcuccgcaccgugaagaccaccaaggagucccuggucaucaucagccccuccguggcggaccuggacccguacgacaagagccuccacucccggguguuccccggcgggaagugccugggcaucacgaucagcuccaccuacugcagcaccaaccacgacuacaccaucuggaugcccgaggaggcccgccuggggacguccugcgacaucuucaccaacagccggggcaagcgcgccuccaagggcgggcggaccugcggcuucgucgacgagcgcgggcucuacaagagccugaagggcgccugcaagcugaagcucugcggcgugcccgggcugcggcugauggacggcaccugggugagcauccaggcguccgacgagacgaaguggugcagcccggaccagcucgucaacgugcacgacuuccacuccgacgagaucgagcaccugguggucgaggagcuggugaagcgccgggaggagugccucgacgcccuggagagcaucgugaccaccaaguccaucagcuuccgccggcugucccaccuccgcaagcugguccccggguucggcaaggccuacaccaucuucaacaagacgcugauggaggccgacgcccacuacaagagcgugcggaccuggaacgagaucauccccuccaaggggugccucagcgugggcggccgcugccacccccacgucaacgggguguucuucaacggcaucauccuggggccggacggcaacguccugauccccgagaugcaguccagccuccugcagcagcacauggagcugcucgaguccagcgugaucccccugaugcacccccuggcggacccguccaccguguucaaggacggggacgaggccgaggacuucgucgaggugcaccuccccgacgugcaggagcaggucagcggcguggaccugggccugcccaacugggggaaguacgugcucauguccgccggcgcccuggccauccugauccucaccaucuuccugaucacgugcugccggcgcgcgaacaagaccaagagcacccagcaggggcugggcggguccggccggaaggucagcgugagcccccagaacggcaaggugaucuccagcugggaguccuacaagaacgggggcgagacccgccucuga

SEQ ID NO: 95651 - RNA, 1575 nt, Artificial Sequence
  derived and/or modified CDS sequence (opt1) from glycoprotein__RABV__KJ174664.1
augaucccccaggccauccugagcgugccgcuccugaucuccagccugugcuucggcaaguuccccaucuacaccauccccgagaagcucgggcccugguccccgaucgacauccaccaccugagcugccccaacaaccuggucguggaggacgagggcugcaccacgcucuccggguucagcuacaucgagcugaaggugggcuacaucuccgccaucaaggucaacggguucacgugcaccggcguggugaccgaggcggagaccuacaccaacuucgucggcuacgugaccaccacguucaagcgcaagcacuuccggcccaugcccgacgccugccgcgccgccuacaacuggaagaucgccggggacccgcgguacgaggagagccugcacaaccccuaccccgacuaccacuggcuccgcaccgugaagaccaccaaggagucccuggucaucaucagccccuccguggcggaccuggacccguacgacaagagccuccacucccggguguuccccggcgggaagugccugggcaucacgaucagcuccaccuacugcagcaccaaccacgacuacaccaucuggaugcccgaggaggcccgccuggggacguccugcgacaucuucaccaacagccggggcaagcgcgccuccaagggcgggcggaccugcggcuucgucgacgagcgcgggcucuacaagagccugaagggcgccugcaagcugaagcucugcggcgugcccgggcugcggcugauggacggcaccugggugagcauccaggcguccgacgagacgaaguggugcagcccggaccagcucgucaacgugcacgacuuccacuccgacgagaucgagcaccugguggucgaggagcuggugaagcgccgggaggagugccucgacgcccuggagagcaucgugaccaccaaguccgucagcuuccgccggcugucccaccuccgcaagcuggugcccggguucggcaaggccuacaccaucuucaacaagacgcugauggaggccgacgcccacuacaagagcgugcggaccuggaacgagaucauccccuccaaggggugccucagcgucggcggccgcugccacccccacgugaacggggucuucuucaacggcaucauccuggggccggacggcaacgugcugauccccgagaugcaguccagccuccugcagcagcacauggagcugcucgaguccagcgugaucccccugaugcacccccuggcggacccguccaccgucuucaaggacggggacgaggccgaggacuucguggaggugcaccuccccgacguccaggagcaggucagcggcguggaccugggccugcccaacugggggaaguacaugcucauguccgccggcgcccuggccauccugauccucaccaucuuccugaucacgugcugccggcgcgcgaacaagaccaagagcacccagcaggggcugggcggguccggccggaaggugagcgugagcccccagaacggcaaggugaucuccagcugggaguccuacaagaacgggggcgagacccgccucuga

SEQ ID NO: 95652 - RNA, 1575 nt, Artificial Sequence
  derived and/or modified CDS sequence (opt1) from glycoprotein__RABV__KJ174665.1
augaucccccaggccauccugagcgugccgcuccugaucuccagccugugcuucggcaaguuccccaucuacaccauccccgagaagcucgggcccugguccccgaucgacauccaccaccugagcugccccaacaaccuggucguggaggacgagggcugcaccacgcucuccggguucagcuacaucgagcugaaggugggcuacaucuccgccaucaaggucaacggguucacgugcaccggcguggugaccgaggcggagaccuacaccaacuucgucggcuacgugaccaccacguucaagcgcaagcacuuccggcccaugcccgacgccugccgcgccgccuacaacuggaagaucgccggggacccgcgguacgaggagagccugcacaaccccuaccccgacuaccacuggcuccgcaccgugaagaccaccaaggagucccuggucaucaucagccccuccguggcggaccuggacccguacgacaagagccuccacucccggguguuccccggcgggaagugccugggcaucacgaucagcuccaccuacugcagcaccaaccacgacuacaccaucuggaugcccgaggaggcccgccuggggacguccugcgacaucuucaccaacagccggggcaagcgcgccuccaagggcgggcggaccugcggcuucgucgacgagcgcgggcucuacaagagccugaagggcgccugcaagcugaagcucugcggcgugcccgggcugcggcugauggacggcaccugggugagcauccaggcguccgacgagacgaaguggugcagcccggaccagcucgucaacgugcacgacuuccacuccgacgagaucgagcaccugguggucgaggagcuggugaagcgccgggaggagugccucgacgcccuggagagcaucgugaccaccaaguccaucagcuuccgccggcugucccaccuccgcaagcugguccccggguucggcaaggccuacaccaucuucaacaagacgcugauggaggccgacgcccacuacaagagcgugcggaccuggaacgagaucauccccuccaaggggugccucagcgugggcggccgcugccacccccacgucaacgggguguucuucaacggcaucauccuggggccggacggcaacguccugauccccgagaugcaguccagccuccugcagcagcacauggagcugcucgaguccagcgugaucccccugaugcacccccuggcggacccguccaccguguucaaggacggggacgaggccgaggacuucgucgaggugcaccuccccgacgugcaggagcaggucagcggcguggaccugggccugcccaacugggggaaguacgugcucauguccgccggcgcccuggccauccugauccucaccaucuuccugaucacgugcugccggcgcgcgaacaagaucaagagcacccggcaggggcugggcggguccggccgcaaggucagcgugagcccccagaacggcaaggugaucuccagcugggaguccuacaagaacgggggcgagacccgccucuga

SEQ ID NO: 95653 - RNA, 1575 nt, Artificial Sequence
  derived and/or modified CDS sequence (opt1) from glycoprotein__RABV__KJ174666.1
augaucccccaggcccuccuguucgugccgcugcugauccccagccucugccugggcaaguuccccaucuacaccauccccgacaagcuggggccguggucccccaucgacauccaccaccucagcugccccaacaaccuggucguggaggacgagggcugcaccucccugagcggguucuccuacauggagcucaaggugggcuacaucagcgccaucaaggucaacggguucacgugcaccggcguggugaccgaggccgagaccuacacgaacuucgucggcuacgugaccaccaccuucaagcgcaagcacuuccggcccaugccggacgccugccgcgccgcccacgacuggaagaucgccggggacccccgguacgaggacucccugcagaaccccuaccccgacuaccacuggcugcgcacggugaagaccaccaaggagagccucgucaucaucuccccgagcguggcggagcuggaccccuacgacaagucccugcacagccggguguuccccuccggcaagugccucgggaucaccgucagcuccacguacugcagcaccaaccacgacuacaccaucuggaugcccguggaggcccgccugggcaccuccugcgacaucuucacgaacagccgggggaagaaggccuccaagggcggccggaccugcggguucguggacgagcgcggccuguacaagagccucaagggggccugcaagcugaagcugugcggcgucccgggccuccgccugauggacgggaccugggugagcauccagaccuccgacgacaucaaguggugcccgcccgaccagcuggugaaccuccacgacuuccacagcgacgagaucgagcaccuggucguggaggagcugaucaagaagcgggagggcugccucgacgcgcuggaguccaucaugacgaccaagagcguguccuuccgccggcugagccaccuccgcaagcugguccccggguucggcaaggccuacaccaucuucaacaacacccugauggaggccgacgcccacuacaaguccgugcggacguggaacgaggugauccccagcaaggggugccucaaggucggcggccgcugccacccgcccgugaacggggucuucuucaacggcaucauccuggggcccgacggcaaggugcugauccccgagaugcaguccagccuccugcagcagcacauggagcugcucgaguccagcgugaucccccugaugcacccccuggccgaccccuccaccgucuucaaggacggggacgaggcggaggacuucguggaggugcaccucccggacguccacaagcaggucagcgacguggaccugggccugcccuccuggggcaaguaccuccugaugagcgccggggcccuggccacccucauccuggccaucuuccugaucacgugcugccggcgcgcgaaccggaccgaguccacccagcgcggccaccgggagagcgggggcaagauguccguggcgccccagaacgggaagaucaucagcagcugggagcuguacaaguccgagagcgagaccggcauguga

SEQ ID NO: 95654 - RNA, 1575 nt, Artificial Sequence
  derived and/or modified CDS sequence (opt1) from glycoprotein__RABV__KJ174667.1
augaucuuccaggcccugcuguucgugccccugcugaucagcucccucugccugggcaaguucccgaucuacaccauccccgacaagcuggggcccuggagccccaucgacauccaccaccucuccugcccgaacaaccuggucguggaggacgagggcugcaccagccuguccggguucagcuacauggagcucaaggugggcuacaucuccgccaucaaggucaacggguucacgugcaccggcguggugaccgaggcggagaccuacacgaacuucgucggcuacgugaccaccaccuucaagcgcaagcacuuccggcccauccccgacgccugccgcgccgccuacaacuggaagaucgccggggacccccgguacgaggagagccugcagaacccguaccccgacuaccacuggcugcgcacggugaagaccaccaaggagucccucaucaucaucagccccuccgucgcggaccuggaccccuacgacaagagccugcacucccgccucuucccgggcgggaagugccugggcaucaccaucagcuccacguacugcagcaccaaccacgacuacaccaucuggaugcccgaggagccccggcuggggaccuccugcgacaucuucacgaacagcaagggcaagaaggccuccaagggcgggaaggugugcggcuucguggacgagcgggggcucuacaagagccugaagggcgccugcaagcugaagcucugcggcgucagcgggcugcgccugauggacggcaccugggugaccauccagaccuccgacgagacgaaguggugcccgcccgaccagcucgugaaccugcacgacuuccacagcgacgagaucgagcaccuggucguggaggagcucgugaagaagcgggaggagugccuggacgcccuggaguccaucaugaccaccaagagcgucuccuuccgccggcucagcuaccugcgcaagcuggugcccggguucggcaaggcguacaccaucuucaacaagacgcucauggaggccgacgcccacuacaaguccgugcggaccuggaacgagaucauccccagcaaggggugccugaaggucuccgaccgcugccacccccacguggacggcguguucuucaacggcaucauccuggggccggacggcaacguccucauccccgagaugcagagcucccugcugcagcagcacauggagcuccuggagagcuccgugaucccccugaugcacccccucgccgacccgagcaccgucuucaaggacggggacgaggccgaggacuucguggaggugcaccuccccgacguccacaagcagaucuccggcguggaccuggggcuccccagcuggggcaaguaccugcugaugaucgcgggcgggcucgccacccuggugcugaucaucuuccugauggccugcugccggcgcacgaagcggaccgagccccgccggcgcggcuccggggagagcggcgagaagguccucgccaccccgcagcccaagaaggugguguccagcugggagcuguacaagcgggagggggacgcccgccuguga

SEQ ID NO: 95655 - RNA, 1575 nt, Artificial Sequence
  derived and/or modified CDS sequence (opt1) from glycoprotein__RABV__KJ174668.1
augaucuuccaggcccuccuguucgugccccugcugaucagcucccucugccugggcaaguucccgaucuacaccauccccgacaagaucgggcccuggagccccaucgacauccaccaccuguccugcccgaacaaccucgucguggaggacgagggcugcaccagccuguccggguucagcuacauggagcugaaggugggcuacaucuccgccaucaaggucaacggguucacgugcaccggcguggugaccgaggcggagaccuacacgaacuucgucggcuacgugaccaccaccuucaagcgcaagcacuuccggcccauccccgacgccugccgcgccgccuacaacuggaagaucgccggggacccccgguacgaggagagccuccagaacccguaccccgacuaccacuggcugcgcacggugaagaccaccaaggagucccugaucaucaucagccccuccgucgcggaccucgaccccuacgacaagagccugcacucccggcuguucccgggcgggaagugccucggcaucaccaucagcuccacguacugcagcaccaaccacgacuacaccaucuggaugcccgaggagccccgccuggggaccuccugcgacaucuucacgaacagcaagggcaagaaggccuccaagggcgggaaggugugcggcuucguggacgagcgggggcuguacaagagccucaagggcgccugcaagcugaagcugugcggcgucagcgggcuccgccugauggacggcaccugggugaccauccagaccuccgacgagacgaaguggugcccgcccgaccagcuggugaaccuccacgacuuccacagcgacgagaucgagcaccuggucguggaggagcuggugaagaagcgggaggagugccucgacgcccuggaguccaucaugaccaccaagagcgucuccuuccgccggcugagcuaccuccgcaagcuggugcccggguucggcaaggcguacaccaucuucaacaagacgcugauggaggccgacgcccacuacaaguccgugcggaccuggaacgagaucauccccagcaaggggugccucaaggucuccgaccgcugccacccccacguggacggcguguucuucaacggcaucauccuggggccggacggcaacguccugauccccgagaugcagagcucccuccugcagcagcacauggagcugcucgagagcuccgugaucccccugaugcacccccuggccgacccgagcaccgucuucaaggacggggacgaggccgaggacuucguggaggugcaccuccccgacguccacaagcagaucuccggcguggaccuggggcugcccagcuggggcaaguaccuccugaugaucgcgggcgggcuggccacccucgugcugaucaucuuccugauggccugcugccggcgcacgaagcggaccgagucccgccggcgcggcagcggggaguccggcgagaagguccuggccaccccgcagcccaagaagguggugagcagcugggagcucuacaagcgggagggggacgcccgccuguga

SEQ ID NO: 95656 - RNA, 1575 nt, Artificial Sequence
  derived and/or modified CDS sequence (opt1) from glycoprotein__RABV__KJ174669.1
augaucuuccaggcccuccuguucgugccccugcugaucagcucccucugccugggcaaguucccgaucuacaccauccccgacaagaucgggcccuggagccccaucgacauccaccaccuguccugcccgaacaaccucgucguggaggacgagggcugcaccagccuguccggguucagcuacauggagcugaaggugggcuacaucuccgccaucaaggucaacggguucacgugcaccggcguggugaccgaggcggagaccuacacgaacuucgucggcuacgugaccaccaccuucaagcgcaagcacuuccggcccauccccgacgccugccgcgccgccuacaacuggaagaucgccggggacccccgguacgaggagagccuccagaacccguaccccgacuaccacuggcugcgcacggugaagaccaccaaggagucccugaucaucaucagccccuccgucgcggaccucgaccccuacgacaagagccugcacucccggcuguucccgggcgggaagugccucggcaucaccaucagcuccacguacugcagcaccaaccacgacuacaccaucuggaugcccgaggagccccgccuggggaccuccugcgacaucuucacgaacagcaagggcaagaaggccuccaagggcgggaaggugugcggcuucguggacgagcgggggcuguacaagagccucaagggcgccugcaagcugaagcugugcggcgucagcgggcuccgccugauggacggcaccugggugaccauccagaccuccgacgagacgaaguggugcccgcccgaccagcuggugaaccuccacgacuuccacagcgacgagaucgagcaccuggucguggaggagcuggugaagaagcgggaggagugccucgacgcccuggaguccaucaugaccaccaagagcgucuccuuccgccggcugagcuaccuccgcaagcuggugcccggguucggcaaggcguacaccaucuucaacaagacgcugauggaggccgacgcccacuacaaguccgugcggaccuggaacgagaucauccccagcaaggggugccucaaggucuccgaccgcugccacccccacguggacggcguguucuucaacggcaucauccuggggccggacggcaacguccugauccccgagaugcagagcucccuccugcagcagcacauggagcugcucgagagcuccgugaucccccugaugcacccccuggccgacccgagcaccgucuucaaggacggggacgaggccgaggacuucguggaggugcaccuccccgacguccacaagcagaucuccggcguggaccuggggcugcccagcuggggcaaguaccuccugaugaucgcgggcgggcuggccacccucgugcugaucaucuuccugauggccugcugccggcgcacgaagcgggccgagucccgccggcgcggcagcggggaguccggcgagaagguccuggccaccccgcagcccaagaagguggugagcagcugggagcucuacaagcgggagggggacgcgcgccuguga

SEQ ID NO: 95657 - RNA, 1575 nt, Artificial Sequence; identical to SEQ ID NO: 95655
  derived and/or modified CDS sequence (opt1) from glycoprotein__RABV__KJ174670.1

SEQ ID NO: 95658 - RNA, 1575 nt, Artificial Sequence; identical to SEQ ID NO: 95444
  derived and/or modified CDS sequence (opt1) from glycoprotein__RABV__KJ174671.1

SEQ ID NO: 95659 - RNA, 1575 nt, Artificial Sequence
  derived and/or modified CDS sequence (opt1) from glycoprotein__RABV__KJ174672.1
augaucuuccaggcccugcuguucgugccccugcugaucagcucccucugccugggcaaguucccgaucuacaccauccccgacaagcuggggcccuggagccccaucgacauccaccaccucuccugcccgaacaaccuggucguggaggacgagggcugcaccagccuguccggguucagcuacauggagcucaaggugggcuacaucuccgccaucaaggucaacggguucacgugcaccggcguggugaccgaggcggagaccuacacgaacuucgucggcuacgugaccaccaccuucaagcgcaagcacuuccggcccauccccgacgccugccgcgccgccuacaacuggaagacggccggggacccccgguacgaggagagccugcagaacccguaccccgacuaccacuggcugcgcaccgugaagaccaccaaggagucccucaucaucaucagccccuccgucgcggaccuggaccccuacgacaagagccugcacucccgccucuucccgggcgggaagugccugggcaucacgaucagcuccaccuacugcagcaccaaccacgacuacaccaucuggaugcccgaggagccccggcuggggacguccugcgacaucuucaccaacagcaagggcaagaaggccuccaagggcgggaaggugugcggcuucguggacgagcgggggcucuacaagagccugaagggcgccugcaagcugaagcucugcggcgucagcgggcugcgccugauggacggcaccugggugaccauccagacguccgacgagaccaaguggugcccgcccgaccagcucgugaaccugcacgacuuccacagcgacgagaucgagcaccuggucguggaggagcucgugaagaagcgggaggagugccuggacgcccuggaguccaucaugaccaccaagagcgucuccuuccgccggcucagcuaccugcgcaagcuggugcccggguucggcaaggcguacacgaucuucaacaagacccucauggaggccgacgcccacuacaaguccgugcggaccuggaacgagaucauccccagcaaggggugccugaaggucuccgaccgcugccacccccacguggacggcguguucuucaacggcaucauccuggggccggacggcaacguccucauccccgagaugcagagcucccugcugcagcagcacauggagcuccuggagagcuccgugaucccccugaugcacccccucgccgacccgagcaccgucuucaaggacggggacgaggccgaggacuucguggaggugcaccuccccgacguccacaagcagaucuccggcguggaccuggggcuccccagcuggggcaaguaccugcugaugaucgcgggcgggcucgccacgcuggugcugaucaucuuccugauggccugcugccggcgcaccaagcggaccgagucccgccggcgcggcagcggggaguccggcgagaagguccucgccaccccgcagcccaagaagguggugagcagcugggagcuguacaagcgggagggggacgcccgccuguga

SEQ ID NO: 95660 - RNA, 1575 nt, Artificial Sequence; identical to SEQ ID NO: 95654
  derived and/or modified CDS sequence (opt1) from glycoprotein__RABV__KJ174673.1

SEQ ID NO: 95661 - RNA, 1575 nt, Artificial Sequence
  derived and/or modified CDS sequence (opt1) from glycoprotein__RABV__KJ174674.1
augaucuuccaggcccugcuguucgugccccugcugaucagcucccucugccugggcaaguucccgaucuaccccauccccgacaagcuggggcccuggagcccgaucgacauccaccaccucuccugccccaacaaccuggucggcgaggacgaggggugcaucagccuguccggcuucagcuacauggagcucaaggugggguacaucuccgccaucaaggugaacggcuucacgugcaccggcgucgugacggaggcggagaccuacaccaacuucgugggguacgucaccacgaccuucaagcgcaagcacuuccggcccauccccgacgccugccgcgccgccuacaacuggaagaucgccggcgacccgcgguacgaggagagccugcagaaccccuaccccgacuaccacuggcugcgcaccgugaagaccacgaaggagucccucaucaucaucagccccuccguggcggaccuggacccguacgacaagagccugcacucccgccucuuccccgggggcaagugccuggggaucaccaucagcuccaccuacugcagcaccaaccacgacuacacgaucuggaugcccgaggagccccggcugggcaccuccugcgacaucuucaccaacagcaagggcaagaaggccuccaagggcgggaaggucugcggguucguggacgagcggggccucuacaagagccugaagggcgccugcaagcugaagcucugcggggugagcggccugcgccugauggacgggaccugggucacgauccagaccuccgacgagaccaaguggugcccgcccgaccagcucgugaaccugcacgacuuccacagcgacgagaucgagcaccugguggucgaggagcucgugaagaagcgggaggagugccuggacgcccuggaguccaucaugaccaccaagagcguguccuuccgccggcucagcuaccugcgcaagcugguccccggcuucgggaaggcguacaccaucuucaacaagacccucauggaggccgacgcccacuacaaguccgugcggaccuggaacgagaucauccccagcaagggcugccugaagguguccgaccgcugccacccgcacgucgacggcguguucuucaacgggaucauccugggccccgacgggaacgugcucauccccgagaugcagagcucccugcugcagcagcacauggagcuccuggagagcuccgucaucccccugaugcacccgcucgccgaccccagcacgguguucaaggacggcgacgaggccgaggacuucgucgaggugcaccuccccgacgugcacaagcagaucuccggggucgaccugggccuccccagcuggggcaaguaccugcugaugaucgccgggggccucgcgacccuggugcugaucaucuuccugauggccugcugccggcgcaccaagcggaccgagucccgccggcgcgggagcggcgaguccggggagaaggugcucgccacgccgcagcccaagaaggucgugagcagcugggagcuguacaagcgggagggcgacgcccgccuguga

SEQ ID NO: 95662 - RNA, 1575 nt, Artificial Sequence; identical to SEQ ID NO: 95336
  derived and/or modified CDS sequence (opt1) from glycoprotein__RABV__KJ174675.1

SEQ ID NO: 95663 - RNA, 1575 nt, Artificial Sequence
  derived and/or modified CDS sequence (opt1) from glycoprotein__RABV__KJ174676.1
augaucccccaggcccugcuguucgugccgcugcugaucagcucccucugcuucggccgcuuccccaucuacaccauccccgacaagcuggggcccuggagcccgaucgacauccaccaccuguccugccccaacaaccucgucguggaggacgagggcugcaccagccuguccggguucagcuacauggagcugaaggugggcuacaucuccgccaucaaggucaacggguucacgugcaccggcguggugaccgaggcggagaccuacacgaacuucgucggcuacgugaccaccaccuucaagcggaagcacuuccgccccaugcccgacgccugccggacggccuacaacuggaagaucgccggggacccgcgcuacgaggagagccuccagaaccccuaccccgacuacaacuggcugcggaccgugaagaccaccaaggagucccugaucgucaucagccccuccguggccgaccucgacccguacgacaagagccugcacucccgcguguuccccggcgggaagugccugggcaucacgaucagcuccaccuacugcagcaccaaccacgacuacaccaucuggaugcccgaggaggcgcggcucgggacguccugcgacaucuucaccaacagccgcggcaagcgggccuccaagggcgggaagaccugcggcuucgucgacgagcgcgggcuguacaagagccugaagggcgccugcaagcucaagcugugcggcgugcccgggcugcggcucauggacggcaccugggugacgauccagaccagcgacgagaccaaguggugcccguccgaccagcuggucaaccugcacgacuuccacagcgacgagaucgagcaccucgugguggaggagcuggucaagaagcgcgaggagugccuggacgcccucgaguccaucaugaccaccaagagcguguccuuccggcgccugagccaccuccggaagcucgugcccggguucggcaaggcguacacgaucuucaacaagacccugauggaggccgacgcccacuacaaguccauccgcaccuggaacgaggucauccccagcaaggggugccugaaggugggcggccggugccacccccacguggacggggucuucuucaacggcaucauccucgggccggacggcaacgugcugauccccgagaugcaguccagccugcuccagcagcacgucgagcugcuggaguccagcgugaucccccucaugcacccccuggccgacccguccacgguguucaaggacggggacgaggccgaggacuucgucgaggugcacuuccccgacauccacaagcaggucagcggcguggaccugggccuccccaacugggggaaguaccugcugauguccgcgggcgcccucgccgcccugaugcuggccaucuuccucaugaccugcugccgccgggugaaccgcaccgagagcauccagcgggggcccggcgaguccgggcgcaaggugagcaucaccucccagaacggcaaggucaucagcagcugggagcuguacaaguccggcggggagacgggccuguga

SEQ ID NO: 95664 - RNA, 1575 nt, Artificial Sequence
  derived and/or modified CDS sequence (opt1) from glycoprotein__RABV__KJ174677.1
augaucccccaggcccuccuguucgugccgcugcugaucagcucccucugcuucggcggguuccccaucuacaccauccccgacaagcugggccccuggagcccgaucgacauccaccaccuguccugccccaacaaccucgucguggaggacgaggggugcaccagccuguccggcuucagcuacauggagcugaaggugggguacaucuccgccaucaaggucaacggcuucacgugcaccggcguggugaccgaggcggagaccuacacgaacuucgucggguacgugaccaccaccuucaagcgcaagcacuuccggcccaugcccgacagcugccgcgccgccuacaacuggaagacggccggcgacccgcgguacgaggagucccuccagaaccccuaccccgacuaccacuggcugcgcaccgugaagaccaccaaggagagccugaucaucaucucccccagcgucgccgaccucgacccguacgacaagucccugcacagccggguguuccccgggggcaagugccuggggaucacgguguccagcaccuacugcuccaccaaccacgacuacaccaucuggaugcccgaggaggcgcgccucggcacgagcugcgacaucuucaccaacucccggggcaagcgcgccagcaagggcgggcggaccugcggguucgucgacgagcgcggccuguacaagagccugaagggcgccugcaagcucaagcugugcggggugcugggccuccggcugauggacgggaccugggugacgauccacaccuccaacgagaccaaguggugccccagcgaccagcuggucaaccuccacgacuuccacuccgacgagaucgagcaccuggugguggaggagcuggucaagaagcgcgaggagugccucgacgcccuggagagcaucaugaccacgaaguccgugagcuuccggcgccugucccaccuccggaagcuggugccgggcuucgggaaggcguacaccaucuucaacaagacccugauggaggccgacgcccacuacaagagcauccgcaccuggaacgagaucauccccuccaagggcugccucaaggucggcgggcggugccacccccacguggacggcguguucuucaacgggaucauccugggccccgacgggaacguccugaucccggagaugcagagcucccuccugcagcagcacguggagcugcucgagagcuccgucaucccccugaugcacccccuggccgaccccagcacgguguucaaggacggcgacgaggccgaggacuucguggagguccaccucccggacgugcacaagcaggucuccggcguggaccuggggcugcccaacuggggcaaguaccuccugaugagcgcgggggugcuggccacccucaugcugaccaucuuccugaucacgugcugccgccggguggaccgcaccgaguccauccagcggggccccggggagcugggccgcgaggucagcgugaccucccagaacggcaagguggucagcagcugggagcucuacaaguccgggggcgagacccgccuguga

SEQ ID NO: 95665 - RNA, 1575 nt, Artificial Sequence
  derived and/or modified CDS sequence (opt1) from glycoprotein__RABV__KJ174678.1
augaucccccaggcccuccuguucgugccgcugcugaucagcucccucugcuucggcggguuccccaucuacaccauccccgacaagcugggccccuggagcccgaucgacauccaccaccuguccugccccaacaaccucgucguggaggacgaggggugcaccagccuguccggcuucagcuacauggagcugaaggugggguacaucuccgccaucaaggucaacggcuucacgugcaccggcguggugaccgaggcggagaccuacacgaacuucgucggguacgugaccaccaccuucaagcgcaagcacuuccggcccaugcccgacgccugccgcgccgccuacaacuggaagacggccggcgacccgcgguacgaggagagccuccagaaccccuaccccgacuaccacuggcugcgcaccgugaagaccaccaaggagucccugaucaucaucagccccuccgucgcggaccucgacccguacgacaagagccugcacucccggguguuccccgggggcaagugccuggggaucacggugagcuccaccuacugcagcaccaaccacgacuacaccaucuggaugcccgacgaggcccgccucggcacguccugcgacaucuucaccaacagccggggcaagcgcgccuccaagggcgggcggaccugcggguucgucgacgagcgcggccuguacaagagccugaagggcgccugcaagcucaagcugugcggggugcugggccuccggcugauggacgggaccugggugacgauccagaccagcaacgagaccaaguggugccccuccgaccagcuggucaaccuccacgacuuccacagcgacgagaucgagcaccuggugguggaggagcuggucaagaagcgcgaggagugccucgacgcgcuggaguccaucaugaccaccaagagcguguccuuccggcgccugagccaccuccggaagcuggugccgggcuucgggaaggccuacaccaucuucaacaagacccugauggaggccgacgcccacuacaaguccauccgcaccuggaacgagaucauccccagcaagggcugccucaaggucggcgggcggugccacccccacauggacggcguguucuucaacgggaucauccugggccccgacgggaacgugcugaucccggagaugcaguccagccuccugcagcagcacgucgagcugcucgaguccagcgugaucccccugaugcacccccuggccgaccccuccacggucuucaaggacggcgacgaggcggaggacuucguggaggugcaccucccggacguccacaagcaggucagcggcguggaccuggggcugcccaacuggggcaaguaccuccugauguccgccggggcccuggccacccucaugcugaugaucuuccugaucacgugcugccgccggguggaccgcaccgagagcauccagcggggccccggggagcugggccgcgagguguccgugacgagccagaacggcaaggucaucuccagcugggagcucuacaagagcgggggcgagacccgccuguga

SEQ ID NO: 95666 - RNA, 1575 nt, Artificial Sequence
  derived and/or modified CDS sequence (opt1) from glycoprotein__RABV__KJ174679.1
augaucccccaggcccuguucuucgugccgcuccugaucagcucccugugcgucggcggguuccccaucuacaccauccccgacaagcucggccccuggagcccgaucgacauccaccaccuguccugccccaacaaccuggugguggaggacgaggggugcaccagccucuccggcuucagcuacauggagcugaaggucggguacaucuccgccaucaaggugaacggcuucacgugcaccggcguggucaccgaggcggagaccuacacgaacuucgugggguacgugaccaccaccuucaagcgcaagcacuuccggcccaugcccgacagcugccgcgccgccuacaacuggaagacggccggcgacccgcgguacgaggagucccugcagaaccccuaccccgacuaccacuggcuccgcaccgucaagaccaccaaggagagccugaucaucaucucccccagcguggccgaccuggacccguacgacaagucccuccacagccggguguuccccgggggcaagugccuggggaucacggucuccagcaccuacugcuccaccaaccacgacuacaccaucuggaugcccgaggaggcgcgccugggcacgagcugcgacaucuucaccaacucccggggcaagcgcgccagcaagggcgggcggaccugcggguucguggacgagcgcggccucuacaagagccugaagggcgccugcaagcugaagcucugcggggugcugggccugcggcucauggacgggaccugggucacgauccacaccuccaacgagaccaaguggugccccagcgaccagcuggugaaccugcacgacuuccacuccgacgagaucgagcaccucguggucgaggagcuggugaagaagcgcgaggagugccuggacgcccucgagagcaucaugaccacgaaguccgugagcuuccggcgccugucccaccuccggaagcuggucccgggcuucgggaaggcguacaccaucuucaacaagacccugauggaggccgacgcccacuacaagagcauccgcaccuggaacgagaucauccccuccaagggcugccugaaggugggcgggcggugccacccccacguggacggcgucuucuucaacgggaucauccucggccccgacgggaacgugcugaucccggagaugcagagcucccugcuccagcagcacgucgagcugcuggagagcuccgugaucccccucaugcacccccuggccgaccccagcacgguguucaaggacggcgacgaggccgaggacuucgucgaggugcaccucccggacgugcacaagcaggucuccggcguggaccuggggcugcccaacuggggcaaguaccugcucaugagcgcgggggugcuggccacccugaugcucaccaucuuccugaucacgugcugccgccgggucgaccgcaccgaguccauccagcggggccccggggagcugggccgcgaggugagcgugaccucccagaacggcaaggucaucagcagcugggagcuguacaaguccgggggcgagacccgccucuga

SEQ ID NO: 95667 - RNA, 1575 nt, Artificial Sequence
  derived and/or modified CDS sequence (opt1) from glycoprotein__RABV__KJ174680.1
augaucccccaggcccuccuguucgugccgcugcugaucagcucccucugcuucggcggguuccccaucuacaccauccccgacaagcugggccccuggagcccgaucgacauccaccaccuguccugccccaacaaccucgucguggaggacgaggggugcaccagccuguccggcuucagcuacauggagcugaaggugggguacaucuccgccaucaaggucaacggcuucacgugcaccggcguggugaccgaggcggagaccuacacgaacuucgucggguacgugaccaccaccuucaagcgcaagcacuuccggcccaugcccgacgccugccgcgccgccuacaacuggaagacggccggcgacccgcgguacgaggagagccuccagaaccccuaccccgacuaccacuggcugcgcaccgugaagaccaccaaggagucccugaucaucaucagccccuccgucgcggaccucgacccguacgacaagagccugcacucccggguguuccccgggggcaagugccuggggaucacggugagcuccaccuacugcagcaccaaccacgacuacaccaucuggaugcccgaggaggcccgccucggcacguccugcgacaucuucaccaacagccggggcaagcgcgccuccaagggcgggcggaccugcggguucgucgacgagcgcggccuguacaagagccugaagggcgccugcaagcucaagcugugcggggugcugggccuccggcugauggacgggaccugggugacgauccagaccagcaacgagaccaaguggugccccuccgaccagcuggucaaccuccacgacuuccacagcgacgagaucgagcaccuggugguggaggagcuggucaagaagcgcgaggagugccucgacgcgcuggaguccaucaugaccaccaagagcguguccuuccggcgccugagccaccuccggaagcuggugccgggcuucgggaaggccuacaccaucuucaacaagacccugauggaggccgacgcccacuacaaguccauccgcaccuggaacgagaucauccccagcaagggcugccucaaggucggcgggcggugccacccccacguggacggcguguucuucaacgggaucauccugggccccgacgggaacguccugaucccggagaugcaguccagccuccugcagcagcacguggagcugcucgaguccagcgucaucccccugaugcacccccuggccgaccccuccacgguguucaaggacggcgacgaggcggaggacuucguggagguccaccucccggacgugcacaagcaggucagcggcguggaccuggggcugcccaacuggggcaaguaccuccugauguccgccggggcccuggccacccucaugcugaugaucuuccugaucacgugcugccgccggguggaccgcaccgagagcauccagcggggccccggggagcugggccgcgagguguccgucacgagccagaacggcaaggugaucuccagcugggagcucuacaagagcgggggcgagacccgccuguga

SEQ ID NO: 95668 - RNA, 1575 nt, Artificial Sequence
  derived and/or modified CDS sequence (opt1) from glycoprotein__RABV__KJ174681.1
augaucccccaggcccuccuguucgugccgcugcugaucagcucccucugcuucggcggguuccccaucuacaccauccccgacaagcugggccccuggagcccgaucgacauccaccaccuguccugccccaacaaccucgucguggaggacgaggggugcaccagccuguccggcuucagcuacauggagcugaaggugggguacaucuccgccaucaaggucaacggcuucacgugcaccggcguggugaccgaggcggagaccuacacgaacuucgucggguacgugaccaccaccuucaagcgcaagcacuuccggcccaugcccgacagcugccgcgccgccuacaacuggaagacggccggcgacccgcgguacgaggagucccuccagaaccccuaccccgacuaccacuggcugcgcaccgugaagaccaccaaggagagccugaucaucaucucccccagcgucgccgaccucgacccguacgacaagucccugcacagccggguguuccccgggggcaagugccuggggaucacgguguccagcaccuacugcuccaccaaccacgacuacaccaucuggaugcccgaggaggcgcgccucggcacgagcugcgacaucuucaccaacucccggggcaagcgcgccagcaagggcgggcggaccugcggguucgucgacgagcgcggccuguacaagagccugaagggcgccugcaagcucaagcugugcggggugcugggccuccggcugauggacgggaccugggugacgauccacaccuccaacgagaccaaguggugccccagcgaccagcuggucaaccuccacgacuuccacuccgacgagaucgagcaccuggugguggaggagcuggucaagaagcgcgaggagugccucgacgcccuggagagcaucaugaccacgaaguccgugagcuuccggcgccugucccaccuccggaagcuggugccgggcuucgggaaggcguacaccaucuucaacaagacccugauggaggccgacgcccacuacaagagcauccgcaccuggaacgagaucauccccuccaagggcugccucaaggucggcgggcggugccacccccacguggacggcguguucuucaacgggaucauccugggccccgacgggaacguccugaucccggagaugcagagcucccuccugcagcagcacguggagcugcucgagagcuccgucaucccccugaugcacccccuggccgaccccagcacgguguucaaggacggcgacgaggccgaggacuucguggagguccaccucccggacgugcacaagcaggucuccggcguggaccuggggcugcccaacuggggcaaguaccuccuggugagcgcgggggugcuggccacccucaugcugaccaucuuccugaucacgugcugccgccgggucgaccgcaccgaguccauccagcggggccccggggagcugggccgcaaggugagcgugaccucccagaacggcaaggucaucagcagcugggagcucuacaaguccgggggcgagacccgccuguga

SEQ ID NO: 95669 - RNA, 1575 nt, Artificial Sequence
  derived and/or modified CDS sequence (opt1) from glycoprotein__RABV__KJ174682.1
augaucgcccaggcccugcuguucgugccccugcugaucagcccgcucugcuucggcaaguuccccaucuacaccauccccgacaagcuggggcccugguccccgaucgacauccaccaccugagcugccccaacaaccucgucguggaggacgaggagugcaccucccugagcggcuucuccuacauggagcugaaggugggguacaucagcgcgaucaaggucaacggcuucacgugcaccgggguggugaccgaggccgagaccuacacgaacuucgucggcuacgugaccaccaccuucaagcgcaagcacuuccggcccacgcccgacgccugccgcgccgccuacaacuggaagauggcgggcgacccgcgguacgaggagucccuccacaaccccuaccccgacuaccacuggcugcgcaccgugaagaccaccaaggagagccugaucaucaucucccccagcgucgccgaccucgacccguacgacaagucccugcacagccggguguuccccgggggcaagugccuggggaucacgaucuccagcaccuacugcuccaccaaccacgacuacaccaucuggaugcccgaggaggcccgccucggcacgagcugcgacaucuucgccaacucccgggggaagcgcgcgagcaagggcggccggaccugcggguucguggacgagcgcggccuguacaagucccugaagggggccugcaagcucaagcugugcggcguccccggccugcggcucauggacgggaccugggugaccauccagacgagcaacgagaccaaguggugcccgcccgaccgccuggugaaccugcacgacuuccacagcgacgagaucgagcaccucgucguggaggagcuggugaagaagcgggaggagugccuggacgcccucgaguccaucaugaccaccaagagcgucuccuuccgccggcugagcuaccugcgcaagcucgugcccggcuucgggaaggccuacacgaucuucaacaagacccugauggaggccgacgcgcacuacaaguccgugcggaccuggaacgagaucauccccagcaagggcugccugaaggucgggggccgcugccacccgcacguggacggcguguucuucaacgggaucauccucggccccgacgggaacguccugauccccgagaugcaguccagccugcuccagcagcacauggagcugcuggaguccagcgugaucccccucaugcacccgcuggccgaccccuccaccgucuucaaggacggcgacgaggccgaggacuucguggaggugcaccuccccgacauccacaagcaggucagcgggguggaccucggccugcccgacuggggcaaguaccugcucauguccgccggggcccuggcgacgcugaugcucaccaucuuccugaugaccugcugccggcgcgccaaccggaccgagagcauccagcgcggcccgggggaguccggccgcaaggugagcgucacgccccagaacgggaaggugaucuccagcugggagcuguacaaguccggcggcgagaccaagcuguga

SEQ ID NO: 95670 - RNA, 1575 nt, Artificial Sequence
  derived and/or modified CDS sequence (opt1) from glycoprotein__RABV__KJ174683.1
augaucgcccaggcccuccuguucgugccccugcugaucagcccgcucugccugggcaaguuccccaucuacaccauccccgacaagcuggggcccugguccccgaucgacauccaccaccucagcugccccaacaaccuggucguggaggacgaggagugcaccucccugagcggcuucuccuacauggagcucaaggugggguacaucagcgcgaucaaggucaacggcuucacgugcaccgggguggugaccgaggccgagaccuacacgaacuucgucggcuacgugaccaccaccuucaagcgcaagcacuuccggcccacgcccgacgccugccgcgccgccuacaacuggaagauggcgggcgacccgcgguacgaggagucccugcacaaccccuaccccgacuaccacuggcugcgcaccgugaagaccaccaaggagagccucaucaucaucucccccagcgucgccgaccuggacccguacgacaagucccugcacagccggguguuccccgggggcaagugccucgggaucacgaucuccagcaccuacugcuccaccaaccacgacuacaccaucuggaugcccgaggaggcccgccugggcacgagcugcgacaucuucgccaacucccgggggaagcgcgcgagcaagggcggccggaccugcggguucguggacgagcgcggccuguacaagucccucaagggggccugcaagcugaagcugugcggcguccccggccuccggcugauggacgggaccugggugaccauccagacgagcaacgagaccaaguggugcccgcccgaccgccuggugaaccuccacgacuuccacagcgacgagaucgagcaccuggucguggaggagcuggugaagaagcgggaggagugccucgacgcccuggaguccaucaugaccaccaagagcgucuccuuccgccggcugagcuaccuccgcaagcuggugcccggcuucgggaaggccuacacgaucuucaacaagacccugauggaggccgacgcgcacuacaaguccgugcggaccuggaacgagaucauccccagcaagggcugccucaaggucgggggccgcugccacccgcacguggacggcguguucuucaacgggaucauccugggccccgacgggaacguccugauccccgagaugcaguccagccuccugcagcagcacauggagcugcucgaguccagcgugaucccccugaugcacccgcuggccgaccccuccaccgucuucaaggacggcgacgaggccgaggacuucguggaggugcaccuccccgacauccacaagcaggucagcgggguggaccugggccugcccgacuggggcaaguaccuccugauguccgccggggcccuggcgacgcucaugcugaccaucuuccugaugaccugcugccggcgcgccaaccggaccgagagcauccagcgcggcccgggggaguccggccgcaaggugagcgucacgccccagaacgggaaggugaucuccagcugggagcuguacaaguccggcggcgagaccaagcucuga

SEQ ID NO: 95671 - RNA, 1575 nt, Artificial Sequence
  derived and/or modified CDS sequence (opt1) from glycoprotein__RABV__KJ466147.1
augaucccccaggcccugcuguucgugccgcugcuggucuucccccucugcuucggcaaguuccccaucuacaccauccccgacaagcuggggccguggagccccaucgacauccaccaccuguccugccccaacaaccucgugguggaggacgagggcugcaccaaccugagcggguucuccuacauggagcugaaggucggcuacaucagcgccaucaaggugaacggguucacgugcaccggcguggucaccgaggcggagaccuacacgaacuucgugggcuacgugaccaccaccuucaagcgcaagcacuuccggcccacgccggacgccugccgcuccgccuacaacuggaagauggccggggacccccgguacgaggagagccuccacaaccccuaccccgacuaccacuggcugcgcaccgucaagaccaccaaggaguccguggugaucaucagcccguccgucgccgaccuggaccccuacgacgagagccuccacucccggguguucccccgcggcaagugcagcgggaucacgguguccagcgcguacugcuccaccaaccacgacuacaccaucuggaugcccgagaacccgcggcugggcaccagcugcgacaucuucacgaacucccgcgggaagcgggccagcaagggcuccaagaccugcggcuucgucgacgagcgcgggcuguacaagagccucaagggcgccugcaagcugaagcugugcggggugcucggccugcggcugauggacggcaccuggguggccauccagaccagcaacgagacgaaguggugcccgcccgaccagcucgucaaccugcacgacuuccacuccgacgagaucgagcaccuggugguggaggagcucgucaagaagcgcgaggagugccuggacgcgcuggagagcaucaugaccaccaaguccgugagcuuccggcgccucucccaccuccggaagcuggugcccggguucggcaaggccuacaccaucuucaacaagacgcucauggaggccgacgcccacuacaagagcguccagaccuggaacgagaucauccccuccaaggggugccugcgcgugggcgggcggugccacccccacgucaacggcguguucuucaacggcaucauccuggggcccgacggccacgugcucauccccgagaugcagagcucccugcugcagcagcacauggagcuccucaagagcuccgucaucccgcugaugcacccccuggccgaccccagcaccguguucaaggacggggacgagguggaggacuucgucgaggugcaccuccaggacgugcacaagcaggucuccggcguggaccuggggcugcccaacuggggcaaggacgugcugaugggcgcggggguccugaccgcccucaugcugaugaucuuccugaugacgugcugccgccggaccaaccgcgccgagagcauccagcacucccucggcgagaccgggcggaaggugagcgugaccccgcaguccggccgcgucaucagcuccugggagagcuacaagagcgggggcgagacgaagcuguga

SEQ ID NO: 95672 - RNA, 1575 nt, Artificial Sequence
  derived and/or modified CDS sequence (opt1) from glycoprotein__RABV__KJ476819.1
auggugccccaggcccugcuccuggucccccugcucguguucagcaugugcuucggcaaguuccccaucuacaccauccccgacaagcuggggcccugguccccgaucgacauccaccaccugagcugccccaacaaccucguggucgaggacgagggcugcaccaaccuguccggguucagcuacauggagcugaaggugggccacaucuccgccaucaaggugaacggguucacgugcaccggcgucgugaccgaggcggagaccuacacgaacuucgugggcuacgucaccaccaccuucaagcgcaagcacuuccggcccacgcccgacgccugccgcgccgccuacaacuggaagauggccggggacccgcgguacgaggagagccuccacaaccccuaccccgacuaccacuggcugcgcaccgugaagaccaccaaggagucccuggugaucaucagccccuccgucgcggaccucgacccguacgacaagagccugcacucccggguguuccccaacggcaagugcagcgggaucacgaucuccagcaccuacugccccaccaaccacgacuacaccaucuggcugcccgagaacccgcgccucggcacguccugcgacaucuucaccaacagccgggggaagcgcgccuccaagggcagcaagaccugcggcuucguggacgagcgggggcuguacaagucccugaagggcgccugcaagcucaagcugugcgggguccugggccuccgccugauggacggcaccuggguggccaugcaggcgagcgacgagacgaaguggugcccgcccgaccagcuggugaaccuccacgacuuccggagcgacgagaucgagcaccuggucguggaggagcuggugaagaagcgcgaggagugccucgacgcccuggaguccaucaugaccaccaagagcgucuccuuccggcgccugagccaccuccggaagcuggugcccggguucggcaaggccuacaccaucuucaacaagacgcugauggaggccgacgcccacuacaaguccgugcgcaccuggaacgagaucauccccagcaaggggugccuccgggucggcgggcgcugccacccccacgugaacggcgucuucuucaacggcaucauccuggggcccgacggccacgugcugauccccgagaugcaguccagccuccugcagcagcacauggagcugcucgaguccagcgugaucccgcugaugcacccccuggcggaccccuccaccgucuucaaggacggggacgaggccgagaacuucguggaggugcaccuccccgacguccacaagcagaucagcggcguggaccuggggcugccgaacuggggcaaguacgugcucgucuccgccggcgugcugaucgcccugaugcucaucaucuuccugaugaccugcugcgggcgggugaaccgccccaagagcacgcagcacaaccugggcgggaccggccgggaggucuccgugaccccgcagagcgggaaggugaucuccagcugggaguccuacaagagcggcggcgagacccgccuguga

SEQ ID NO: 95673 - RNA, 1575 nt, Artificial Sequence
  derived and/or modified CDS sequence (opt1) from glycoprotein__RABV__KJ476820.1
auggugccccaggcccugcuguucgucccgcugcugguguucagcaugugcuucggcaaguuccccaucuacaccauccccgacaagcucgggcccugguccccgaucgacauccaccaccugagcugccccaacaaccugguggucgaggacgagggcugcaccaaccucuccggguucagcuacauggagcugaaggugggcuacaucuccgccaucaaggugaacggguucacgugcaccggcgucgugaccgaggcggagaccuacacgaacuucgugggcuacgucaccaccaccuucaagcgcaagcacuuccggcccacgcccgacgccugccgcaccgccuacaacuggaagauggccggggacccgcgguacgaggagagccugcacaaccccuaccccgacuaccacuggcuccgcaccgugaagaccacgaaggagucccuggugaucaucagccccuccgucgccgaccuggacccguacgacaagagccuccacucccggguguuccccaacggcaagugcagcgggaucaccaucuccagcaccuacugccccaccaaccacgacuacacgaucuggcugcccgagaacccgcgccugggcaccuccugcgacaucuucaccaacagccgggggaagcgcgcguccaagggcagcaagaccugcggcuucguggacgagcgggggcucuacaagucccugaagggcgccugcaagcugaagcucugcgggguccugggccugcgccucauggacggcacguggguggccaugcaggccagcgacgagaccaaguggugcccgcccgaccagcuggugaaccugcacgacuuccggagcgacgagaucgagcaccucgucguggaggagcuggugaagaagcgcgaggagugccuggacgcgcucgaguccaucaugaccaccaagagcgucuccuuccggcgccugagccaccuccggaagcucgugcccggguucggcaaggccuacacgaucuucaacaagacccugauggaggccgacgcccacuacaaguccgugcgcaccuggaacgagaucauccccagcaaggggugccugcgggucggcgggcgcugccacccccacgugaacggcgucuucuucaacggcaucauccucgggcccgacggccacgugcugauccccgagaugcaguccagccugcuccagcagcacauggagcugcuggaguccagcgugaucccgcucaugcacccccuggccgaccccuccaccgucuucaaggacggggacgaggcggagaacuucguggaggugcaccuccccgacguccacaagcagaucagcggcguggaccuggggcugccgaacuggggcaaguacgugcuggucuccgccggcgugcucaucgcccugaugcugaucaucuuccucaugacgugcugcgggcgggugaaccgccccaagagcacccagcacaaccugggcgggaccggccgggaggucuccgugacgccccagagcgggaaggugaucuccagcugggaguccuacaagagcggcggcgagacccgccuguga

SEQ ID NO: 95674 - RNA, 1575 nt, Artificial Sequence
  derived and/or modified CDS sequence (opt1) from glycoprotein__RABV__KJ564280.1
auggugccccaggcccugcuguucgucccgcugcugguguucagcuccugcuucggcaaguuccccaucuacaccauccccgacaagcucgggcccuggagcccgaucgacauccaccaccuguccugccccaacaaccugguggucgaggacgagggcugcaccaaccucagcggguucuccuacauggagcugaaggugggcuacaucagcgccaucaaggugaacggguucacgugcaccggcgucgugaccgaggcggagaccuacacgaacuucgugggcuacgucaccaccaccuucaagcgcaagcacuuccggcccaugcccgacgccugccgcgccgccuacaacuggaagauggccggggacccgcgguacgaggagucccugcacaaccccuaccccgacuaccacuggcuccgcacggugaagaccaccaaggagagccuggugaucaucucccccagcgucgcggaccuggacccguacgacaagucccuccacagccggguguuccccggcgggaagugcuccggcaucaccgugagcuccacgugcugcagcaccaaccacgacuacaccaucuggaugcccgagaacccccgccuggggaccuccugcgacaucuucacgaacagccggggcaagcgcgccuccaagggcgggaagaccugcggcuucgucgacgagcgggggcuguacaagagccucaagggcgccugcaagcugaagcugugcggcgugcucgggcugcgccugauggacggcaccuggguggccauccagaccagcgacgagaucaaguggugcuccccggaccagcucgucaaccugcacgacuuccacagcgacgagaucgagcaccuggugguggaggagcucgucaagaagcgggaggagugccuggacgcgcuggagacgaucaugaccaccaaguccgugagcuuccgccggcucucccaccuccgcaagcuggugcccggguucggcaaggccuacaccaucuucaacaagacgcucauggaggccgacgcccacuacaagagcauccggaccuggaacgagaccauccccuccaaggggugccugcgcgucggcggccggugccacccccacgugaacggggucuucuucaacggcaucauccuggggccggacggccacgugcucauccccgagaugcagagcucccugcugcaccagcacauggagcuccuggagagcuccgugaucccccugaugcacccccucgccgacccgagcaccgucuucaaggacggggacgaggcggaggacuucguggaggugcaccuccccgacguccacaagcagaucuccggcguggaccugggccugcccaacugggggaaguacgugcugaucagcgccggcgcccugacggcccucaugcugaccaucuuccugaugaccugcugccgcaagaccaaccgggccggguccauccagcacagccccggcgagacggggcgcaaggucuccgugaccagccacaacggccgggugaucuccagcugggagagcuacaaguccggcggggagaccggccucuga

SEQ ID NO: 95675 - RNA, 1575 nt, Artificial Sequence
  derived and/or modified CDS sequence (opt1) from glycoprotein__RABV__KM016899.1
auggugccccuggucccccucuucgugccccugcugguguucccccucugcagcggcaaguuccccaucuacaccaucccggacaagcuggggcccuggucccccaucgacauccaccaccugagcugccccaacaaccucgucguggaggacgagggcugcgccaaccuguccggguucagcuacauggagcugaaggugggcuacaucuccgccaucaaggucaacggguucacgugcaccggcguggugaccgaggcggagaccuacaccaacuucgucggcuacgugacgaccaccuuccgccggaagcacuuccgcccgacccccgacgccugccgggccgccuacaacuggaagauggccggggacccccgcuacgaggagagccuccacaaccccuacccggacuaccacuggcugcggacggugaagaccaccaaggagucccuggucaucaucagccccuccguggcggaccucgaccccuacgacaagagccugcacucccgcguguuccccagcggcaagugcuccgggaucaccgucagcuccacguacugcagcaccaaccacgacuacaccaucuggaugccggagaaccugcggcucggcaccuccugcgacaucuucacgaacagccgcgggaagcgggccuccaagggcagcaagaccugcggcuucguggacgagcgcgggcuguacaagagccugaagggcgccugcaagcucaagcugugcggggugcugggccuccggcugauggacggcaccugggucgccaugcagaccuccggggagacgaaguggugcccgcccgaccagcuggugaaccuccacgacuuccgcagcgacgagaucgagcaccugguggucgaggagcuggugaagaagcgggaggagugccucgacgcgcuggaguccaucaugaccaccaagagcguguccuuccgccggcugagccaccuccgcaagcugguccccggcuucgggaaggccuacaccaucuucaacaagacgcugauggaggccgacgcccacuacaaguccgugcggaccuggaacgagaucaucccgagcaagggcugccuccgcgucgggggccggugccacccccacgugaacggcguguucuucaacgggaucauccugggccccgacgggcacguccugauccccgagaugcaguccagccuccugcagcagcacauggagcugcucgaguccagcgugaucccgcugaugcacccccuggccgaccccuccaccguguucaaggacggcgacgaggcggaggacuucgucgaggugcaccuccccgacgugcacaagcaggucagcgggguggaccugggccugccgaacuggggcaaguacauccuccuguccgccggggcccugaucgcccucaugcugaugaucuuccugaugaccugcugccgcaaguucaaccggcccgagagcacgcagcgcucccugggcgggaccggccgcaaggugagcaucaccucccagggcgggaaggucaucagcagcugggaguccuacaagagcggcggggagacccggcucuga

SEQ ID NO: 95676 - RNA, 1575 nt, Artificial Sequence; identical to SEQ ID NO: 94980
  derived and/or modified CDS sequence (opt1) from glycoprotein__RABV__KM093868.1

SEQ ID NO: 95677 - RNA, 1575 nt, Artificial Sequence
  derived and/or modified CDS sequence (opt1) from glycoprotein__RABV__KM278992.1
auggugccccagguccugcuguucgugccgcugcugguguucagcaugugcuucggcaaguuccccaucuacaccauccccgacaagcucgggcccugguccccgaucgacauccaccaccugagcugccccaacaaccuggucguggaggacgagggcugcaccaaccucuccggguucagcuacauggagcugaaggugggcuacaucuccgccaucaaggucaacggguucacgugcaccggcguggugaccgaggccgagaccuacacgaacuucgucggcuacgugaccaccaccuucaagcgcaagcacuuccggcccacgcccgacgcgugccgcgccgccuacaacuggaagauggccggggacccgcgguacgaggagagccugcacaaccccuaccccgacuaccacuggcuccgcaccgugaagaccaccaaggagucccuggucaucaucagccccuccgugacggaccuggacccguacgacaagagccuccacucccggguguuccccagcggcaagugccuggggaucaccaucuccagcaccuacugcuccaccaaccacgacuacacgaucuggaugcccgagaacccccgccugggcaccagcugcgacaucuucaccaacucccgggggaagcgcgccagcaagggcggcaagaccugcggguucgucgacgagcggggccucuacaagucccugaagggggcgugcaagcugaagcucugcggcgugcugggccugcgccucauggacgggacguggguggccaugcaggccagcgacgagaccaaguggugcccgcccgaccagcuggucaaccugcacgacuuccggagcgacgagaucgagcaccucgugguggaggagcuggucaagaagcgcgaggagugccuggacgcccucgaguccaucaugaccaccaagagcguguccuuccggcgccugagccaccuccggaagcucgugcccggcuucgggaaggcguacacgaucuucaacaagacccugauggaggccgacgcccacuacaaguccguccgcaccuggaacgagaucauccccagcaagggcugccugcgggucgggggccgcugccacccgcacgugaagggcguguucuucaacgggaucauccucggccccgacgggcacgugcugauccccgagaugcaguccagccugcuccagcagcacauggagcugcuggaguccagcgucaucccccucaugcacccgcuggccgaccccuccaccguguucaaggacggcgacgaggccgaggacuucguggagguccaccuccccgacgugcacaagcaggucagcgggguggaccugggccugcccuccuggggcaaguacgugcuggugagcgcggggguccucguggugcugaugcugacgaucuucaucaucacgugcugcggccggguccaccgcccgaaguccacccagcacagccucgggggcaccgggcggaagguguccgugaccagccaguccggcaaggucaucagcagcugggaguccuacaagagcggcggggagacccgccuguga

SEQ ID NO: 95678 - RNA, 1575 nt, Artificial Sequence; identical to SEQ ID NO: 95677
  derived and/or modified CDS sequence (opt1) from glycoprotein__RABV__KM278993.1

SEQ ID NO: 95679 - RNA, 1575 nt, Artificial Sequence
  derived and/or modified CDS sequence (opt1) from glycoprotein__RABV__KM408747.1
auggugccccagguccugcuguucgugccgcugcugguguucagcaugugcuucggcaaguuccccaucuacaccauccccgacaagcucgggcccugguccccgaucgacauccaccaccugagcugccccaacaaccuggucguggaggacgagggcugcaccaaccucuccggguucagcuacauggagcugaaggugggcuacaucuccgccaucaaggucaacggguucacgugcaccggcguggugaccgaggccgagaccuacacgaacuucgucggcuacgugaccaccaccuucaagcgcaagcacuuccggcccacgcccgacgcgugccgcgccgccuacaacuggaagauggccggggacccgcgguacgaggagagccugcacaaccccuaccccgacuaccacuggcuccgcaccgugaagaccaccaaggagucccuggucaucaucagccccuccguggccgaccuggacccguacgacaagagccuccacucccggguguuccccagcggcaagugcuccgggaucacgaucagcuccaccuacugcagcaccaaccacgacuacaccaucuggaugcccgagaacccccgccugggcacguccugcgacaucuucaccaacagccgggggaagcgcgcguccaagggcggcaagaccugcggguucgucgacgagcggggccuguacaagagccucaagggggccugcaagcugaagcugugcggcgugcucggccugcgccugauggacgggaccuggguggccaugcagacgagcgacgagaccaaguggugcccgcccgaccagcucgucaaccugcacgacuuccgguccgacgagaucgagcaccuggugguggaggagcucgucaagaagcgcgaggagugccuggacgcccuggagagcaucaugaccaccaaguccgugagcuuccggcgccucucccaccuccggaagcuggugcccggcuucgggaaggcguacacgaucuucaacaagacccucauggaggccgacgcccacuacaagagcguccgcaccuggaacgagaucauccccuccaagggcugccugcgggucgggggccgcugccacccgcacgugaagggcguguucuucaacgggaucauccugggccccgacgggcacgugcucauccccgagaugcagagcucccugcugcagcagcacauggagcuccuggagagcuccgucaucccccugaugcacccgcucgccgaccccagcaccguguucaaggagggcgacgaggccgaggacuucguggagguccaccuccccgacgugcacaagcagaucuccgggguggaccugggccugcccagcuggggcaaguacguccugguguccgcgggggugcuggucgugcucaugcugacgaucuucaucaucacgugcugcggccggauccaccgcccgaaguucacccagcacgggcugggcgggaccggccggaaggugagcgucaccucccagagcggcaaggugaucuccagcugggagagcuacaaguccgggggcgagacccgccucuga

SEQ ID NO: 95680 - RNA, 1575 nt, Artificial Sequence
  derived and/or modified CDS sequence (opt1) from glycoprotein__RABV__KM492745.1
auggugccgcagguccugcuguucgugccgcugcugguguucagcaugugcuucggcaaguuccccaucuacaccauccccgacaagcucgggcccugguccccgaucgacauccaccaccugagcugccccaacaaccuggucguggaggacgagggcugcaccaaccucuccggguucagcuacauggagcugaaggugggcuacaucuccgccaucaaggucaacggguucacgugcaccggcguggugaccgaggccgagaccuacacgaacuucgucggcuacgugaccaccaccuucaagcgcaagcacuuccggcccacgcccgacgcgugccgcgccgccuacaacuggaagauggccggggacccgcgguacgaggagagccugcacaaccccuaccccgacuaccacuggcuccgcaccgugaagaccaccaaggagucccuggucaucaucagccccuccguggccgaccuggacccguacgacaagagccuccacucccggguguuccccagcggcaagugcuccgggaucacgaucagcuccaccuacugcagcaccaaccacgacuacaccaucuggaugcccgagaacccccgccugggcacguccugcgacaucuucaccaacagccgggggaagcgcgcguccaagggcggcaagaccugcggguucgucgacgagcggggccuguacaagagccucaagggggccugcaagcugaagcugugcggcgugcucggccugcgccugauggacgggaccuggguggccaugcagacgagcgacgagaccaaguggugcccgcccgaccagcucgucaaccugcacgacuuccgguccgacgagaucgagcaccuggugguggaggagcucgucaagaagcgcgaggagugccuggacgcccuggagagcaucaugaccaccaaguccgugagcuuccggcgccucucccaccuccggaagcuggugcccggcuucgggaaggcguacacgaucuucaacaagacccucauggaggccgacgcccacuacaagagcguccgcaccuggaacgagaucauccccuccaagggcugccugcgggucgggggccgcugccacccgcacgugaagggcguguucuucaacgggaucauccugggccccgacgggcacgugcucauccccgagaugcagagcucccugcugcagcagcacauggagcuccuggagagcuccgucaucccccugaugcacccgcucgccgaccccagcaccguguucaaggacggcgacgaggccgaggacuucguggagguccaccuccccgacgugcacaagcagaucuccgggguggaccugggccugcccagcuggggcaaguacguccugguguccgcgggggugcuggucgugcucaugcugacgaccuucaucaucacgugcugcggccggauccgccggcccaagagcacccagcacgggcugggcgggaccggccgcaagguguccgucaccagccaguccggcaaggugaucagcagcugggaguccuacaagagcgggggcgagacccgccucuga

SEQ ID NO: 95681 - RNA, 1575 nt, Artificial Sequence; identical to SEQ ID NO: 95154
  derived and/or modified CDS sequence (opt1) from glycoprotein__RABV__KM492746.1

SEQ ID NO: 95682 - RNA, 1575 nt, Artificial Sequence
  derived and/or modified CDS sequence (opt1) from glycoprotein__RABV__KM492747.1
auggugccgcagguccugcuguucgugccgcugcugguguucagcaugugcuucggcaaguuccccaucuacaccauccccgacaagcucgggcccugguccccgaucgacauccaccaccugagcugccccaacaaccuggucguggaggacgagggcugcaccaaccucuccggguucagcuacauggagcugaaggugggcuacaucuccgccaucaaggucaacggguucacgugcaccggcguggugaccgaggccgagaccuacacgaacuucgucggcuacgugaccaccaccuucaagcgcaagcacuuccggcccacgcccgacgcgugccgcgccgccuacaacuggaagauggccggggacccgcgguacgaggagagccugcacaaccccuaccccgacuaccacuggcuccgcaccgugaagaccaccaaggagucccuggucaucaucagccccuccguggccgaccuggacccguacgacaagagccuccacucccggguguuccccagcggcaagugcuccgggaucacgaucagcuccaccuacugcagcaccaaccacgacuacaccaucuggaugcccgagaacccccgccugggcacguccugcgacaucuucaccaacagccgggggaagcgcgcguccaagggcggcaagaccugcggguucgucgacgagcggggccuguacaagagccucaagggggccugcaagcugaagcugugcggcgugcucggccugcgccugauggacgggaccuggguggccaugcagacgagcgacgagaccaaguggugcccgcccgaccagcucgucaaccugcacgacuuccgguccgacgagaucgagcaccuggugguggaggagcucgucaagaagcgcgaggagugccuggacgcccuggagagcaucaugaccaccaaguccgugagcuuccggcgccucucccaccuccggaagcuggugcccggcuucgggaaggcguacacgaucuucaacaagacccucauggaggccgacgcccacuacaagagcguccgcaccuggaacgagaucauccccuccaagggcugccugcgggucgggggccgcugccacccgcacgugaacggcguguucuucaacgggaucauccugggccccgacgggcacgugcucauccccgagaugcagagcucccugcugcagcagcacauggagcuccuggagagcuccgucaucccccugaugcacccgcucgccgaccccagcaccguguucaaggacggcgacgaggccgaggacuucguggagguccaccuccccgacgugcacaagcagaucuccgggguggaccugggccugcccagcuggggcaaguacguccugguguccgcgggggugcuggucgugcucaugcugacgaucuucaucaugaccugcugcggccgggugcgccggcccaagagcacccagcacggguucggcgggaccggccgcaaggucuccgugacgagccaguccggcaaggugaucagcagcugggaguccuacaagagcgggggcgagacccgccuguga

SEQ ID NO: 95683 - RNA, 1575 nt, Artificial Sequence
  derived and/or modified CDS sequence (opt1) from glycoprotein__RABV__KM492748.1
auggugccgcagguccugcuccuggugccgcugcucguguucagcaugugcuucggcaaguuccccaucuacaccauccccgacaagcuggggcccugguccccgaucgacauccaccaccugagcugccccaacaaccucgucguggaggacgagggcugcaccaaccuguccggguucagcuacauggagcugaaggugggcuacaucuccgccaucaaggucaacggguucacgugcaccggcguggugaccgaggccgagaccuacacgaacuucgucggcuacgugaccaccaccuucaagcgcaagcacuuccggcccacgcccgacgcgugccgcgccgccuacaacuggaagauggccggggacccgcgguacgaggagagccuccacaaccccuaccccgacuaccacuggcugcgcaccgugaagaccaccaaggagucccuggucaucaucagccccuccguggccgaccucgacccguacgacaagagccugcacucccggguguuccccagcggcaagugcuccgggaucacgaucagcuccaccuacugcagcaccaaccacgacuacaccaucuggaugcccgagaacccccgccugggcacguccugcgacaucuucaccaacagccgggggaagcgcgcguccaagggcggcaagaccugcggguucgucgacgagcggggccucuacaagagccugaagggggccugcaagcugaagcucugcggcgugcugggccugcgccucauggacgggaccuggguggccaugcagacgagcgacgagaccaaguggugcccgcccgaccagcuggucaaccugcacgacuuccgguccgacgagaucgagcaccucgugguggaggagcuggucaagaagcgcgaggagugccuggacgcccucgagagcaucaugaccaccaaguccgugagcuuccggcgccugucccaccuccggaagcuggugcccggcuucgggaaggcguacacgaucuucaacaagacccugauggaggccgacgcccacuacaagagcguccgcaccuggaacgagaucauccccuccaagggcugccugcgggucgggggccgcugccacccgcacgugaacggcguguucuucaacgggaucauccucggccccgacgggcacgugcugauccccgagaugcagagcucccugcuccagcagcacauggagcugcuggagagcuccgucaucccccucaugcacccgcuggccgaccccagcaccguguucaaggacggcgacgaggccgaggacuucguggagguccaccuccccgacgugcacaagcagaucuccgggguggaccugggccugcccagcuggggcaaguacguccugguguccgcgggggugcucgucgugcugaugcugacgaucuucaugaucacgugcugcggccggauccaccgccccaagagcacccagcacgggcucggcgggaccggccggaagguguccgucaccagccaguccggcaaggugaucagcagcugggaguccuacaagagcgggggcgagacccgccuguga

SEQ ID NO: 95684 - RNA, 1575 nt, Artificial Sequence
  derived and/or modified CDS sequence (opt1) from glycoprotein__RABV__KM492750.1
auggugccccagguccugcuguucgugccgcugcugguguucagcgucugcuucggcaaguuccccaucuacaccauccccgacaagcucgggcccugguccccgaucgacauccaccaccugaucugccccaacaaccuggugguggaggacgagggcugcaccaaccucacgggguucagcuacauggagcugaaggucggcuacaucuccgccaucaaggugaacggguucagcugcaccggcguggucaccgaggccuacaccuaccccaacuucgugggcuacgugacguccaccuucaagcgcaagcacuuccggcccaccccggacgcgugccgcgccgccuacaacuggaagauggccggggacccccgguucgaggagagccugcacuaccccuaccccgacuaccacuggcuccgcaccgucaagacgaccaaggagucccuggugaucaucagcccguccguggccgaccuggaccccuacgacaagagccuccacucccgggucuuccccagcggcaagugcuccgggaucaccaucagcuccaccuacugcagcacgaaccacgacuacaccaucuggaugcccgagaacccgcgccugggcaccuccugcgacaucuucaccaacagccgggggaagcgcgcguccaagggcggcaagacgugcggguucguggacgagcggggccuguacaagagccucaagggggccugcaagcugaagcugugcggcgugcucggccugcgccugauggacgggaccugggucgccaugcagaccagcgacgagaccaaguggugcccgcccgaccagcucgugaaccugcacgacuuccgguccgacgagaucgagcaccugguggucgaggagcucgugaagaagcgcgaggagugccuggacgcccuggagagcaucaugacgaccaaguccgugagcuuccggcgccucucccaccuccggaagcugguccccggcuucgggaaggcguacaccaucuucaacaagacccucauggaggccgacgcccacuacaagagcgugcgcacguggaacgagaucauccccuccaagggcugccugcgggucgggggccgcugccacccccacgugaagggcguguucuucaacgggaucauccugggccccgacgggcacguccucauccccgagaugcagagcucccugcugcagcagcacauggagcuccuggagagcuccgugaucccgcugaugcacccccucgccgaccccagcaccguguucaaggacggcgacgaggccgaggacuucgucgaggugcaccuccccgacgugcacaagcagaucuccggggucgaccugggccugccgagcuggggcaaguacgugcugguguccgcggggguccugguggugcucaugcugaccaucuucaucaucacgugcugcggccggauccaccgccccaagagcacccagcacgggcugggcgggaccggccggaaggucuccgugaccagccaguccggcaaggugaucagcagcugggaguccuacaagagcgggggcgagacccgccucuga

SEQ ID NO: 95685 - RNA, 1575 nt, Artificial Sequence
  derived and/or modified CDS sequence (opt1) from glycoprotein__RABV__KM492751.1
auggugccccagguccugcuguucgugccgcugcugguguucagcaugugcuucggcaaguuccccaucuacaccauccccgacaagcucgggcccugguccccgaucgacauccaccaccugagcugccccaacaaccuggucguggaggacgagggcugcaccaaccucuccggguucagcuacauggagcugaaggugggcuacaucuccgccaucaaggucaacggguucacgugcaccggcguggugaccgaggccgagaccuacacgaacuucgucggcuacgugaccaccaccuucaagcgcaagcacuuccggcccacgcccgacgcgugccgcgccgccuacaacuggaagauggccggggacccgcgguacgaggagagccugcacaaccccuaccccgacuaccacuggcuccgcaccgugaagaccaccaaggagucccuggucaucaucagccccuccguggccgaccuggacccguacgacaagagccuccacucccggguguuccccagcggcaagugcuccgggaucacgaucagcuccaccuacugcagcaccaaccacgacuacaccaucuggaugcccgagaacccccgccugggcacguccugcgacaucuucaccaacagccgggggaagcgcgcguccaagggcggcaagaccugcggguucgucgacgagcggggccuguacaagagccucaagggggccugcaagcugaagcugugcggcgugcucggccugcgccugauggacgggaccuggguggccaugcagacgagcgacgagaccaaguggugcccgcccgaccagcucgucaaccugcacgacuuccgguccgacgagaucgagcaccuggugguggaggagcucgucaagaagcgcgaggagugccuggacgcccuggagagcaucaugaccaccaaguccgugagcuuccggcgccucucccaccuccggaagcuggugcccggcuucgggaaggcguacacgaucuucaacaagacccucauggaggccgacgcccacuacaagagcguccgcaccuggaacgagaucauccccuccaagggcugccugcgggucgggggccgcugccacccgcacgugaagggcguguucuucaacgggaucauccugggccccgacgggcacgugcucauccccgagaugcagagcucccugcugcagcagcacauggagcuccuggagagcuccgucaucccccugaugcacccgcucgccgaccccagcaccguguucaaggacggcgacgaggccgaggacuucguggagguccaccuccccgacgugcacaagcagaucuccgggguggaccugggccugcccagcuggggcaaguacguccugguguccgcgggggugcuggucgugcucaugcugacgaucuucaucaucacgugcugccggcgcauccggcgcccgcgcagcacccagcacggccucgggggcaccgggcggaagguguccgucaccagccaguccggcaaggugaucagcagcugggaguccuacaagagcggcggggagacccgccuguga

SEQ ID NO: 95686 - RNA, 1575 nt, Artificial Sequence
  derived and/or modified CDS sequence (opt1) from glycoprotein__RABV__KM492752.1
auggugccccagguccugcuguucgugccgcugcugguguucagcaugugcuucggcaaguuccccaucuacaccauccccgacaagcucgggcccugguccccgaucgacauccaccaccugagcugccccaacaaccuggucguggaggacgagggcugcaccaaccucuccggguucagcuacauggagcugaaggugggcuacaucuccgccaucaaggucaacggguucacgugcaccggcguggugaccgaggccgagaccuacacgaacuucgucggcuacgugaccaccaccuucaagcgcaagcacuuccggcccacgcccgacgcgugccgcgccgccuacaacuggaagauggccggggacccgcgguacgaggagagccugcacaaccccuaccccgacuaccacuggcuccgcaccgugaagaccaccaaggagucccuggucaucaucagccccuccguggccgaccuggacccguacgacaagagccuccacucccggguguuccccagcggcaagugcuccgggaucacgaucagcuccaccuacugcagcaccaaccacgacuacaccaucuggaugcccgagaacccccgccugggcacguccugcgacaucuucaccaacagccgggggaagcgcgcgucccggggcggcaagaccugcggguucgucgacgagcgcggccuguacaagagccucaagggggccugcaagcugaagcugugcggcgugcucggccugcggcugauggacgggaccuggguggccaugcagacgagcgacgagaccaaguggugcccgcccgaccagcucgucaaccugcacgacuuccgcuccgacgagaucgagcaccuggugguggaggagcucgucaagaagcgggaggagugccuggacgcccuggagagcaucaugaccaccaaguccgugagcuuccgccggcucucccaccuccgcaagcuggugcccggcuucgggaaggcguacacgaucuucaacaagacccucauggaggccgacgcccacuacaagagcguccggaccuggaacgagaucauccccuccaagggcugccugcgcgucgggggccggugccacccgcacgugaagggcguguucuucaacgggaucauccugggccccgacgggcacgugcucauccccgagaugcagagcucccugcugcagcagcacauggagcuccuggagagcuccgucaucccccugaugcacccgcucgccgaccccagcaccguguucaaggacggcgacgaggccgaggacuucguggagguccaccuccccgacgugcacaagcagaucuccgggguggaccugggccugcccaacuggggcaaguacguccuggugagcgcgggggugcuggucgugcucaugcugacgaucuucaucaucacgugcugcggccgcauccggcgcccgcgcuccacccagcacgggcugggcgggaccggccggaaggugagcgucaccucccagagcggcaaggugaucuccagcugggagagcuacaaguccgggggcgagacccgccucuga

SEQ ID NO: 95687 - RNA, 1575 nt, Artificial Sequence
  derived and/or modified CDS sequence (opt1) from glycoprotein__RABV__KM492753.1
auggugccgcagguccugcuguucgugccgcugcugguguucagcaugugcuucggcaaguuccccaucuacaccauccccgacaagcucgggcccugguccccgaucgacauccaccaccugagcugccccaacaaccuggucguggaggacgagggcugcaccaaccucuccggguucagcuacauggagcugaaggugggcuacaucuccgccaucaaggucaacggguucacgugcaccggcguggugaccgaggccgagaccuacacgaacuucgucggcuacgugaccaccaccuucaagcgcaagcacuuccggcccacgcccgacgcgugccgcgccgccuacaacuggaagauggccggggacccgcgguacgaggagagccugcacaaccccuaccccgacuaccacuggcuccgcaccgugaagaccaccaaggagucccuggucaucaucagccccuccguggccgaccuggacccguacgacaagagccuccacucccggguguuccccagcggcaagugcuccgggaucacgaucagcuccaccuacugcagcaccaaccacgacuacaccaucuggaugcccgagaacccccgccugggcacguccugcgacaucuucaccaacagccgggggaagcgcgcguccaagggcggcaagaccugcggguucgucgacgagcggggccuguacaagagccucaagggggccugcaagcugaagcugugcggcgugcucggccugcgccugauggacgggaccuggguggccaugcagacgagcgacgagaccaaguggugcccgcccgaccagcucgucaaccugcacgacuuccgguccgacgagaucgagcaccuggugguggaggagcucgucaagaagcgcgaggagugccuggacgcccuggagagcaucaugaccaccaaguccgugagcuuccggcgccucucccaccuccggaagcuggugcccggcuucgggaaggcguacacgaucuucaacaagacccucauggaggccgacgcccacuacaagagcguccgcaccuggaacgagaucauccccuccaagggcugccugcgggucgggggccgcugccacccgcacgugaacggcguguucuucaacgggaucauccugggccccgacgggcacgugcucauccccgagaugcagagcucccugcugcagcagcacauggagcuccuggagagcuccgucaucccccugaugcacccgcucgccgaccccagcaccguguucaaggacggcgacgaggccgaggacuucguggagguccaccuccccgacgugcacaagcagaucuccgggguggaccugggccugcccagcuggggcaaguacguccugguguccgcgggggugcuggucgugcucaugcugacgaucuucaucaugaccugcugcggccgggugcaccgccccaagagcacccagcacgggcugggcgggaccggccggaaggucuccgugacgagccaguccggcaaggugaucagcagcugggaguccuacaagagcgggggcgagacccgccucuga

SEQ ID NO: 95688 - RNA, 1575 nt, Artificial Sequence
  derived and/or modified CDS sequence (opt1) from glycoprotein__RABV__KM492754.1
auggugccccagguccugcuguucgugccgcugcugguguucagcaugugcuucggcaaguuccccaucuacaccauccccgacaagcucgggcccugguccccgaucgacauccaccaccugagcugccccaacaaccuggucguggaggacgagggcugcaccaaccucuccggguucagcuacauggagcugaaggugggcuacaucuccgccaucaaggucaacggguucacgugcaccggcguggugaccgaggccgagaccuacacgaacuucgucggcuacgugaccaccaccuucaagcgcaagcacuuccggcccacgcccgacgcgugccgcgccgccuacaacuggaagauggccggggacccgcgguacgaggagagccugcacaaccccuaccccgacuaccacuggcuccgcaccgugaagaccaccaaggagucccuggucaucaucagccccuccguggccgaccuggacccguacgacaagagccuccacucccggguguuccccagcggcaagugcuccgggaucacgaucagcuccaccuacugcagcaccaaccacgacuacaccaucuggaugcccgagaacccccgccugggcacguccugcgacaucuucaccaacagccgggggaagcgcgcguccaagggcggcaagaccugcggguucgucgacgagcggggccuguacaagagccucaagggggccugcaagcugaagcugugcggcgugcucggccugcgccugauggacgggaccuggguggccaugcagacgagcgacgagaccaaguggugcccgcccgaccagcucgucaaccugcacgacuuccgguccgacgagaucgagcaccuggugguggaggagcucgucaagaagcgcgaggagugccuggacgcccuggagagcaucaugaccaccaaguccgugagcuuccggcgccucucccaccuccggaagcuggugcccggcuucgggaaggcguacacgaucuucaacaagacccucauggaggccgacgcccacuacaagagcguccgcaccuggaacgagaucauccccuccaagggcugccugcgggucgggggccgcugccacccgcacgugaacggcguguucuucaacgggaucauccugggccccgacgggcacgugcucauccccgagaugcagagcucccugcugcagcagcacauggagcuccuggagagcuccgucaucccccugaugcacccgcucgccgaccccagcaccguguucaaggacggcgacgaggccgaggacuucguggagguccaccuccccgacgugcacaagcagaucuccgggguggaccugggccugcccagcuggggcaaguacguccugguguccgcgggggugcuggucgugcucaugcugacgaucuucaucaugaccugcugcggccgggugcaccgcagcaaguccacccagcacgggcugggcgggaccggccggaaggucagcgugacgucccagagcggcaaggugaucagcuccugggagagcuacaaguccgggggcgagacccgccucuga

SEQ ID NO: 95689 - RNA, 1575 nt, Artificial Sequence
  derived and/or modified CDS sequence (opt1) from glycoprotein__RABV__KM492755.1
auggugccgcagguccugcuguucgugccgcugcugguguucagcaugugcuucggcaaguuccccaucuacaccauccccgacaagcucgggcccugguccccgaucgacauccaccaccugagcugccccaacaaccuggucguggaggacgagggcugcaccaaccucuccggguucagcuacauggagcugaaggugggcuacaucuccgccaucaaggucaacggguucacgugcaccggcguggugaccgaggccgagaccuacacgaacuucgucggcuacgugaccaccaccuucaagcgcaagcacuuccggcccacgcccgacgcgugccgcgccgccuacaacuggaagauggccggggacccgcgguacgaggagagccugcacaaccccuaccccgacuaccacuggcuccgcaccgugaagaccaccaaggagucccuggucaucaucagccccuccguggccgaccuggacccguacgacaagagccuccacucccggguguuccccagcggcaagugcuccgggaucacgaucagcuccaccuacugcagcaccaaccacgacuacaccaucuggaugcccgagaacccccgccugggcacguccugcgacaucuucaccaacagccgggggaagcgcgcguccaagggcggcaagaccugcggguucgucgacgagcggggccuguacaagagccucaagggggccugcaagcugaagcugugcggcgugcucggccugcgccugauggacgggaccuggguggccaugcagacgagcgacgagaccaaguggugcccgcccgaccagcucgucaaccugcacgacuuccgguccgacgagaucgagcaccuggugguggaggagcucgucaagaagcgcgaggagugccuggacgcccuggagagcaucaugaccaccaaguccgugagcuuccggcgccucucccaccuccggaagcuggugcccggcuucgggaaggcguacacgaucuucaacaagacccucauggaggccgacgcccacuacaagagcguccgcaccuggaacgagaucauccccuccaagggcugccugcgggucgggggccgcugccacccgcacgugaacggcguguucuucaacgggaucauccugggccccgacgggcacgugcucauccccgagaugcagagcucccugcugcagcagcacauggagcuccuggagagcuccgucaucccccugaugcacccgcucgccgaccccagcaccguguucaaggacggcgacgaggccgaggacuucguggagguccaccuccccgacgugcacaagcagaucuccgggguggaccugggccugcccagcuggggcaaguacguccugguguccgcgggggugcuggucgugcucaugcugacgaucuucaucaugaccugcugcggccgggugcaccgccccaagagcacccagcacgggcugggcgggaccgagcggaaggucuccgugacgagccaguccggcaaggugaucagcagcugggaguccuacaagagcggcggggagacccgccucuga

SEQ ID NO: 95690 - RNA, 1575 nt, Artificial Sequence; identical to SEQ ID NO: 95689
  derived and/or modified CDS sequence (opt1) from glycoprotein__RABV__KM492758.1

SEQ ID NO: 95691 - RNA, 1575 nt, Artificial Sequence
  derived and/or modified CDS sequence (opt1) from glycoprotein__RABV__KM492759.1
auggugccgcagguccugcuguucgugccgcugcugguguucagcaugugcuucggcaaguuccccaucuacaccauccccgacaagcucgggcccugguccccgaucgacauccaccaccugagcugccccaacaaccuggucguggaggacgagggcugcaccaaccucuccggguucagcuacauggagcugaaggugggcuacaucuccgccaucaaggucaacggguucacgugcaccggcguggugaccgaggccgagaccuacacgaacuucgucggcuacgugaccaccaccuucaagcgcaagcacuuccggcccacgcccgacgcgugccgcgccgccuacaacuggaagauggccggggacccgcgguacgaggagagccugcacaaccccuaccccgacuaccacuggcuccgcaccgugaagaccaccaaggagucccuggucaucaucagccccuccguggccgaccuggacccguacgacaagagccuccacucccggguguuccccagcggcaagugcuccgggaucacgaucagcuccaccuacugcagcaccaaccacgacuacaccaucuggaugcccgagaacccccgccugggcacguccugcgacaucuucaccaacagccgggggaagcgcgcguccaagggcggcaagaccugcggguucgucgacgagcggggccuguacaagagccucaagggggccugcaagcugaagcugugcggcgugcucggccugcgccugauggacgggaccuggguggccaugcagacgagcgacgagaccaaguggugcccgcccgaccagcucgucaaccugcacgacuuccgguccgacgagaucgagcaccuggugguggaggagcucgucaagaagcgcgaggagugccuggacgcccuggagagcaucaugaccaccaaguccgugagcuuccggcgccucucccaccuccggaagcuggugcccggcuucgggaaggcguacacgaucuucaacaagacccucauggaggccgacgcccacuacaagagcguccgcaccuggaacgagaucauccccuccaagggcugccugcgggucgggggccgcugccacccgcacgugaacggcguguucuucaacgggaucauccugggccccgacgggcacauccucauccccgagaugcagagcucccugcugcagcagcacauggagcuccuggagagcuccgugaucccccugaugcacccgcucgccgaccccagcaccgucuucaaggacggcgacgaggccgaggacuucguggaggugcaccuccccgacguccacaagcagaucuccgggguggaccugggccugcccagcuggggcaaguacgugcuggucuccgcgggggugcuggugguccucaugcugacgaucuucaucaugaccugcugcggccgggugcaccgccccaagagcacccagcacgggcugggcgggaccgagcggaagguguccgucacgagccaguccggcaaggugaucagcagcugggaguccuacaagagcggcggggagacccgccucuga

SEQ ID NO: 95692 - RNA, 1575 nt, Artificial Sequence
  derived and/or modified CDS sequence (opt1) from glycoprotein__RABV__KM492760.1
auggugccgcagguccugcuguucgugccgcugcugguguucagcaugugcuucggcaaguuccccaucuacaccauccccgacaagcucgggcccugguccccgaucgacauccaccaccugagcugccccaacaaccuggucguggaggacgagggcugcaccaaccucuccggguucagcuacauggagcugaaggugggcuacaucuccgccaucaaggucaacggguucacgugcaccggcguggugaccgaggccgagaccuacacgaacuucgucggcuacgugaccaccaccuucaagcgcaagcacuuccggcccacgcccgacgcgugccgcgccgccuacaacuggaagauggccggggacccgcgguacgaggagagccugcacaaccccuaccccgacuaccacuggcuccgcaccgugaagaccaccaaggagucccuggucaucaucagccccuccguggccgaccuggacccguacgacaagagccuccacucccggguguuccccagcggcaagugcuccgggaucacgaucagcuccaccuacugcagcaccaaccacgacuacaccaucuggaugcccgagaacccccgccugggcacguccugcgacaucuucaccaacagccgggggaagcgcgcguccaagggcggcaagaccugcggguucgucgacgagcggggccuguacaagagccucaagggggccugcaagcugaagcugugcggcgugcucggccugcgccugauggacgggaccuggguggccaugcagacgagcgacgagaccaaguggugcccgcccgaccagcucgucaaccugcacgacuuccgguccgacgagaucgagcaccuggugguggaggagcucgucaagaagcgcgaggagugccuggacgcccuggagagcaucaugaccaccaaguccgugagcuuccggcgccucucccaccuccggaagcuggugcccggcuucgggaaggcguacacgaucuucaacaagacccucauggaggccgacgcccacuacaagagcguccgcaccuggaacgagaucauccccuccaagggcugccugcgggucgggggccgcugccacccgcacgugaacggcguguucuucaacgggaucauccugggccccgacgggcacgugcucauccccgagaugcagagcucccugcugcagcagcacauggagcuccuggagagcuccgucaucccccugaugcacccgcucgccgaccccagcaccguguucaaggacggcgacgaggccgaggacuucguggagguccaccuccccgacgugcacaagcagaucuccgggguggaccugggccugcccagcuggggcaaguacguccugguguccgcgggggugcuggucgugcucaugcugacgaucuucaucaugaccugcugcggccgggugcaccgccccaagagcacccagcacucccucgggggcaccgagcggaaggucagcgugacgucccagagcgggaaggugaucagcuccugggagagcuacaaguccggcggcgagacccgccuguga

SEQ ID NO: 95693 - RNA, 1575 nt, Artificial Sequence
  derived and/or modified CDS sequence (opt1) from glycoprotein__RABV__KM492761.1
auggugccccagguccugcuguucgugccgcugcugguguucagcaugugcuucggcaaguuccccaucuacaccauccccgacaagcucgggcccugguccccgaucgacauccaccaccugagcugccccaacaaccuggucguggaggacgagggcugcaccaaccucuccggguucagcuacauggagcugaaggugggcuacaucuccgccaucaaggucaacggguucacgugcaccggcguggugaccgaggccgagaccuacacgaacuucgucggcuacgugaccaccaccuucaagcgcaagcacuuccggcccacgcccgacgcgugccgcgccgccuacaacuggaagauggccggggacccgcgguacgaggagagccugcacaaccccuaccccgacuaccacuggcuccgcaccgugaagaccaccaaggagucccuggucaucaucagccuguccguggccgaccucgaccccuacgacaagagccugcacucccggguguucccgagcggcaagugcuccgggaucacgaucagcuccaccuacugcagcaccaaccacgacuacaccaucuggaugcccgagaacccccgccugggcacguccugcgacaucuucaccaacagccgggggaagcgcgcguccaagggcggcaagaccugcggguucgucgacgagcggggccucuacaagagccugaagggggccugcaagcugaagcucugcggcgugcugggccugcgccucauggacgggaccuggguggccaugcagacgagcgacgagaccaaguggugcccgcccgaccagcuggucaaccugcacgacuuccgguccgacgagaucgagcaccucgugguggaggagcuggucaagaagcgcgaggagugccuggacgcccucgagagcaucaugaccaccaaguccgugagcuuccggcgccugucccaccuccggaagcucgugcccggcuucgggaaggcguacacgaucuucaacaagacccugauggaggccgacgcccacuacaagagcguccgcaccuggaacgagaucauccccuccaagggcugccugcgggucgggggccgcugccacccccacgugaacggcguguucuucaacgggaucauccucggcccggacgggcacgugcugauccccgagaugcagagcucccugcuccagcagcacauggagcugcuggagagcuccgucaucccccucaugcacccccuggccgacccgagcaccguguucaaggacggcgacgaggccgaggacuucguggagguccaccuccccgacgugcacaagcagaucuccgggguggaccugggccugcccagcuggggcaaguacguccugguguccgcgggggugcucgucgugcugaugcugacgaucuucaucaugaccugcugcggccgggugcaccgccccaagagcacccagcacgggcucggcgggaccggccggaaggucuccgugacgagccaguccggcaaggugaucagcagcugggaguccuacaagagcgggggcgagacccgccuguga

SEQ ID NO: 95694 - RNA, 1575 nt, Artificial Sequence
  derived and/or modified CDS sequence (opt1) from glycoprotein__RABV__KM492762.1
auggugccccagguccugcuguucgugccgcugcugguguucagcaugugcuucggcaaguuccccaucuacaccauccccgacaagcucgggcccuggucccugaucgacauccaccaccugagcugcccgaacaaccucgucguggaggacgagggcugcaccaaccuguccggguucagcuacauggagcugaaggugggcuacaucuccgccaucaaggucaacggguucacgugcaccggcguggugaccgaggccgagaccuacacgaacuucgucggcuacgugaccaccaccuucaagcgcaagcacuuccggcccacgcccgacgcgugccgcgccgccuacaacuggaagauggccggggacccccgguacgaggagagccuccacaacccguaccccgacuaccacuggcugcgcaccgugaagaccaccaaggagucccuggucaucaucagccccuccguggccgaccucgaccccuacgacaagagccugcacucccggguguucccgagcggcaagugcuccgggaucacgaucagcuccaccuacugcagcaccaaccacgacuacaccaucuggaugcccgagaacccccgccugggcacguccugcgacaucuucaccaacagccgggggaagcgcgcguccaagggcggcaagaccugcggguucgucgacgagcggggccucuacaagagccugaagggggccugcaagcugaagcucugcggcgugcugggccugcgccucauggacgggaccuggguggccaugcagacgagcgacgagaccaaguggugcccgcccgaccagcuggucaaccugcacgacuuccgguccgacgagaucgagcaccucgugguggaggagcuggucaagaagcgcgaggagugccuggacgcccucgagagcaucaugaccaccaaguccgugagcuuccggcgccugucccaccuccggaagcucgugcccggcuucgggaaggcguacacgaucuucaacaagacccugauggaggccgacgcccacuacaagagcguccgcaccuggaacgagaucauccccuccaagggcugccugcgggucgggggccgcugccacccccacgugaacggcguguucuucaacgggaucauccucggcccggacgggcacgugcugauccccgagaugcagagcucccugcuccagcagcacauggagcugcuggagagcuccgucaucccccucaugcacccccuggccgacccgagcaccguguucaaggacggcgacgaggccgaggacuucguggagguccaccuccccgacgugcacaagcagaucuccgggguggaccugggccugcccagcuggggcaaguacguccugguguccgcgggggugcucgucgugcugaugcugacgaucuucaucaugaccugcugcggccgggugcaccgccccaagagcacccagcacgggcucggcgggaccgagcggaaggucuccgugacgagccaguccggcaaggugaucagcagcugggaguccuacaagagcggcggggagacccgccuguga

SEQ ID NO: 95695 - RNA, 1575 nt, Artificial Sequence; identical to SEQ ID NO: 95687
  derived and/or modified CDS sequence (opt1) from glycoprotein__RABV__KM492763.1

SEQ ID NO: 95696 - RNA, 1575 nt, Artificial Sequence; identical to SEQ ID NO: 95689
  derived and/or modified CDS sequence (opt1) from glycoprotein__RABV__KM492764.1

SEQ ID NO: 95697 - RNA, 1575 nt, Artificial Sequence
  derived and/or modified CDS sequence (opt1) from glycoprotein__RABV__KM492765.1
auggugccccagguccugcuguucgugccgcugcugguguucagcaugugcuucggcaaguuccccaucuacaccauccccgacaaggucgggcccggcuccccgaucgacauccaccaccucagcugccccaacaaccuggugaucgaggacgaggggugcaccaaccuguccggcuucagcuacauggagcucaaggugggguacaucuccgccaucaaggucagcggcuucacgugcaccggcguggagaccgaggccgagaccuacacgaacuucgugggguacgucaccaccaccuucaagcgcaagcacuuccggcccacgcccaacgcgugccgcgccgccuacaaccggaagauggccggcgacccgcgcuacgaggagucccugcacaaccggugccccgaguaccacuggcugcgcaccgugaagaccaccaaggagagccucgugaucaucucccccagcgucgccgaccuggaccccuacgacaagucccugcacagccggguguucccguccgggaagugcagcggcaucacgaucuccagcaccuacugcuccaccaaccacgacuacaccaucuggaugcccgagaacccccgccucgggacgagcugcgacaucuucaccaacucccggggcaagcgcgcgagcaagggcgggaagaccugcggcuucguggacgagcgggggcuguacaagagccugaagggcgccugcaagcucaagcugugcggcguccuggggcuccgccugauggacggcaccuggguggccaugcagacguccgacgagaccaaguggugcccgcccgaccagcuggugaaccuccacgacuuccggagcgacgagaucgagcaccuggucguggaggagcuggugaagaagcgcgaggagugccucgacgcccuggaguccaucaugaccaccaagagcgucuccuuccggcgccugagccaccuccggaagcuggugcccggguucggcaaggcguacacgaucuucaacaagacccugauggaggccgacgcccacuacaaguccgugcgcaccuggaacgagaucauccccagcaaggggugccuccgggucggcggccgcugccacccccacgugaacggggucuucuucaacggcaucauccuggggccggacggccacgugcugauccccgagaugcaguccagccuccugcagcagcacauggagcugcucgaguccagcgugaucccccugaugcacccccuggccgacccguccaccgucuucaaggacggggacgaggccgaggacuucguggaggugcaccuccccgacguccacaagcagaucagcggcguggaccugggccugcccuccugggggaaguacgugcucgucagcgcgggcgugcuggugguccugaugcucacgaucuucaucaugaccugcugcgggcgggugcaccgccccaaguccacccagcacggccucgggggcaccgagcgcaaggugagcgucacgucccagagcggcaaggugaucagcuccugggagagcuacaaguccgggggcgagacccggcuguga

SEQ ID NO: 95698 - RNA, 1575 nt, Artificial Sequence
  derived and/or modified CDS sequence (opt1) from glycoprotein__RABV__KM594023.1
augaucccccagaacccgcugcucggccugcugcucgugagcucccugugcuucgggaaguuccccaucuacaccauccccgacaagcugggccccuggagcccgaucgacauccaccaccucuccugccccaacaaccuggucguggaggacgaggggugcaccagccuguccggcuucagcuacauggagcucaaggugggguacaucuccgccaucaaggucaacggcuucacgugcaccggcguggugaccgaggccgagaccuacacgaacuucgucggguacgugaccaccaccuucaagcgccggcacuuccgccccaugcccgacgcgugccgggccgcccacaacuggaagaucgccggcgacccgcgcuacgaggacagccugcagaaccccuaccccgacuaccacuggcugcggacggugaagaccaccaaggagucccucaucaucaucagccccuccgucgccgaccuggacccguacgacaagagccugcacucccgcguguuccccgggggcaagugccucggggugaccaucagcuccacguacugcagcaccaaccacgacuacaccaucuggaugcccgaggaggcgggccugggcaccuccugcgacaucuucacgaacagccgggggaagcgcgccuccaagggcgggaagaccugcggcuucgucgacgagcggggccuguacaagagccucaaggggagcugcaagcugaagcugugcggcgugcccgggcuccgccugauggacggcaccuggguguccauccagaccccggacgagacgaaguggugcccgcccgaccaggucgugaaccugcacgacuuccacagcgacgagaucgagcaccucguggucgaggagcugaucaagaagcgggaggagugccuggacgcccucgaguccaucaugaccaccaagagcguguccuuccgccggcugagccaccuccgcaagcuggugcccggguucggcaaggccuacaccaucuacaacaagacgcugauggaggcggacgcccacuacaaguccguccggaccuggaacgagaucauccccagcaagggcugccugcgcgucgggggccggugccaccccgacguggacgggguguucuucaacggcaucauccucgggcccgacggcaacgugcugauccccgagaugcaguccagccugcuccagcagcacauggagcugcuggaguccagcgucaucccgcucaugcacccccuggccgaccccuccaccaucuucaaggacagcgacgaggccgaggacuucguggaggugcaccuccccgacguccacaagaagaucuccggcguggaccuggggcugccgagcuggggcaaguaccugcucauguccgccggggcgcuggccgcccugaugcucaccacgcugcugaucacgugcugccgcaaggugaaccgggccgagcccaagcagcagggcccccgcgagagcgggcggaccaucuccgucaccccgcagaacggccgcgugaucagcagcugggagcuguacaaguccggcagcgagaccgggcucuga

SEQ ID NO: 95699 - RNA, 1575 nt, Artificial Sequence
  derived and/or modified CDS sequence (opt1) from glycoprotein__RABV__KM594024.1
augaucccccgcaacccgcugcucggccugcugcucgugagcucccugugcuucgggaaguuccccaucuacaccauccccgacaagcugggccccuggagcccgaucgacauccaccaccucuccugccccaacaaccuggucguggaggacgaggggugcaccagccuguccggcuucagcuacauggagcucaaggugggguacaucuccgccaucaaggucaacggcuucacgugcaccggcguggugaccgaggccgagaccuacacgaacuucgucggguacgugaccaccaccuucaagcggcgccacuuccggcccaugcccgacgcgugccgcgccgcccacaacuggaagaucgccggcgacccgcgguacgaggacagccugcagaaccccuaccccgacuaccacuggcugcgcacggugaagaccaccaaggagucccucaucaucaucagccccuccgucgccgaccuggacccguacgacaagagccugcacucccggguguuccccgggggcaagugccucggggugaccaucagcuccacguacugcagcaccaaccacgacuacaccaucuggaugcccgaggaggcgggccugggcaccuccugcgacaucuucacgaacagccgcgggaagcgggccuccaagggcgggaagaccugcggcuucgucgacgagcgcggccuguacaagagccucaaggggagcugcaagcugaagcugugcggcgugcccgggcuccggcugaucgacggcaccuggguguccauccagaccccggacgagacgaaguggugcccgcccgaccaggucgugaaccugcacgacuuccacagcgacgagaucgagcaccucguggucgaggagcugaucaagaagcgcgaggagugccuggacgcccucgaguccaucaugaccaccaagagcguguccuuccggcgccugagccaccuccggaagcuggugcccggguucggcaaggccuacaccauccacaacaagacgcugauggaggcggacgcccacuacaaguccguccgcaccuggaacgagaucauccccagcaagggcugccugcgggucgggggccgcugccaccccaacguggacgggguguucuucaacggcaucauccucgggcccgacggcaacgugcugauccccgagaugcaguccagccugcuccagcagcacauggagcugcuggaguccagcgucaucccgcucaugcacccccuggccgaccccuccaccaucuucaaggacagcgacgaggccgaggacuucguggacgugcaccuccccgacguccacaagaagaucuccggcguggaccuggggcugccgagcuggggcaaguaccugcucauguccgccggggcgcuggccgcccugaugcucaccacgcugcugaucacgugcugccggaaggugaaccgcgccgagcccaagcagcagggcccccgggagagcgggcgcaccaucuccgucaccccgcagaacggccgcgugaucagcagcugggagcuguacaaguccggcagcgagaccgggcucuga

SEQ ID NO: 95700 - RNA, 1575 nt, Artificial Sequence
  derived and/or modified CDS sequence (opt1) from glycoprotein__RABV__KM594025.1
augaucccccuggaccuccugcugggccuccugcuggccagcucccucugcuucgggaaguucccgaucuacaccauccccgacaagcugggccccuggagccccaucgacauccaccaccuguccugcccgaacaaccucguggucgaggacgaggggugcaccagccuguccggcuucagcuacauggagcugaaggugggguacaucuccgccaucaaggugaacggcuucacgugcaccggcgucgugaccgaggcggagaccuacacgaacuucgugggguacgucaccaccaccuucaagcgcaagcacuuccggcccaugcccgacgccugccgcgccgcccacgaguggaagacggccggcgacccccgguacgaggacagccuccagaacccguaccccgacuaccacuggcugcgcaccgugaagaccaccaaggagucccuggugaucaucagccccuccgucgcggaccucgaccccuacgacaagagccugcacucccggguguuccccgggggcaagugccugggggugacgaucagcuccaccuacugcagcaccaaccacgacuacaccaucuggaugccggaggaggccggccucggcacguccugcgacaucuucaccaacagccgcgggaagcgggccuccaagggcgggcgcaucugcggcuucgucgacgagcggggccuguacaagagccugaagggggccugcaagcucaagcugugcggcgugcccgggcugcgccucauggacggcaccugggugagcauccaggcgcccgacgagaccaaguggugcccgcccgaccaggucgugaaccugcacgacuuccacuccgacgagaucgagcaccugguggucgaggagcucaucaagaagcgggaggagugccuggacgcccuggagagcaucaugacgaccaaguccgugagcuuccgccggcucucccaccuccgcaagcuggugcccggguucggcaaggccuacaccaucuucaacaagacccugauggaggccgacgcccacuacaagagcguccggacguggaacgagguggugcccuccaagggcugccugaaggucgggggccgcugccacagcgacguggacggggucuucuucaacggcaucauccuggggccggacggcaacgugcucauccccgagaugcaguccagccugcugcagcagcacauggagcuccuggaguccagcgugaucccccugaugcacccccucgcggacccguccaccaucuucaaggacagcgacgaggccgaggacuucgucgacgugcaccuccccgacgugcacaagcaggucuccggcguggaccuggggcugcccagcuggggcaaguaccugcugauguccgccggggcccucgccacccugaugagcgcgaucuuccuggugaccugcugcaagaaggucaagcgggccgagcccgcccaccacggcccgaaggaguccgggcgcaagaucagcgugacgccccagaacggcaaggugaucagcuccugggaggucuacaagagcggcaacgagcccgggcuguga

SEQ ID NO: 95701 - RNA, 1575 nt, Artificial Sequence
  derived and/or modified CDS sequence (opt1) from glycoprotein__RABV__KM594026.1
augaucccccaggcccugcuguucgugccgcugcugaucagcuccagcugcuucggcaaguuccccgucuacaccauccccgagaagcucgggcccugguccccgaucgacauccaccaccugagcugccccaacaaccuggccguggaggacgagggcugcaacucccucagcggguucuccuacauggagcugaaggugggcuacaucagcgcgaucaaggucaacggguucacgugcaccggcguggugaccgaggccgagaccuacaccaacuucgucggcuacgugacgaccaccuucaagcgcaagcacuuccggcccaugcccgacgccugccgcgccgccuacaacuggaagauggcgggggacccgcgguacgaggagucccugcacaaccccuaccccgacuaccacuggcuccgcaccgugacgaccaccaaggagagccugaucaucaucucccccagcgucgccaaccuggacccguacgacaagucccuccacagccggguguuccccggcgggaagugcaugggcaucaccguguccagcacguucugcuccaccaaccacgacuacaccaucuggaugcccgagaacgcccgccuggggaccagcugcgacaucuucacgaccuccaagggcaagaaggccagcaagggcgggaagaucugcggcuucgucgacgagcgggggcuguacaagagccucaagggcgcgugcaagcugaagcugugcggcguguccgggcuccgccugcuggacggcaccugggugaccauccagacgagcgacgagaucaaguggugcccgcccgacaagcucgucaaccugcacgacuuccacuccgacgagaucgagcaccuggugguggaggagcucguccggaagcgcgaggagugccuggacacccuggagagcaucaugaccaccaaguccgugagcuuccggcgccucucccaccuccggaagcuggugcccggguucggcaaggccuacacgaucuucaacaagacccucauggaggccgacgcccacuacaagagcgucaacaccuggaacgagaucauccccuccaaggggugccugaccgugggcggccgcugccacccccacgugaacggggucuucuucaacggcaucauccuggggccggacggccacgugcucauccccgagaugcagagcucccugcugcagcagcacauggagcuccuggagagcuccgucaucccccugaugcacccccucgccgacccgagcacgguguucaaggacggggacgaggcggaggacuucguggagguccaccuccccgacgugcacaagcaggucuccggcaucgaccugggccugcccaacugggggaaguacgugcugaucagcgccggcuuccuggugacccuccugcugaucaucuucuucaugaucugcugccggcgcgccaaccggcgcguguccacccagcagagccucggggaguccggcaagaaggucuucgugaucccccagaacgggaaggugaucagcagcugggaguccuacaagaacggcaccgagacgcggcuguga

SEQ ID NO: 95702 - RNA, 1575 nt, Artificial Sequence
  derived and/or modified CDS sequence (opt1) from glycoprotein__RABV__KM594027.1
augaucccccaggcccugcuguucgugccgcugcugaucagcuccagcugcuucggcaaguuccccgucuacaccauccccgagaagcucgggcccugguccccgaucgacauccaccaccugagcugccccaacaaccuggccguggaggacgagggcugcaacucccucagcggguucuccuacauggagcugaaggugggcuacaucagcgcgaucaaggucaacggguucacgugcaccggcguggugaccgaggccgagaccuacaccaacuucgucggcuacgugacgaccaccuucaagcgcaagcacuuccggcccaugcccgacgccugccgcgccgccuacaacuggaagauggcgggggacccgcgguacgaggagucccugcacaaccccuaccccgacuaccacuggcuccgcaccgugacgaccaccaaggagagccugaucaucaucucccccagcgucgccaaccuggacccguacgacaagucccuccacagccggguguuccccggcgggaagugcaugggcaucaccguguccagcacguucugcuccaccaaccacgacuacaccaucuggaugcccgagaacgcccgccuggggaccagcugcgacaucuucacgaccuccaagggcaagaaggccagcaagggcgggaagaucugcggcuucgucgacgagcgggggcuguacaagagccucaagggcgcgugcaagcugaagcugugcggcguguccgggcuccgccugcuggacggcaccugggugaccauccagacgagcgacgagaucaaguggugcccgcccgacaagcucgucaaccugcacgacuuccacuccgacgagaucgagcaccuggugguggaggagcucguccggaagcgcgaggagugccuggacacccuggagagcaucaugaccaccaaguccgugagcuuccggcgccucucccaccuccggaagcuggugcccggguucggcaaggccuacacgaucuucaacaagacccucauggaggccgacgcccacuacaagagcgucaacaccuggaacgagaucauccccuccaaggggugccugaccgugggcggccgcugccacccccacgugaacggggucuucuucaacggcaucauccuggggccggacggccacgugcucauccccgagaugcagagcucccugcugcagcagcacauggagcuccuggagagcuccgucaucccccugaugcacccccucgccgacccgagcacgguguucaaggacggggacgaggcggaggacuucguggagguccaccuccccgacgugcacaagcaggucuccggcaucgaccugggccugcccaacugggggaaguacgugcugaucagcgccggcuuccuggugacccuccugcugaucaucuuccucaugaucugcugccggcgcgccaaccggcgcguguccacccagcagagccugggggaguccggcaagaaggucuucgugaucccccagaacgggaaggugaucagcagcugggaguccuacaagaacggcgccgagacccggcuguga

SEQ ID NO: 95703 - RNA, 1575 nt, Artificial Sequence
  derived and/or modified CDS sequence (opt1) from glycoprotein__RABV__KM594028.1
augaucccccaggcccugcuguucgugccgcugcugaucagcuccagcugcuucggcaaguuccccgucuacaccauccccgagaagcucgggcccugguccccgaucgacauccaccaccugagcugccccaacaaccuggccguggaggacgagggcugcaacucccucagcggguucuccuacauggagcugaaggugggcuacaucagcgcgaucaaggucaacggguucacgugcaccggcguggugaccgaggccgagaccuacaccaacuucgucggcuacgugacgaccaccuucaagcgcaagcacuuccggcccaugcccgacgccugccgcgccgccuacaacuggaagauggcgggggacccgcgguacgaggagucccugcacaaccccuaccccgacuaccacuggcuccgcaccgugacgaccaccaaggagagccugaucaucaucucccccagcgucgccaaccuggacccguacgacaagucccuccacagccggguguuccccggcgggaagugcaugggcaucaccguguccagcacguucugcuccaccaaccacgacuacaccaucuggaugcccgagaacgcccgccuggggaccagcugcgacaucuucacgaccuccaagggcaagaaggccagcaagggcgggaagaucugcggcuucgucgacgagcgggggcuguacaagagccucaagggcgcgugcaagcugaagcugugcggcguguccgggcuccgccugcuggacggcaccugggugaccauccagacgagcgacgagaucaaguggugcccgcccgacaagcucgucaaccugcacgacuuccacuccgacgagaucgagcaccuggugguggaggagcucguccggaagcgcgaggagugccuggacacccuggagagcaucaugaccaccaaguccgugagcuuccggcgccucucccaccuccggaagcuggugcccggguucggcaaggccuacacgaucuucaacaagacccucauggaggccgacgcccacuacaagagcgucaacaccuggaacgagaucauccccuccaaggggugccugaccgugggcggccgcugccacccccacgugaacggggucuucuucaacggcaucauccuggggccggacggccacgugcucauccccgagaugcagagcucccugcugcagcagcacauggagcuccuggagagcuccgucaucccccugaugcacccccucgccgacccgagcacgguguucaaggagggggacgaggcggaggacuucguggagguccaccuccccgacgugcacaagcaggucuccggcaucgaccugggccugcccaacugggggaaguacgugcugaucagcgccggcuuccuggugacccuccugcugaucaucuuccucaugaucugcugccggcgcgccaaccggcgcguguccacccagcagagccugggggaguccggcaagaagauguucgucaucccccagaacgggaaggugaucagcagcugggaguccuacaagaacggcgccgagaccggccuguga

SEQ ID NO: 95704 - RNA, 1575 nt, Artificial Sequence
  derived and/or modified CDS sequence (opt1) from glycoprotein__RABV__KM594029.1
augauccaccaggcccugcuccuggugccccugaugaucagcucccagugccucggcaaguuccccaucuacaccauccccgacaagcuggggcccuggagccccaucgacauccaccaccuguccugcccgaacaaccucaucgucgaggacgagggcugcaccagccuguccgggcugagcuacauggagcucaaggugggcuacaucuccgccaucaaggugaacggguucacgugcaccggcgucgugaccgaggcggagaccuacacgaacuucgugggcuacgucaccaccaccuucaagcgcaagcacuuccggcccaugcccgacgccugccgcgccgccuacaacuggaagaucgccggggacccccgguacgaggagagccugcagaacccguaccccgacucccacuggcugcgcacggugaagaccaccaaggagagccucaucaucaucucccccagcguggcggaccuggaccccuacgacaagucccugcggagccgcgucuucccgggcgggaagugccucggcaucaccaucuccagcacguacugcuccaccaaccacgacuacaccaucuggaugcccgaggaggcccggcuggggaccagcugcgacaucuucacgaacuccaagggcaagcgcgccagcaagggcgggaagaucugcggcuucguggacgagcgggggcuguacaagagccucaagggcgccugcaagcugaagcugugcggcguguccgggcuccgccugauggacggcaccugggucagcauccagauccccgacgagaucaaguggugccccuccgaccagcuggugaaccuccacgacuuccacagcgacgagaucgagcaccugguggucgaggagcuggugaagaagcgggaggagugccucgacgcgcuggaguccaucaugaccaccaagagcguguccuuccgccggcugagccaccuccgcaagcuggucccgggguucggcaaggccuacacgaucuucaacaagacccugauggaggccgacgcccacuacaacuccgugcggaccuggaacgagaucauccccagcaaggggugccucaaggugggcggccgcugccacccccacgucgacgggguguucuucaacggcaucaucauggggcccgacggcuccgugcugaucccggagaugcagagcucccugcuccagcagcacauggagcugcuggagagcuccgucaucccccucaugcacccccuggccgaccccagcaccguguucaaggacgacgacgaggcggagaacuucgucgaggugcaccucccggacauccacaagcaggucuccgggaucgaccugggccugcccgacuggggcaaguaccugcucaugagcacgggggcccuggccgcccugauccucaccaucuuccugauccugugcugccggaaggugaaccgcaaggaguccauccagcggagccuggaggagagcggccgcaaggugcccgugaccccgcagaacgggaaggucaucuccagcugggagcucuacaagaacggcggggagaccaagcuguga

SEQ ID NO: 95705 - RNA, 1575 nt, Artificial Sequence
  derived and/or modified CDS sequence (opt1) from glycoprotein__RABV__KM594030.1
augaucccccaggcccugcuguucgugcugcugcucaucagcuccagcugcuucggcaaguucccggucuacaccauccccgacaagcuggggcccuggucccccaucgacauccaccaccugagcugcccgaacaaccucaucguggaggacgagggcugcaacaaccuguccggguucagcuacauggagcugaaggugggcuacaucuccgccaucaaggucaacggguucacgugcaccggcguggugaccgaggcggagaccuacaccaacuucgucggcuacgugacgaccaccuucaagcgcaagcacuuccggcccacccccgacgccugccgcgccgccuacaacuggaagauggccggggacccccgguacgaggagagccuccacaacccguaccccgacuaccacuggcugcgcacggugaagaccaccaaggagucccugaucaucaucagccccuccgucgcggaccucgaccccuacgacaagagccugcacucccggguguucccgagcggcaagugccuggggaucaccaucuccagcacguacugcuccaccaaccacgacuacaccaucuggaugcccgagaaggcccgccucggcaccagcugcgacaucuucacgaacuccaaggggaagaaggccagcaagggcggcaaggugugcggguucgucgacgagcggggccuguacaagagccugaagggggccugcaagcucaagcugugcggcgugcccggccugcgccucauggacgggaccuggguguccguccagacccccgacgaggcgaaguggugcccgcccgaccagcuggugaaccugcacgacuuccacagcgacgagaucgagcaccucguggucgaggagcuggugaagaagcgggaggagugccuggacacccucgaguccaucaugacgaccaagagcguguccuuccgccggcugagccaccuccgcaagcucguccccggcuucgggaaggccuacaccaucuucaacaagacccugauggaggccgacgcccacuacaaguccgugcacacguggaacgaggugauccccagcaagggcugccugaaggucgggggccggugccacccgcacgugaacggcgucuuccucaacgggaucauccugggccccgacgggaacgugcugauccccgagaugcaguccagccuccugcagcagcacauggagcugcucgaguccagcgugaucccccugaugcacccgcuguccgaccccagcaccgucuucaaggacggcgacgaggccgaggacuucguggaggugcaccuccccgacguccacaagcaggucuccgggguggacuucggccugcccaacuggggccgcuacgugcugaugagcgcgggggugcucgccauccugauccugaccaucuuccucaugaucugcugccggcgcgugaaccggaaggacuccagccgcuccagcccgggcgagcuggggcggaaggucagcgugacgccccagaacggcaaggugaucuccagcugggaguccuacaagagcgagggggagacccgccuguga

SEQ ID NO: 95706 - RNA, 1575 nt, Artificial Sequence
  derived and/or modified CDS sequence (opt1) from glycoprotein__RABV__KM594031.1
augaucccccaggcccugcuguucgugcugcugcucaucagcuccagcugcuucggcaaguucccggucuacaccauccccgacaagcuggggcccuggucccccaucgacauccaccaccugagcugcccgaacaaccucaucguggaggacgagggcugcaacaaccuguccggguucagcuacauggagcugaaggugggcuacaucuccgccaucaaggucaacggguucacgugcaccggcguggugaccgaggcggagaccuacaccaacuucgucggcuacgugacgaccaccuucaagcgcaagcacuuccggcccacccccgacgccugccgcgccgccuacaacuggaagauggccggggacccccgguacgaggagagccuccacaacccguaccccgacuaccacuggcugcgcacggugaagaccaccaaggagucccugaucaucaucagccccuccgucgcggaccucgaccccuacgacaagagccugcacucccggguguucccgagcggcaagugccuggggaucaccaucuccagcacguacugcuccaccaaccacgacuacaccaucuggaugcccgagaaggcccgccucggcaccagcugcgacaucuucacgaacuccaaggggaagaaggccagcaagggcggcaaggugugcggguucgucgacgagcggggccuguacaagagccugaagggggccugcaagcucaagcugugcggcgugcccggccugcgccucauggacgggaccuggguguccguccagacccccgacgaggcgaaguggugcccgcccgaccagcuggugaaccugcacgacuuccacagcgacgagaucgagcaccucguggucgaggagcuggugaagaagcgggaggagugccuggacacccucgaguccaucaugacgaccaagagcguguccuuccgccggcugagccaccuccgcaagcucguccccggcuucgggaaggccuacaccaucuucaacaagacccugauggaggccgacgcccacuacaaguccgugcacacguggaacgaggugauccccagcaagggcugccugaaggucgggggccggugccacccgcacgugaacggcgucuuccucaacgggaucauccugggccccgacgggaacgugcugauccccgagaugcaguccagccuccugcagcagcacauggagcugcucgaguccagcgugaucccccugaugcacccgcuguccgaccccagcaccgucuucaaggacggcgacgaggccgaggacuucguggaggugcaccuccccgacguccacaagcaggucuccgggguggacuucggccugcccaacuggggccgcuacgugcugaugagcgcgggggugcucgccauccugauccugaccaucuuccucaugaucugcugccggcgcgugaaccggaaggacuccagccgcuccagccugggcgagcuggggcggaaggucagcgugaccccgcagaacggcaaggugaucuccagcugggaguccuacaagagcgagggggagacgcgccuguga

SEQ ID NO: 95707 - RNA, 1575 nt, Artificial Sequence
  derived and/or modified CDS sequence (opt1) from glycoprotein__RABV__KM594032.1
augaucccccaggcccugcuguucgugcugcugcucaucagcucccugugcagcggcaaguucccgaucuacaccauccccgacaagcuggggcccuggucccccaucgacauccaccaccucagcugcccgaacaaccugaucgucgaggacgagggcugcuccagccuguccggguucagcuacauggagcucaaggugggcuacaucuccgccaucaaggugaacggguucacgugcaccggcgucgugaccgaggcggagaccuacaccaacuucgugggcuacgucacgaccaccuucaagcgcaagcacuuccggcccaugcccgacgccugccgcgccgccuacaacuggaagauggccggggacccccgguacgaggagagccugcacaacccguaccccgacuaccacuggcugcgcaccgugaagacgaccaaggagucccucaucaucaucagccccuccguggcggaccuggaccccuacgacaagagccugcacucccgggucuucccgggcgggaagugccucggcaucaccaucagcuccaccuacugcagcacgaaccacgacuacaccaucuggaugcccgaggagccccgccugcggaccuccugcgacaucuucaccaacagcaaggggaagcgcgccagcaagggcggcaagaugugcggguucguggacgagcggggccuguacaagucccucaagggggccugcaagcugaagcugugcggcgugcccggccuccgccugauggacgggacgugggucagcgugcagaccccggacgagaccaaguggugcucccccgaccagcuggugaaccuccacgacuuccacagcgacgagaucgagcaccuggucguggaggagcuggugaagaagcgggaggagugccucgacacccuggaguccaucaugacgaccaagagcgucuccuuccgccggcugagccaccuccgcaagcuggugcccggcuucgggaaggccuacaccaucuucaacaagacccugauggaggcggacgcccacuacaaguccauccagacguggaacgaggugauccccagcaagggcugccucaaggucgggggccggugccacccgcacgugaacggcguguuccugaacgggaucauccugggccccgacgggaacguccucauccccgagaugcaguccagccugcugcagcagcacauggagcuccuggaguccagcgugaucccccugaugcacccgcucuccgaccccagcaccgucuucaaggacggcgacgaggccgaggacuucguggaggugcaccuccccgacguccacaagcaggucuccgggguggacuucggccugcccaacuggggccgcuacgugcucaugagcgccggggcccuggcgauccugaugcucaccaucuuccugaugaucugcugccggaaggugaagcgcaccgacuccagccagagcucccuggaggagcugcggcgcaaggugagcgucacgccgcagaacggcaaggugaucuccagcugggaguccuacaagagcgagggggagacccggcucuga

SEQ ID NO: 95708 - RNA, 1575 nt, Artificial Sequence
  derived and/or modified CDS sequence (opt1) from glycoprotein__RABV__KM594033.1
augaucccccaggcccugcuccuggugccccuggucaucagcucccucugccugggcaaguuccccaucuacaccauccccgacaagcuggggcccuggagcccgaucgacauccaccaccucuccugccccaacaaccuggugguggaggacgagggcugcaccagccuguccggguucagcuacauggagcucaaggucggcuacaucuccgccaucaaggugaacggguucacgugcaccggcguggucaccgaggcggagaccuacacgaacuucgugggcuacgugaccaccaccuucaagcgcaagcacuuccggcccaugagcgacgccugccgcgccgccuacaacuggaaggucgccggggacccccgguacgaggagucccugcagaacccguaccccgacuaccacuggcugcgcacggugaagaccaccaaggagagccucaucaucaucucccccagcguggcggaccuggaccccuacgacaagucccugcggagccgcaucuucccgggcgggaagugccucggcaucaccgucuccagcacguacugcuccaccaaccacgacuacaccaucuggaugcccgaggaggcccggcuggggaccuacugcgacaucuucacgaacagcaagggcaagcgcgccuccaagggcgggaagaucugcggcuucguggacgagcgggggcuguacaagagccucaagggcgccugccgccugaagcugugcggcgugagcgggcuccggcugauggacggcaccugggucgcgauccagaccuccgaggagaccaaguggugccccagcgaccagcuggugaaccuccacgacuuccacuccgacgagaucgagcaccugguggucgaggagcuggugaagaagcgcgaggagugccucgacacgcuggagagcaucaugaccaccaaguccgugagcuuccggcgccugucccaccuccggaagcugguccccggguucggcaaggccuacaccaucuucaacaagacgcugauggaggccgacgcccacuacaacagcgugcgcaccuggaacgagaucaucccguccaaggggugccucaaggugggcggccggugccacccccacgucgacgggguguucuucaacggcaucauccuggggcccgacggcaacguccugauccccgagaugcagagcucccuccugcagcagcacauggagcugcucgagagcuccgugaucccgcugaugcacccccuggccgaccccagcaccguguucaaggagggggacgaggcggagaacuucgucgaggugcaccuccccgacauccacaagcaggucuccggcaucgaccugggccugccgaacugggggaaguaccuccugaugagcgccggcgcccuggccgcccucauccugaccaucuuccugaucacgugcugccgccgggugaaccgcaccgaguccaucaagcgggggcccgaggagagccgccgcaagguguccgugaccccgcagaacggcaaggucaucagcagcugggagcuguacaagaacgggggcgagaccaagcucuga

SEQ ID NO: 95709 - RNA, 1575 nt, Artificial Sequence
  derived and/or modified CDS sequence (opt1) from glycoprotein__RABV__KM594034.1
augaucccccaggcccugcuccuggugccgcuggucaucagcucccucugccugggcaaguuccccaucuacaccauccccgacaagcuggggcccuggagcccgaucgacauccaccaccucuccugccccaacaaccuggugguggaggacgagggcugcaccagccuguccggguucagcuacauggagcucaaggucggcuacaucuccgccaucaaggugaacggguucacgugcaccggcguggucaccgaggcggagaccuacacgaacuucgugggcuacgugaccaccaccuucaagcgcaagcacuuccggcccaugagcggggccugccgcgccgccuacaacuggaaggucgccggcgacccccgguacgaggagucccugcagaacccguaccccgacuaccacuggcugcgcacggugaagaccaccaaggagagccucaucaucaucucccccagcguggcggaccuggaccccuacgacaagucccugcggagccgcaucuuccccgggggcaagugccucgggaucaccgucuccagcacguacugcuccaccaaccacgacuacaccaucuggaugcccgaggaggcccggcugggcaccagcugcgacaucuucacgaacuccaagggcaagcgcgccagcaagggcgggaagaucugcggguucguggacgagcggggccuguacaagagccucaagggcgccugccgccugaagcugugcgggguguccggccuccggcugauggacgggaccugggucgcgauccagaccagcgaggagaccaaguggugccccuccgaccagcuggugaaccuccacgacuuccacagcgacgagaucgagcaccugguggucgaggagcuggugaagaagcgcgaggagugccucgacacgcuggaguccaucaugaccaccaagagcguguccuuccggcgccugagccaccuccggaagcugguccccggcuucgggaaggccuacaccaucuucaacaagacgcugauggaggccgacgcccacuacaacuccgugcgcaccuggaacgagaucaucccgagcaagggcugccuccgggugggcgggcgcugccacccccacgucgacggcguguucuucaacgggaucauccugggccccgacgggaacguccugauccccgagaugcaguccagccuccugcagcagcacauggagcugcucgaguccagcgugaucccgcugaugcacccccuggccgaccccuccaccguguucaaggagggcgacgaggcggagaacuucgucgaggugcaccuccccgacauccacaagcaggucagcggcaucgaccuggggcugccgaacuggggcaaguaccuccugauguccgccggggcccuggccgcccucauccugaccaucuuccugaucacgugcugccggcgcgugaaccggaccgagagcaucaagcagggccccgaggagucccgccgcaaggugagcgugaccccgcagaacgggaaggucaucagcuccugggagcuguacaagaacggcggcgagaccaagcucuga
